United States Patent Application Publication US 2007/0237770 A1 - sequence listing, part 13

SEQ ID NO: 1294 - DNA, 96599 bp, Mus musculus
  misc_feature (3201)..(3220): n = a, g, c, or t.
  misc_feature (9284)..(9303): n = a, g, c, or t.
  misc_feature (24284)..(24303): n = a, g, c, or t.
  misc_feature (28552)..(29294): n = a, g, c, or t.
  misc_feature (37287)..(37691): n = a, g, c, or t.
  misc_feature (38785)..(38975): n = a, g, c, or t.
  misc_feature (43542)..(43561): n = a, g, c, or t.
  misc_feature (56238)..(56604): n = a, g, c, or t.
  misc_feature (64207)..(64226): n = a, g, c, or t.
  misc_feature (65794)..(65813): n = a, g, c, or t.
  misc_feature (70927)..(71719): n = a, g, c, or t.
  misc_feature (73054)..(73136): n = a, g, c, or t.
  misc_feature (76927)..(77052): n = a, g, c, or t.
cctgaaaagagtctttaattttccctctgaaatttcacaagccaggcttccatcttctgcactgttctcaacatcatcttccaacctcctacacaacatctgacagagcacttaacagggaatggatcttctagcccaaagttccaaagtccttccacagtcctcccccaaacatggtcaggttgtcacaggaataccccactatgctggtaccaatttgtcttagtcagggtttctattcctgcacaaacataacaagttggagaggaaagggtttattcagcttacacttccacattgctgttcatcaccaaggaagtcaggattggaactcaagcaggtcaggaagcagtagctgatgcagaagccatggagagatgttacttactggcttgcttcccctggcttgctcagcctgctctcttatagaacccaagactgccagcccagagatggtcccacccacaaggggcctttccccacttgatcactaattgagaaaatgccttacagttggatctcatgaaggcatttccccaactgaagctcctttctctgtgataactccagcctgtgtcaagttgacacaaaactagccagtacaatcatcttagggccaggagtgggatagaaggaggtgcacacagaaccacgcacatatgccaaagctgaaagccataccagcctggtctgtggctgcttagattcgcttgtcgcacgtcacaccactgaaagaagcatctcccaccccggagagtgactgtccagatctggattcatggtgggctttcagagctgtgccgagcagaaaggcacacagccctttgttttcaaagtgcgcccagtgggctggactccactgcctgtttgtttcctttccacaactatactgtctgagcagaagaacgccacgatggtcctcagagatggtggcttgggcatttttgcctgcctgcatgtctgagtaccatttatacacccatggagtttatgttacaactcataaaagtaccctggagtaaattcctgaaactatctgcaaaaagtatcccaaagtttacgctgatgaaaatgaaatctataatcaagtattccttttgaatagaaaaaaaaagggccttccactaaatatggaaatcatcaggctgcatagtaggtggtataaggaccaaacaggaaagttccagaaagaaagatataaataatgtattcaaatcgaaagtgtttgacatttcaaagtatctcctttgggttttatgcatggtgccaccgaggtgttcacactgtgtttgtataaaattttaattttctcttaccttcaatgtggaccatgcttaagttaacaataaacgaaagtatctacacaggaagaagcatttatgtgatcagaggtaaatgctgggagagataacagagtgagtggcaagagtcctccaggctctcagtctggaagaaatagccattataaggtcgtctcatggaagggtgccagcattggtcgtatgtcctgtgaagcacaaggccataattcaaccagcttcacatcactgagaagtcaagggaagacgtgacgacaaataaaatggagataagtagagaatatcctgtctaatgatgggtccattaagttggtgaccctgacatggctgggcacacagtgtgaatttaatcaggcccacccaccccatgtgtctccatcatcagtgcccatggcataggcttgggctgcttggtccaaacacttccttctctcttctatcgtatggtggcttgaacatggctggctgttttctttctcatctccaatgatctgaacttggagtgtgactggcagatggtaatagcaaccgttatcttctctccgtcctttccatcaacagactgtcttcccagcccagagcaggattaaacaggtaagaagtaaacctctttgttaagaagagggaagtctgacaggccgtggaggcaggcacccaaaaccccagaactctggaggtggaggcaggaagataaaaagttggagatgaacctcagctacatagtgaattcaaggccagtctggattgctctagacctaatttcaaaaccaaacatacagagaggagcttaaagtcaggatccttagtttgaagttcaaaaacaaacagacaacaacaacaacaacaacaacaacaacaacaacaacaagcatgactgactgtttagttgcaaagttccacacatgataaaaaaaaaaacttaaaattttaggaactattacaaaagaagttgttcgtggacaaaacaaacaaacacccccccccaaaccaaaccaaaccaaaaacctaaaagaatgttagaaatcaaactataaaacacatcccagaaccattatcatgacacaatctcaaaaaaaaaaatcattatttttttttcactcaaaaacctgagataagtagagtatgcctaaaatttgtgtgtcccccacctgccaccgtaaggtgttttgggtatgtgcctcaagagtcattaattagattcacattatttacttgtgaagaaggaaataagaggggaagttggacagaaattagtatttttgcttaagaagtaaacacactgaccggagttcagcatgtttctcagcaaatccctggaattatggattaagaggcaaggagggaacagtcacaaatgcctccagggggccagcaagttaagaaacctttgtgcttctctgatgtagaagaggcgatttggaaatttacagcatgatttttgaaaccgtacgtggattccataattcccactgctcataaagtccagactccttgatctagctctgcccacctcttaccacacgttatgtcctcccaactctttctgccaactctcagaagatgccaggtctccgactcatggggcattggtcccagcttgttcctctgttcaggttccttatccacactggtatgtgatgtcacggcttcctccctgtttacatgctgaaatctaacttccactacccagaatgtgaccttatatttacatacttatgtgtttgtttagagacagggccttactatgtagccctggctagcccagaaatctctatgtagaccaggctagcctcacattcagatctgcctgctggaatccaggcatgcaccatcccatcgagcctttaggtgggtgctgaggacttgaactctggtcctcgtnnnnnnnnnnnnnnnnnnnnaactctggtcctcgtatccccccagtaactactttaccaactgagccatgtctccagctctactttgctgagtttaggggttacacatctgaaatttctctccttaatccctaaaggagtcacagcagtcctttcggatgaacatcaagatacagctgtggagccgtcctcacttcgctgctaaggcagaagcttgggaaatgatgacaaaaaccaactcatgtcagggtttggaagtggcaagccttccctttggacaagaacactcatcacacagagggggttggggagaggggggtggtgagagagggaggaaagaagggagggggggagagagagagagagacagagagagagaggcagagagagagagacagagagagacagaggcagagacagagatacacagagacagagttggggggcagggacagacacagagacagagttaggggaagggagagctatagagctatcctggaaatcgtagagttatgtttcctttctatttatcagaatacttattactaagcattgggtaatctgttacccaaaactcatgattctcatgatgttgtaacaaactaagggttgtttctttttccagtgaaatagaagcaaggagcaaacactcaaaagtgtctccaatgtgtttccagattcacagaactccctttaaggcgtgcacatcaccgaagtcctgctgcctttgccagaatctgatctgtaacctcccgtagtctttactcactctgtacttcaccgggatgatctctgcagtgatctctctgcacggacttaaacttgtattgagcatgcggactttgccttgtattgagcatgtgctctggcaggcatggaaccctcactgtgcatcctcttatgtcctcccgcctgaattttagaaccacagaggagtgccccagtggctggcacaggagtggttccagtgacgggggtggggggtgcagaactgcaaccttagctggcagagggtctctggtttcatctcaagggtacttagactttggttaacaagctagacagtacaccttcttacaactgtgatgtgcaattctaaggcctgtgataatagctagaggccatgtccctgccattccggggatgctatattggaaatcgacatggtaattgactagactatttaaaaaaaaaaaaagtgttccagatgactgtggttttggttcctttggtccattgctatatagccagtgctaagtagcattttctggacgcccagcacgtatttgtgaattgagtaatgatgttattaaaagtatctcctttatcagtaagataaattagatgtccattttaaaaaggggttcactctgagtgtgtcttcagtttctctggtttgccaagatgtactcatagagagagttacacacaccctgcttaaatacctattgtcctaactctcctgaagagatccctatccacacacccagggagatcctgtaggacgcccattctgcagataaaatgaaaaatgcaatccctgagaatatattctaattttactataacgcaaatggtactcttctcacagactaccaaaaagactgtatttttctatattgattcattttccacagagatgtgtgtgtgtgcatgcgtatgagtatgtgtgtgtgcatgcgtatgagtatgtgtgtgtgcatcatcaaagagtcaagaaatattttgtgactatgtggatcagtaccatgtggatgttctgagtcatatttatatctctgatctacagtgacatttcatcaagggcgtaagaacacggtcctattcatcctacgttttatgagctcaagggcctggaaaattgcaaacagtacctatgtctaagggagccccaggggctcaaactagttgtgtgtgtgtttggtgagggggcggtgctgtgatgtttcccagattcctggctcctgatgacatgaccaatatgcgtttgtagggaaagatgttatgagtactttaagagtgtaatcccagaatttgtaaggccaagcgaggaggatcctgacttcaaggcagcctgggcttgagatggtctgtgttttcctagtgtgagtattgacctgaatttggaatatatatgaatctcactggcatctaggaagtgatatatgtcagtagctcagagtttattttgaaatcatcaccaaatatggatgcttctcaacttgtaaggtgcctgacccccataaacacatttaccagtggaagcactgtatcctaaaatgctattgacatacctagtttagagaaagagtgtagcaactgggacattgcagtgtgtgggttgtttcacagggtggccctgtggttgaatgggagatgaaaaggtctgccattgcccaacatggcaacaaagtattatactgcttagtgctagtccaggaaaagacccacattcagaatttgccgtatgctttctactgagtccttgttgcttttgtaccattgcataattggaaaattgtaagtaaatgattgttaagttcaggaccatctgtagtgatatctcaggctctgggcgtggatgagagcgcccaaagagaaaaaaaaaaaaaaacccaaacatataaaatgagaaaataagagggttggagacggggtgcctggaaacaccataatttaggaggctggcagcaaaagaagagccagccaagaagcggaacagaacgggacagaacgatgtcacagaagcccagcgggggatgggaagtgcagactgcaccaggaaaccatgagcagacaaggatgggaaatggcacattcgaaagattacgaatgggaagcacatagaaatatccataggtctatttctgaggataaaattgcgggactccacctccgtatgtgtgtgtgtgtgtgtgtgtgtatgtgtgtgtgtgtgtgtatacagttatgtacatggtggatgtaaataagacagattcctgtctttgcttactttaagaaaatactaccaattgagctacatcttcaaccttgtttctttttaaacaaggtttccctatgtagctcaggcttgccttgaactcagacttcctcagcctggcaaatgctgggattgcagatgcttgctactacgcccaacaactcttattttctttcaacttctctatgttttctgacttccatctaatgttacatttgtattaaaatgttcttaatgggatctggcctaatggttcaaccgttaagaggacgtacaactcttgcagaggacccaggttcaggttccagtacccaaatggaaactcacagccatccacagttcagttccaggagatctgcgtcttcttttgacctccaggcacacacagaatccacatgcctacaggcaaaacatgcatgcacacaaaataaaaataaaataacgtttttttcctttttttttttaaaggatttatttatttatttttacatatgtgactacactgtggctgtcttcagacataccagcagagggcagcagatcccactatagatggttgtgagccaccaggtggtttgctgggaattgaactcaggacctctagaagagcagccagggctcttaaccactgagccatctctccagcccctcaaccaaccttttaaaatgctattgaagtataaaacaaatgcgctgagaaagtctggactattccgtacgaactcagagataagagcaaggaattgtggattcaaaaatagttgaccctctatgtgctgggccccaggctaatgacaaataagggatgtgagaatgactgtgacattctgcaaattaaggaaaagactgttggtttgcaagggggtggggatataggcacttgagctggtaacacgtgaggctagctgatagtctgctaccacattaaactgatttcacgtgccttataaccaagatggcctctattctgtaagctccagatgagcttctgaggggcagagaggacacgagttgggcttgaagggaagaaaatgtctgcttgatttggataaccatgtgtctattgacgtggacaaacccaagggaggtgactgggcatggtgctcagggactgccatgatccatctcatctggagaccctggggggttgcatggacctgtaactaggctgtgattgattgtgactggatgtgtactgataggactggatggatggattgctagaccgtgtgggaaagaaggaatcaagaactgaaaaaaaaaattaacagtccaagaaaacttttttatgtgtggttaaagaccacacataagtagggcattgctctttctgaaacagtgagattggggtgcacttagagcgggcaggactgtttcctgatggagaatctagtgaagacacaaatgggaagccaatcgtcaggaaagcacggagacaggatgctccctgtgcctggcaatggggtttccaggactagcctctgttcacggatacagggccttaggatgcctcttagagatttgtggacatggtcctctctggctcccctgagttttcatctctgaggaagctcctatcatagatagcagggaagagacatcggttggccccaccagacctcattgtttctgtcgttccttcggcctgcacatgaaggatgctgaaccgagataagaagctcagaaagaaggcgtgtggatggggaccggaggggctatttatgtaggcctttcctctccctgttctagggaagagaagacaatgggttgcacaccgattaaaataaacagagatagcacaggcccataattccaggattcaagagccaaggcaggaacgttgttagttcccggacagcttggaaaacaattctggttcacctagacttcctaagatgatcctgtctagaaaaaaaacaaaaaacaaaacaaacaaacaaacaaaaaacccagacacacaaacaaacaagcaaaaataaaaaacagcaacagcaaagaaaacaacaacaaaaggggccgcagagatgggggaagggggcttgctgagcaagcaatggggagttgagttcaaatccccaagactcttgaaaagccaggtctggctctgtgcccacctcattccagtgctgtggctggcagagacatgaagattgctggagtggctggctaccagcctagttctaggttcagtgagaaaccctgtctccaatcaacaccgtggagaagggctgagcaggacactctggcctccgtgagtacacatgcacacatgcacacatgtaccacactcacccatacacacacaaagccagaaaataatgacctgtggttattaggcttttaacttaggtgcctggtgggtaaagacatacaactaccatgcagtgtgtatatccctgtggttactgatatatgaaatataaatgcaaggagtgtgcagtgttattatgggagaaataaaggacactgtgcaggaaggatctattttgaggccacaagacagggtccttaatctcactgctctccttctacaagggcatgcatactttcctttatccctgtctgtggaatccactaattctatggcaaagaggaggtagaattatttttcagatgtttacacatagatagtgacagtctcctagggtgggatgctttccccagtggttagagaaggcaggtggtgggctgaggaaactgtaagccaggcaagaagcaggtgtaactaaatgtaagggaatacttttaaagttaagtgaccaaacagcaagaggttccaagcgagctggcctagtagagcccataggccgctgcacctgtcataggtactgggccctcttcttgcattcagtattgtctccacggaacagcacagaggacagcagccaaggatgttcaaccaataaggacagccaaatttaggagttaacaggcagcgttccctccaggttcagtcccaatcaagacagtttaagttcatgtaactcaaacccttgcattttgcaggaactggaccggttatggcaaagacatgaagtaactttggagagtgactttctaggggaaggccttcctaaccatcctagcttccacactgannnnnnnnnnnnnnnnnnnncccagtaggagatccaataaagtaggggcacaagtaatgccgtcttttcagctgacttcgttccttacattcctttgcagcgggcgactttccaagatgagtttgtatatgcagcctgtgcacagcggttctgagcacttaagccacaggtcgggaagggtccccaggcttccggggctctctctggtccatctccacccttcaggtaggatgtagagtcaggtcatctccttccttccctacggccaccaccagctggtggccagctcccaagccagcgccccgtccaccacttctggtgccccacagtcccagcgtggccccggtgaaaagcgcgcgcccttcggcgcgatccccacgctcacacgcgctgccgcttgttgctccccgcagccgcgacgtggggaagtgaaaatgaaattgacttttccgagaaatgatgaaagccgtgccggccgccaatgaacagcggcggcgaacttccgcacctccaggctggcggctggagccctccctctgcctccacctccgggttgcacaagcttgaaacaaacactggggaggaagggcggggagggaggagggcggagggggagcgagggagggagcggggccgggagagggcgggggtgggggggatttccagcctcggctcctcgcagtttcctctccttgttttgctttcgatctggactgttctcaggcaagccggggactaacttttagttttgctcctgcgattattcaactgacgggctttcatttccattttacacaccctaacaacactcacaccttgcgggattgtattggtagcgtggaaaaaaaaaagcacattgagaggtaacatttttttttttcaaataatagttgtggctgtgcgtgtgttttctctcgagggcatgttgacggggacaggaggagctatgtatgtatgtgcgtcctgatgctttgacacgatgttttgcagacggaaaaatgccggggttcataaatattaataccgatttttggaggaagagtcggcgcagttatggatcatctgattttaggggaagcaggggtctgctgctgttgccgctggtactggggctgctgaggctgcaaagaggaggaggtagagagggaggaggaggaggttagtgaaggtttaatttcacttttggatttgcagatgagaagaggtggctccatggacacagatctgctctgtgtgattctgcgctccaggtgtcgtgtgttgtgggtacaggtccgttggagtccggcctcatttaaaataaaattggtgtgtgtgtgtgtgtgtgtgtgttgtatgtgtatgagtgtttacagacactgtcgccaccaggtccgaggaagggaaccgggttcttctcggtgcccagcggcccttctttcccggcggtctctggtgtaaatagactggcacccgcggtccctagatgcccgtgcccgggcagtgaccactgtaaacttgaaggctgccctaaggcggtcccaggatgcgctcgcccgcggggcttggggtcgggtgaccggcgtctggtgccagtggacactcgggccgggcgggctccgcgcgcggctgggcgcgggcctggccggcgcgcccggcttcctggggactgggccgccgccacacgccaggaacgtcgcgtcctcctccccgccggccagcgtctggcctggcctccgggctttgtcactgcacttgtcccagcgcgtgaggcgcctcggaggcgcgtccccggagggctccgcgctcaggggtcacccaccccggcgcggcctagctgcgagtgcctccgggtccccgcgggcgcccccggggccggcctggcgcgctgggccccgacccgccttggctacggaacgggcgaggtgtgggggcggggaacctccggggaccgagcggcgcccggcgggctagcatggggttgggggtgaggctgacgaacgcttggggtctccgggacgtggtgggaatgagtgcccgccctgtgccctccgacccgctccgggcgccgggtgacattcgcccgccggccgaacatggttggtgcagagcggcagccaccacttcctctccgccccgccggcccggctctctgggcgagcgatgcgggccgcggccaatcgcggtgcccagctagtccctgtcgctcggccttgggggccggctcccctgagcggcccgggaagccttcgcgagagctcagggccccggctccccggacgctgtccgctgggccccggctctcggaccgtttgccaccctcagtccctcgccccttaggagcagggaagggaaggaggctagtagcctccgccgcgagccaggactgtgctcgggccccaggtgagacgcccggatcagtcggtggaggcgagatccttggtggtcggatgtaaataagacccctgggattggcaggccaccttgtcactcgtttgcgagcgggtttgcaggtccttaagcccagtgtgtttgaaacttgggggacatgtttcttgtcccctcctccctcccgcgtgggcactccttgtccttccttggttgtgtctgtaccagggaggcaaagtagtcctggggttagctttctgccactcgcctccctgtggctgggactccgggctgctcttgatgaatggctcctgagggtggaggacagttacatttcctgttgtgcattttcaggaatcacgggagcttgggagcttgttgtcatgcctgaagtcatttattagttttgtttgttggttgtttttgtttttgtttttgtttttttttatatcgactgactgcaagtaacatttgaagttagcagcctgcacttaaggtgcttaagggcaggtgcagggacccgtttgtttagcctactgtttttagaaggtggttgattgcatggtagacagatgcacactgcttggttagggcagagccctagaggttgccctgtttaacttaatcactcgcccaagtgcaggagtctctgatttttctcaactctcattcttttttggggggtggggtggcgtgtgtcacaaaaatagaaaccaataaaagcttggcatttggcttttctaaggcagcttcaagcaaatggaatatttcaggcttgagttggcatctctaaggggtaacgttggagcatctattgattgatggggcaaagtccggaacgtcactgtgattggtgaatgattataatttatagcctagcttgttgcgtaagaagttagattttgtcttgtgcttagatccaagagatcttgcctgttatgatttgttactgcttcttaaaattaaacacttacatatttcattctcaatgagtggtcttttttcccccccttgacctgcaaaagttaggaagagttgcacgtgtttcagaatgacttaacctgtaaaaatggcatcttcatgaaacaaaaaaagaggacttgtaatcaaattggaagcaaattgaggcaaaagagaaattgacatgaagtcctgaaggctctaggaactatgggctcctgaaatactttattaagtaaatatttaatataccagagcgagtgaaagctgtttaaatctaagagtggaagacttgaaactttggatagtcccttgacgcacattgatttcctcacatatccaagtgcaccactcttttaatctcagctttattcggtaaaatctggatcctcttttccagctttccccccaccccacccccttttttaatggcaaatagactactgaactacaccgggaattttattgcagatcccttatctgcctcctgccaaacaggccttagcgcaatctggagaacttatttatatatttgacaaatatttgtgggccatgaactaccagacacagtggcaggctctgtgaacccaactagaaccgtgaaggacagatagcctcttcaagttctacagaagttgcattctagctgtgagctgacaacaaccaaaaataaatccagtaattacctctgggggttggtctaagaaagggaatagtgtattctacttaccgggctgctttgggggaacaattgtgatactgtgtgtggaagaacattgtgtaaattatagtaacccacaaatgtgtcatgtattgactttctaagttctgttagattactgttaaagcgaatattagagaggtgagtgtcccggtacatactttttatcccattgaggctgaggcaggaggattgtgagttcaagtttagatacaggctgagagcttgtctttaaaataaaagtgaggaatcacaacaggacaggacagtgcctctgagggtacacaaatcatggcaaagaattacacatttggataactattatatgtaaagtatcaaaaatgtttagcagtgaaatattatgtgaatttttttctcttttttttggcctgctaggagaacagttgactggtatccatgaagaccaaatgatgtggggataactgacttggatgcatgtttttccaatttatttatacattaaattctttattgtaatgaacttacccataaagacatcataaaggtagagagaggcggccattcagacaaacacttgcccaatccccgtctctgtgatttctctgaacctctctgtggttggaaagggcccctctgaagtccacaaacatcacctggggggcttgcatttcgttaatcgttacatagttacacctaccactaacattaaaacctagaaaaacattagctttatgttctccttcatgcctcatggttccctttgcagtctgtctttccccatcacctaatagtactctttcttggtctcttttctaaatagcataggacacccacacttatagctgtgtacataggggtgtgtgtgtattataggctaggacctgagtatgagggacaatatgtttcccctttttataatgcaacacacaggtgtcactattctttggtctgaattttcttcaccgtcgtgtcagactcattaagttattgctgttatgggtatggcttagttctattctgcagtccattgcgctgtcattaaagggacttagttctattctgcagtccattgcgctgtcattaaagggacttagttctattctgcagtccattgcgctgtcattaaagggacttggttgacttggattcactgacgagtgcgcaacactatgtgagtaaaataatacgacattataagcgagaatgaacatcaatagtatagatttgtaatatatgatatgtgaacaaatacattgctgtgaagtaacaggaagtattaacagtaaagccaatgctattcatatgtatggcactccatactccttcctggacagggggagaggtgagcaggactttctacctctgtctgccctactcctgtactgctctttggtttgcatggattaatatttagttaagaatatcagcttaatgtataatggggctgagttgagtgggggtgttagccagtggagattgtagctaaggaggtttgatcaagctttgacttagccccaaaggaataataaattatgtataggtaccagatttaaacatgaagccattattttcaaataaaatgccaaggaaaacaatgacccagaaaaatgcaagccccaggcagctaccacccaaactgtggccatgtggtgaagatttcccaggctctgtgtgaattcagagcgagcagtaggcctatgatggctagcccttgactgtcaggtagccctttaagttgattttacaccttacaggattcatcttaggacagtccctgagacaaactgttcacgtaggaagccttcatgtgatttcttttcagtacttggatacctgtggcttccagtcagaactcctggtcaacttgtaaaaaaatgtgattcgggggctggcgagatggctcagtgagtaagagcactgactgctcttctgaaggtcctgagttcaaatcccagcaaccacatggtggctcacaaccatctgtaataggatctgatgccctcttctggtgtgtctgaagacagctacagtatacttatgtataataataaataaatcctttaaaaaaaatgtgattcgcatcaaatctagtaaaatctagtaagccttattctacccaaacagagggaaacccatgtgttggcgctctgggaaggtcctgacatactgggaccagctgaggccttccctcagaacttcgagttcctctggggacccaggaatcctataccattacttgaagtgaataatagttaaatgtcgtgatccacaaacatattcatttatcaaggatttgtagacaactagccatgtacagggttttgtatagagaaaggtgaatgggctcagaagcctagaattcactacatccatgcacaaaacacacacacacaaaacacacacacacacacacacacacacacacacacacacacacacacacacacacacacttgcacccacaagcacacatgtatatgccctgaattgaacccatagcctggagtgtgctaagcaagtgctctaccattcagctataccccgaaccttggcattgacttttatctctattattcattctttactaacttccccctttggaaccttaattccacaaactgtggtttgatagttctgcaatcctcaggggaccaggctagtacatttgcttattattaaatgaccaagggaaaggaacatttagaaaccattcaggattctttagattggagactggctccagtccatagcatttatagtatattacagaatatagtatagtatagtatagtatagtatagtatattacagtatagtatattacagtatatcatctatctcttcctctctcactcagtatgagcctcttgtcccctatggtgtgccgggcccatcattccagtcttcctccattgtgaggccagggcaaaagtacggaaccactcagtgttcaagggtctcttcccaggactaatatggataaccgtggatggttaagtcttggccttggcttagaggctatgccaagcaaacagcaagcaaaagctgcttgcttttacactgtccatacagctttgaataggactcacctgttttggggttgtccttattggcctgagccctcacagcccagatgatattcacatcatggctctcgtactctgacttttccatttccaggaagaccgcgctgcatggtgcagccttcgtgtgcaggaaggccgtagagagtgcgggagggttatttttcctgacttgttttgtttctgttctggtttgtatttccttccatcagctctaataagccagaaagaactagagttgaacaaatagatgtgtggggacccataagctcttggggatgcttccttaagtgttttgttttaattctgagagaacaaccaatgtagtcgaacatagatcttaatttaagattttgtgtgataaaagtctgtccagttttcattaaacgattttcttttttttgaataataaaatacctcccatgttactttcttaaattgatttattttcaaatgtacttatcaatatactgctatctttgtaccagctttggatgaaccttcactttaacttgctcttggtgagcctatgggtcaatccaaagagatagaggatgctcttttggcctgtgagcttcacatctctgactcattccacatcttgtttggttgatactttgaacgagaaggcactgaatccaaatggccttatttcagccgatatcagctatgcgttttgatattgttttccctaccctagatttactggagacgagaaaagctatgggaagagagtgtcctgatacctaaggagggtgttggtagggcggtgggtagaaaagtggccaagggggaattggagagagaataacgagaaagctagatggtgggttcttggtactggaagagagggaaggggcagttaggcaggcagagactctgttactgccacagctggcatggatggttaatattgatttttatttcatgtgtacgagtgttttgcctgaatgtatgtctgtgtaccatttgcagacctggttcttttagaggccaggcaagggtggcagattccctggagctggagttacagatggccgtgcgtctctgtgtggattctgcgaacagaacctggtgactctggaaagcatcaagcactcttaaccactgagccatctcttcagctccaagtttgaaaaaaacatttttttttaacattttaagcgttatatgccactaagttaaattccaggaaattccttacattacaaatcttcagctacaggatggagttaaggaaggaaaggggaacaagtacttagtcaagggtcaattgagatgctgaagagtttctgccgttgcctttggggttaaaccttttaaccccgtggaagatggattgtgacaggaaactgcagggcaggagcttacaggggacttgctggacttacaggagactgtcacctgggcatggttggggtcaccttgaaggtattgatgttgaagtattgggaactgaaggactgagacccacactctaagccccccaatctttctctaaaaaataacccaaaacaaaacaaaacacccccaaacctccccacaggcaatacaatgaatcaaagacactatggcagctctcataggcccgcctcctctcacccatgcttttctttgattggatgttactcttgtcagatcacaaatggtataaaggaaagcaggaaatatagaatgggcagtagtgtgttctcttcaagaataggtgatggttgaactgtgagcactgtgaccacaggtcacccactgttgggaaactgtggggaccataatgtagctgaggctttacacagaggaattttctggaattcaacttggcggtatatgcttacagtgttaaatgctgaatttaacatgcttgaacatttaacatgctacagtggtgcatgcttgccaccctaacacaccagggagactgaagcaggaggattgttacaaagttgaggttgtcttggggttacacagtgagtgtgaggctaatttggatacacagtgagactttgtttcaaaacaaacctcaaccaaacaagagttaaactttctgttctagtaatggtgcttctaggaacctacttcctggaggtgactggaggctagaacaaaggtttatgtattagggtgtttatagaatcagcttttactatataggtcttgaaatatctaacaagaaaagcatatgtaaattatgtcatagctgaaagataggtagtctttaaaattcataattttgaatggcatttaaagaggagaaatatttaacccatgctagttggctgggagaaaaggatattagattgtatgccacacaattttaaaaaaccgtatgtattttgttgatgtaatgctaaaacatggtgaaagaaaagagtttgatggtaggattatatttgatttttttaggcaccccttgagacaccgcacttttctaaatttgaatcaaatttggatcatagtcactgtcatacctaacgaagagttctcaaggcaatactcaggtgtccccactggttccctctagcaaatggggacaagaaaaaggaaattggcccgggcagtggcgcacatctttaatcccagcactctggaggctgagtcaggcagatctttgtgggctcaaggctagcttggtctacagagcgaattccaggacagctggggatataagaagaagccttgcctcaaaccaaactcccacaataaacaaacaaacaaacaaaaggagattgaacgttgctgaggatgctacctgtagactaagcttttcttctgctcactgtgctcccttgtgcagattccaggtctagaactgtggcctcttctagccaaggctgaaagacaccattgcctcactatgctaagaactagtaatggtctaagatgttaccccatttgacagttctgccttttatgattgtaaatacgacagaaatgcacgacatctgagcaggagacaagagctactgatatttgcaagcaagcaaacaagaggatcatgcagtgatggtccacgcacctagatcctggtgggtcatggttggggcatttcactgtgtggcggaactgtccctctccccttcctataggatcagggttcttctgacatacacaaccattaacatcttctgtggactgttccctatcctgtctgcagtagaaatgcttgggtagatagggctcttcttagctttagcaacctgggacaataatcaagcaagggatttggactgggtggtattgtttgaccctgttgaggagacgagtttttttttttcctatcagataagagcagttaatttagacaaatggccacagatctaattctcagggtgtatgcaaagtaagaggcctggcgaagcatcccttcccctttgcatcctataccttccccgttgacttcatgtcctttgtcccaggagggcagatattccccccatacccactttgcagatctcttcatagacaatcacttaggaagccgcagtcacactgtgatgtctgattttttgcagtggaagacgactctacgtgcctatttttttttaatctaatgaactattagaacagtttcactcctattatgaatacaaacttattttatcattgtgataaaactaaggttgggtgtatcaactactagcccagaggcagaaggatgaaaccagagagaggcaggattaatgaagaggacagtctccagtacaaaatacagcatgagccacttgcttatttcttattttcttttagtatctatattagaaaagtaaaaggaagaggtgacattaataatgaacgttgtttaacccattacttcccagatattattatttcaatataatcagtgcaaaaacaacgttattttgcattcccctttaaagcccagtatgttgctttttaagctgcagcttgtcttaattcaacctatctacattctgcgggctcagcagatacaggtgctagcagctaaccattagatggtccagcagatgggagatgcacagcggggagctggcgagatgctcggttgctatagtacctgttgcacaagcctgaggaccagaggctgatccccaggacccatgtaaaagccaggcctggtaatccacatttgtaatcccagcactcaggaggtggagacaggaggatgcctgtcagtgacaagccttttatcaaaacaaaggtagtctgtacctaaggagagatattgtagttatcccctgataccctaatacatacacaacacacacacacacacacacacacacacacacacacacacacacaaagagagagagagagaaacagagacagagacagagcgagggagcgcataagtgccctggggacagttttaatacaaggaatggagtttaaaaagaccgaagggaggcaggtgaagtcttttgttttcgtcagaacctcatggctctcctttgccctctcatcataagctttacttgatttttttttccccagccaaaatcaataaatatcccgagtgcccacaaaagcagcgcatagcacgtactgttcccatggccacgagctgtgtgtacacctgagtgtctgtgggcctctcggtgtgctgtgaaaggctctggttatttggacttttttttttatttccctctcctctgtgatatgttatttgagagtgtcacgtgtttctttgcattcctcaaggacacttgatacgcagtaagaactagataaatatttgttgctctgattttctgtttaaggcaaaagttagctcagaaagctgagctccaacttggaagggatggtacaggtctgctttgtgttagaaacctattggtacatgtatcttgcgcataggcatggagtctcgtcacttagcaaggagacttgtcactatgcagacgaggtgcaacactcagaaggtgaaaaattgttcagcttttccctttcataccaagacatttgaaagagcctgatatttcattcccaacagtgatatttacacctttttatgaatataaatctagttggtgataaactggagacaagcttccgagaattactgttttctgtatggattaaagtagtgatgcctttgttaatgctaccaacacagactcccagcccttaacctgtgcagtggaactcctctgaaatcaaatgcagtgttttatagctgcctccatttgttccccttgactttaattgtcgggctgaagcaccaggcctgttcacagagctaaggcaatttatttttactgaagccaacctaagaaatgcttaggtagcttgtcgctgcaagattaaatgtgaccttcatggaatcgtgttagcagggccagcagctagaaaaataaagactaaaccaaactgttcagcaacagaattcccagctgttcagtggggtagaactttcctggttatcccttccaataaaaacacagcaggttagttttaagtgaagtctagatggtttagggatttgcaaccgacagaagaacagaaaaatataatctcgttttaaaatgataatctggaaggctagtctatataatgagtctttcttggggggaggggcttggtgttttcctcatatgggagaatttaactctcatgcatagttggtctcacctttcaagttaaggacttcttaataaggaaagaaaagctgtaatggagaagtcaggcttgaggctgttgtcgcaacagcaggcgtctagggatgtggggcacattggtacctggcgccatatttgacactcccctttcttctctccactatagaaggaaggcagacgcttgaaaacccataagggaggcccaaggggactgtagatggactggttcttaccatgagatatgtcgcactgatggtgcgtgcattcagagtcattagaaaacataggagagaaattgctagggacagggggctttagggtatccaaaatattgattactgattgattgtatatttcttgagtagcagtacagctacagtttggtaggtgagatcaaggaaggtactcggcacaaaggattgactgttttgatcatgtcttgggtcatttacttgggggttatgtggtgaaaactgaagagggggcaggttttcttagctaggtattctccacaccaaggagcctcggttatttacagcgggatcaaacagctaggcaactaaagaaagagaatggttttagcagccactagaggttgtctgtgagtccaagggccagttcacagttctctcatcttgtctgtttggatgttactggtgtttgcccgtgacacttcacatatgtacctgcagcctatagagctcctgttgggggcctgattccattgagggaaactgatgtgactcaggcagatggctgtctccacttgatacttccctttccccagatgcagtcactggtcctgaataagtgctgccccactctctccctggaggcttgggctgagagaacctgcatcatggagtgatttgtagggctttcttctcacctggcctgagaggacatcaccatgaaggaaaaattggctttcagttaatagaaaaaatgtctactctctccccctcccccttctccccatccctctcccactctctcccctcccactccccctctccctctctcctctcccctctttccttttctcttcttctctccctctctctttctctttctctgtgtatgtctatagtgaatacttcaagtcacatgtgttaaaaatagttactattcatcagaaagactgaagaaaacagaggcaaagagtggcaaacttataaataaatgcactccttgtctctcgctctttcttttctgttgcaaattttaagtcatagaatttgcctttccagtcatctttaagtggagccctcaccacttaaccatttcctgaattaaaaaaaaagtctcaccagaaactcgattcatatttaaaagtcacttcgtttttctcggtccctggaaaccaccgttctcccttctcagggagcatggctctcggtgtcagtagaagcatctcacgtttgccattctgtctgacacatgtcacccggtggcatgttttctttggtcagccttgctatggcatgtgtcagaatctagctccactttcgaatgaaagatgttcacgcgtattttgttaatccgttcatctgtcggtggacactggggctgctattatctttgggctctcatgagcaatgcagctttgaatactgctgtaaaaaaaatatatcgatttgaggtattttttcctgggctcctctccatttctctgctccactaagcccctgtgggtatctctctactaagatgcttgctcctcttcctgtgttagagcctttcaaaaggctctcccaggccacctcttcagctggttcctcctgtacctgctctaactacttatcccccatcacctactgggtaagctgcatgtgaaaagggggtgcctctcctctaccatttgggacatgtctctccctcaagtctctcagtctgcttggggaaggcccagattgaacttcttgtcattacaacttttaccccctctgctacttccaggagccttctttacccccacccccgtcacggagctatggagctgaggggctgtggtcccacatcttccttaagcccttctgggcctctgtgatattggagtcctccctcggatggagctcctgtcttgaccctgtcccttgcgtctctcagctccctcctcccgctgcttctgtgtgccctcctgggcctgtagctttcttacaacctcccaggccctgtatggccatttatcttttcctccttggacccagagattttgttaaaacctccctatcttaccccaaatggcctagcctcagtacagtacagttcaatcaatgagcaaaaattannnnnnnnnnnnnnnnnnnngactgtcctgtaaactgtcttaagatttgtaagttcattgcacatgatttaaaaatctgtaacaaaatttagctgaagatttataacaaagggtttaaaagtctatgcaaaaggaatcttaatttgctctaacttactctgtctgagattcaacttttaggatatatcttaggatatattgcatataaaacttggattcaactcttgtttaaaaaatagatctactaggaaaatagatgtttttaaatagcaaccatgtggctcacctccatcttggtcgatgacctcatcgggagggaagctaccatgtgcctggcaggaatctttactaaatttaagagagtgtgtgcaatgtaactttaccaccgccaccattaagatgaccgtgtggtataacccaactaaggcaacactcataaaacttcactgccctaatgagatttctgcttatcactgaatctccttcagactaaggaggcaccggcaggtctccaaaaaaaaaaaaaaaaaatcttggaatgggatggatttctgtattatgataaatccccaaggttataaagattttcttagagatatgtgcctagccattcatgcttttaatcactattctataccaggattctataaaactttagataaggaaaagaggttttgttgaataaagtatgctttattctaaggttataaaggtatattcatgttagcagaaactgacttagaggtgtctgttgatctacaccagacttctaaaacatgtaggtaaagaacaatccatgtttgataaataaggtttatgaattctgaaagtctactcggagtaatggtaattgtcttaaaggtctatgtctagcctctgtctttgctaactctgttaagctttagatatttggataaactgaattataccagaaactatggtactttgtaatggtgtgctatgaaagagtcaagtaaagtaaggtgtgcagtctctttgtgaactttatttttggtctaagaaagctcccagtttccctgtgaactgaagtcatggacttattttgatgctaaaggatcttcaattaaatcttcaactcaaattttaaggctcagacttaacagggataaagctttaaagtactaattttataaaagcgactaacttgttgtaaaagcttaaagataattaagatatgcaagtcggtgctcaccttataaatgttccagttgacattcacacctgcagtcatgctgagtccaaatggcattcatttacagtcacaagctttctttagcttcttctttaggtttgcaaggctaagcctaaaacaagtaactaaagatgaagtttgtttaaaatcagctagacttaatagataacagtcttcaaactcttcagagatctcccgaaaatggcatttcaaatgtttaatgtaaaaaacttcccatgattgatagacagaaaggccagcgcttagtgtcagttctagggtctccaaagatgatggggtgcagtcaactctacttgggttgtggtcacatcagccactgcttcatgtctcacccgctgccagggtcctgcccaacctgtggaccctgttgcgttgactgctctgttttgcctcatcaatataggtcactgttttcaagttccttttccacaggaaaatctctgaccttctgggtttggcagcagcaggcctgtgctgtcctgtgtggcagctgtagaccaacccctgccaccctcctccaccctcaaccccagaaaaaacaaaaaaagcaaaacaaaaaccaaacaaaccaaaaaaccaaaaccaaaaccaaaaccatctgggaggctagggtagctagctggtaagtctctgtcattttaattgatacatagatcatttggattatacttcctgctacagtttatccgtctcagatctctgatggtgttgacggctcactagctacatcagtttaacagcatcaaagcaagacaactcctcccactaaggctgctgcagttgcccggactgttcatttcatattacctcaggtctcactttcctagagggtctaggtctcctgctgaaaaagacaggcaccgagacagtttaccttgctggaagccttcccacagataaaggtaaactcacaaagcaggtttcaatgtaacgttttactgtttctttatttaaaaaggcacttgctttgccatggctgctcctggtaatcaatcgccggtgcctcatggtaaatcaaagtcttattggtgttactcaccacagtattcactcgcaggggcatggggtattcaaaggcaggcactgaagtcccatcctagcctgggaatgactcttgggagtggaacctcggagttcccagcatctatactgcagtaccatactgtaccctatcctatagctggtgtactccaggcagaattccctcagctgtccttactgttgtagggaggaaggggtcttgtgaatccgttacatttccgggacttcctgagacccgggagttgtttaatatccccagtcttttggagcgtctccatagagcaggatgtttcacttcagatgtgctctttatacagtaggcccagcatctgcatgctgtctcagagggaagtccgtgagctcagccttaggacggtcctctttgtaatggttcagtactatactatgtggacagaaaaaatgtattgctgtaataacagatctcttaagtaaatcgagacaattgaatgtttgtcatgaatcatcaataggccgtggaacctcttgtttctgagacagggttttaggatgaagttgagatccatctcaaagttgtgatcttactgcctcggcctccttgtccaagtgtgtgctgccgagcacagccccggaatgagggacatcttactgattcttacaagagctatagtggatgaagacgtgtcacagtaaattcattgttagttgagatttatgctcaaatttttacttcattctttttggaaaattgactttattcaacgacacagcctggcaagttaatgcagatgatttacagtggactgtaaatatgggaacgatgcataagattgcatctaatacaaggtggggtagtagaagtctcagaacttctgattactccatccccccccttttaaggacattaatttatttttattcatgagcctgcatgtatgtctctgtgtactaagtgcattgcatgcccatgcaggtcagagtgggcatcagatctccaggaagtggagttatagatggttgtgggctacagtgtgggcgctaggaaccaaactagggccctctgcaaaagcagccggtgctctgaatagctatttcttcagccctggggaaaaaacctctccctcgccccccaagatcccctaaaattaactgtaagtactgtgcaaatgaacatgacagggaagaaattaagctgaagatggctctgcaaacaagtttaaagaaaactctctctctggagttaattccttcagcagatgcttgcgagcagctgtgtgtgaaacactgtactgggaagatgtaaaactgaaaaatcccaagcggtgctctccaagatcttatcgtttagtgatggaggaagcaggcgacataactgtctgcggtgacaaagaaaagaatgaagacgtatgagcatcagagaagcataacaagtatgaaactactcaaataaagaaaatatctaataaaataaaataaaaatcaataaaaagaagagaaactactcacgggacgagggaggaggtgacaccatggagtgggctttattcacagcttctggaaggagagagagagacagtgtcaggcaattgtggttggaagaacagaagagaaaaggaagacagggaaggctgtaaattcctcatgaagctggagcctggagagctgtcccgagtagctgagcagatgagtcggcaggggctatcacagtctctacctgacagcacatacgtgtgagtgatgccatgccagcacatacatgtgagtgatgccatgccagcacatatgtgtgagtgatgccatgccagcacatacgtgtgagtgatgccatgccagcacatatgtgagtgatgccatgccagcacatacgtgagagtgatgccatgctagcaatacatgtgccagcacatatgtgtgagtggtgctatgtcagcacgtatgtatgccagcacatatgtgtgagtgatgccatgccagcacatacttgagaatgatggtatgctttccacttccccagnnnnnnnnnnnnnnnnnnnnnnnnnnnnnnnnnnnnnnnnnnnnnnnnnnnnnnnnnnnnnnnnnnnnnnnnnnnnnnnnnnnnnnnnnnnnnnnnnnnnnnnnnnnnnnnnnnnnnnnnnnnnnnnnnnnnnnnnnnnnnnnnnnnnnnnnnnnnnnnnnnnnnnnnnnnnnnnnnnnnnnnnnnnnnnnnnnnnnnnnnnnnnnnnnnnnnnnnnnnnnnnnnnnnnnnnnnnnnnnnnnnnnnnnnnnnnnnnnnnnnnnnnnnnnnnnnnnnnnnnnnnnnnnnnnnnnnnnnnnnnnnnnnnnnnnnnnnnnnnnnnnnnnnnnnnnnnnnnnnnnnnnnnnnnnnnnnnnnnnnnnnnnnnnnnnnnnnnnnnnnnnnnnnnnnnnnnnnnnnnnnnnnnnnnnnnnnnnnnnnnnnnnnnnnnnnnnnnnnnnnnnnnnnnnnnnnnnnnnnnnnnnnnnnnnnnnnnnnnnnnnnnnnnnnnnnnnnnnnnnnnnnnnnnnnnnnnnnnnnnnnnnnnnnnnnnnnnnnnnnnnnnnnnnnnnnnnnnnnnnnnnnnnnnnnnnnnnnnnnnnnnnnnnnnnnnnnnnnnnnnnnnnnnnnnnnnnnnnnnnnnnnnnnnnnnnnnnnnnnnnnnnnnnnnnnnnnnnnnnnnnnnnnnnnnnnnnnnnnnnnnnnnnnnnnnnnnnnnnnnnnnnnnnnnnnnnnnnnnnnnnnnnnnnnnnnnnnnnnnnnnnggtgtgtttgttcataggccatggacttgacaggcagtgaaagaggactagatcctggccgtgttaataacaaggctcatcctttagactgactccccctcccttcttcctttcttccctccccctcttcctccttcccataatgttggggataaaaccccagaggttctgtatatgcatggcaagtacctttcctgaagaacaccttagcttgactgctttgtttgtttctaaggggggagtaatacaaagatggagaatatttcttgtgctctctttggttttgaatggattcattatgaagtgaagtgattctgagtcggtttataatactccacgtgaagaacaggttagggtagtctctcaagtttgagtaagattaaggagggtgaagaacggcagtgaaggccttagcagggtgggacatgtgtagggatggggctttcttcacttgggggagtcacttggcctttcctcctagcagttgctctgcctcctccccaagactacaccatgctaggccatagaatggcaggcagcacacctcaggtggaagactggaggcagctccttgtgttggctgttgtgtggttgagacttcttcctgtgcactactgctgtgttcccttggctgtggtggtcagagcacccagcttgatgggctgcaacgagggcatttatcaggtatttgctgaactcttcgcggtagccataagatgtgaagatccaacttagagaccttacctgtttccggggcttatttcaatttatttcatgcagcactgaattataaataactgccttttgaaaccagttatgcattctggagggcagtgaagtgcttttcacagggcagagtgaagtggcttgcctagacacattccataaacgtgggtcgagtttaaccgtatggttgatctgtctttctcattacctgtccattataggtagggataatagaggccatgtcctgtgcttcctggaaagagacagagcagacagtggctaggacagcatgacagtcacgtctgtacatgctctggcagagttggcagtctccttcacccagctcacaaggacccctagaaggcacaaggatcacatgctctcttgagtagccacgcccacccaaggcttgcagccatttccccaacatctgtctgttgcccagtggcaatacatctcttattaaggatggttcaaatgcacccgtatggctccttactcttgtctttctcccttcttatctttttttctggattatttttttttcttttccacccaaggatcatctatttttcaggcttagttcaaatgactcctcttctttgaaatcttcttggggaccttcatttcttctgagctttgatgtaagaaggtagagctctctcaacccagttaccaggccatccacctatggacaacacagggtggcagtcttgggagatgcctgtgcaatgttgggggtgagtgtgacatggaggttgaactggactgttgtgttggatgcccacattgggaatgcgatatagcaggagaggtctcagtgctactccagcatccccagtaggcttctctagtagtgcctttagcacatcatgacttgtctttgcttagctctttcactgtacctcctttgggcaccacgtctgagccatcttggggtctttgctcttcctcatgcttgaacttactcttcatggtgcatgagtcaatgaaggttgttttgttgttgttgttgtttttaaatgaaatgggttccctgggtaaggtgggaatagtagattggttcactttttagcctttatagttttttttcaatcgtttttttccttatcacccatccgtggtaaacttatcacagcacagagttaatatgttcatgcgccttcccctccctgctccatctgttctccaaaagggattcatctacttccttattgattactaattaatagatatcgttatacacagcgtgttagggaagacacttgccactaaggactttgcacagtgataagcgtgccttcaagtccatggtgtgggtgttggtgttgttaggtgggaggggtcagaggaagaaagggttgggaaggtggaatggaggtggattacagtggccggggtgagactcttagtccacattgtggaactagtcaaatgtcctgaccaaggaggtgttggggacatctatctggccatccctgttcagggcaggggatagacttctgttccacgtatgcctccgggctctctgtggggagtctgcatttgtcttctctcattaggtagagctcaccctgtcctttgatgtctctttggagaaggagatcaatgcagtctcagaggagttctgcaggattcgattgagattttggttgatgggtgaggacggtagacatgcttacaggctctacgtgggcaacattcaaatctaggtgtgcttgacacccaacctgagctatttctaccgtgttaggttttagtaaggtaaaagaaggaaagtgctgtgggtttaaagaccgttgaagctttacttacttatcgtgggcacgctccacactgcatgtgcagaggtcaaaggacagcttgcgagagccaaatctctccttccgctatctgggtttcagggactgacctggggtcgtcaggcttggcaccacaaagtgccttccaccgaggcatcttgctggcctcattgaggttttgaaaggagtttgcttcagaggagaatttggcaactatgcagtgcacaccagtttcaacttttggcaactgtctggaaattgagaggcagtgagtatcgtttaaaagtatgctaaggcactcctcctgctaacagggagagacgtggccctttgtcaagagagattcttgtacctagaagagggagccatgttacttctttgctgttggatttcattggtgataatgatggtttctctcaagaatagactcaaagctctgaaaactcagtgcctaagtttatagttcacatttgtatcttggaaccaagctttatctgaatgtaaggcactgtgttagagatgatggtgatgacgatgatgacgacgatgatgatgatgacgatgatgatgatgatgaaattaacaacactaagcgggtgccctttattgagtgattactaggacaactggattttggcaagaaggaggtggtcatgaacttgggtgcaaattgaagaagggtatcatttattctcacagagagggcagtgcagcagcctttcctacagcaggtgtttttctgtgtctgagaagccatttgttttcactgcattctgtgagcaataggcatgaaacaagagcagtgaacaaattgaagctttttgcaaagttttggtaggtttcaatggctgctctaagtatcctgttccttggcttttctcaccaatgtactgaacatattagtgtcgaagattgctcccctcaaaatataccctcctccctctttatttctttctaatgtgggcaggtgtttggcctgcctgcatgtctctgcaccacatgcaagcctagtgccagagaaggttagaagggtgtgttgcatcctctggcactggaattacaagtggtggtgagtagccaagtgggttctgggaattgaacctgggccctttgcaagagcagacagtgctcttaacagctgagccatctctctagcccctgttagtcttgttttatctttatgatcccaggaactgaacccaaggcctcacggatgctaagcaattgttctacactgagctatagctggatccctgaacagaccttttttataggtctgttaaagtaaagaaggacatgcatccatgaacgtctcagatcatctagattctgcctatatactgctatcctgcctttctcagcttctgagacatgtctgcccatcctccttgtgtagccccacccttttctttaaaaccacatctctgaggactagcacccccccttccttccttatttctattttatatgtacaggtgttttgtatgcatgtgtgtctttgtacaacgcgcatgcctaggaaagaaggccaaagagtgttccagatctcctagagctggggttacagatggctctgagctgctacctggatgtcgagaacaggacctgggtcttctggatgagcagtcattgcttttgacttctgagccatctgtccaggcccgttatgttccatcttaatttatttttcccatatataacctgcccatgacttataatggtttggtttttggtttgttgacttaaaagtgatattcatcagtatattttctcatggtgttaggcagtgcagctagcctcagctcctatttagctagctacaggaccacaagaaggtctaccagcatgctgcagtatgctgtgtggctgaaactctgttggggaggttagcattacgctctgtggctgaactgtggtgcataaattaggtgtaacaatagagcactttaaacttgaccagaactctttggggtgcagcctccctgagagctgaagagcatcttgctatttttcgggtgtgcatgaagacaaagcagtcgtatctgagctggccgatgccagaacaccttcatctcagagaggacaagggatgtgttgagtggtcctccgctcaactcctagaacaagaagctgtggttcagaccttgttttcgttctcctgttctgtgagactcggagtgttcagaggagatgctgattctgggaaaaaagggatcccgttcgcctcattttccacgtagagagaagactcgagaaggcagcatgagctggaatccatatgtttggaaatctggctgtggcaattgctttgctgaattgcccaaactgttgtcatctagtgctggctctggggccatgcacatgtagttcccccagcatggtttcaactttcctcaaagccaggctagaattgttctagaaaacgattattctaaaaactgatggaataaaataaatatgttataatttagttgtatctggacaataatttatttgtccaaccccacacagtttttaaaaaaatctttttaggtttgcaaaattattacatttgtagctgcaacaaattcaatgataagcatagttttttttttttaaagaaaacaggtttcacacatgactaaatgacttgagaaacattcctggaatcacatcgctgagattcatttaaaaattttgatgcttattgctaagcttctatcaggaaaatttgaacctatttatagtccatagtgcatgcgaaatataaagtattctaatatttttctttgtgtgtgtgtgtgtgtgtgtagactggaggacaactttgaatgtcattgttcaggtgtccttcaacataattacaaagacttgtttatttttattttatgtctatgagtgtttaactgtgtgcatgcgtgtgaaccatgtgtgcacagtgcccatggagatcagagatggcaccagatgccctagaattagagttatagacagttgtgacttgccatgtgtgttctagggaacaaatctgagttcagaggtgtccttaatcttggagtcattagtccagaagagaggcttccctggttgggaaaggatttggattttgaatcagggtctctccttggctggctctttcattaggctagactggctggccagcaagccctaagtatcctcttgtgtgccttctaatgcacacaaatagtgcacacgtgcgcgcgcacacacacacacacacaatacacacactcataaaaatacatcccaaacaaaacaaagtaagccaaagccaaagccaaaaccaaaaccaaaaaaaaaaaaaaaaaaaaaaaaaggaaagtaatccaacaaacctctggttgtagggaaattgtaacttggagagcaagtccctggtcagtgtctcaaccttccctcttttctgctggccactaggccacgaaaggcaagggacagtgctatggcttccttccaggtcttgtcttcctgcctgttttgccacaaaagctcaagtggacaggatgcgtgttgggtcccgctgagctcacctcttggctccctgtgttctctagatggacgatgcagagggcacagtgggatttcaggctttaaagcccaactccctttgctgctggatttcttgtgatggattgcaaaaaaacaaattgtttttatctgcccaattctggagttatgtaaggttacaggacttcctcttttaggaaaagtcccagacagttcgcttatcttcttgttccatctgtgtttgtgggtattgtagctttcattgtccttccttcaatctaaacagagttaaatgtgttggacccaatgagtactgtggccttatgcgttcctgtgtgatccataagcttgggaagatgacacatttcaggttccagaccctgggagactcttgccagagcgagagcatggccagatagatactccatctcccagcctttgtgttcgagggtccaaaggcacatggagcgaaaacttgtcccgtggggatttcctattagcaacgttacctctgaggctgaagatccgctttggttacccagcgcctgtgcttatggaacttggtgtccatgcagtgggtgaaacatagactgagacacagtcagaaccttctgggaagaaaggtggcaatggtagcgacctcacagggtgacatcagtgagaagccatgatgaattgaatggcagatatgcagtgcctggccattgctgttgtgatcgtcccctaccccagggtcacctgaggaatatagaaagcatgtttttgaggaaagctttatataatataatatgtaatatataacattatataatatataacataatatataatatatatacacacgtatacatatatacgcatatatatatgtatttgtgtgtatatatatacatatacataaatatacacacatatatacatatatacacatatatgtatgtgtgtgtgtatatatacatatacatacatatatacacatacacacacacacacacacacacacacacacacatatatatatatatatatatatatatatatatatgcagttcagttcaggcatagctagcttaagcacttgagccctttcaggagtcttgagggctttccccttgactctctggtgttactgttcttctcccaccccgtgcggtgtgtgttcagggaggccacagaacgtaagtgcttgcatgggtcccattcattccacagtgctgtgatatccttctttccatcagaactgaatgataaaagccatgtgtccagaaagctctccaggcttctaaagaaatgctttacggcttactcatcctgctacccatgtttagttttagcgtcactccacggcacttgcatggtggtgagacttaccccagtagaagcatcgattccagtttccagacgtgatatagatctcctccaaatgtatacagaaacaaataataaaccccatctagtttgtcacacatagcacccaactatattatagattgcctttatgataacttttggaataaaacatttacgtttacttgtttgtttgcctggtgtgtgtgtgtgtgtgtgtgagtgtggctgtgtctggtgctttgagtaagtatggcctccacagactcatgtgtgtgaatgcttggcccatggggagtggcactattaggaggtgtggatttgttggagtatgtgtggccttattagaggaagtgtgtcactgtgggggcaggctttgaagtctcttttactttaagctccgcccaatgtggaattcagtctcctcctggctttctttgcatcaagatgtagaactctcagctcctccagtgccatgtctgcctgaacactgccatgcttcctgccttgaggataatgaactaaacttctgaactgtaagccagcccccaattaaatgctagttttataagagttgctgtggtcacagtgtctcttcacagcaataaaannnnnnnnnnnnnnnnnnnnnnnnnnnnnnnnnnnnnnnnnnnnnnnnnnnnnnnnnnnnnnnnnnnnnnnnnnnnnnnnnnnnnnnnnnnnnnnnnnnnnnnnnnnnnnnnnnnnnnnnnnnnnnnnnnnnnnnnnnnnnnnnnnnnnnnnnnnnnnnnnnnnnnnnnnnnnnnnnnnnnnnnnnnnnnnnnnnnnnnnnnnnnnnnnnnnnnnnnnnnnnnnnnnnnnnnnnnnnnnnnnnnnnnnnnnnnnnnnnnnnnnnnnnnnnnnnnnnnnnnnnnnnnnnnnnnnnnnnnnnnnnnnnnnnnnnnnnnnnnnnnnnnnnnnnnnnnnnnnnnnnnnnnnnnnnnnnnnnnnnnnnnnnnnnnnnnnnnnnnnnnnnnnnnnnnnnnnnnnnnnnnnnacacacacacacacacacacacacacacatttgtaatgtgagtacagtttaacaaccaggatgcccatttgcctgcacagcagggaaacatcaatatattccaaggatggaaataacttgagagatccactgaccttatttgtaattcaaagggtacagaatcctggaagttactatcgcaagtcttctggcagtacagcttgcctgaatcgatataaagctatccgtagctttctttggccctagtcagttcagacgtctaattttgctgcagaatattattgtactggattgtgaggaccctgtcctagacacagtgtgtgtgtgtgtgtgtatgtgtgtgggggtgtccatatgggatgtgtgccttatcatctttctaaatccaaactatggaatcctgaaacattcctagcccaaagatcttgaatgaaagcttgttccagcgcagtggtttttacagccagaggatcctcctattctggctttccaagaacggccccactttttctttccttagacaaaatctcacctatgtgacacaggctgacctcatttttgattctcttgaggaaagtccctcttaatatctgtttccaggatagccactgacctgtaccatcagagcctgatccgtactcaaaactgtcccatcttggccaataaatcacacggtcaccatgctgaccatcacaaactgttggttataggcaccgctagagagaatgattaagttcttggtgaattcctatatatggaatttaaaacaggcaatatcctgatatcttgtaagtaatataacattatttataagaagtaattaaaaaatatattccctactgccttcttcagcagaattttctatagcacatataggtaatagagaaaagatattttattgcctatgaatttctctttgttcaccatggtgcttgatgttcaagacacacccactgggggtactttgcaattgtggatagtaatatatgtgtgtgtgtgtgtgtgtgtgtgtgtatgtatattatgtgtatatatatatatatatatatatatatatatatatataatatgtataatataaatgtaagtttttnnnnnnnnnnnnnnnnnnnnnnnnnnnnnnnnnnnnnnnnnnnnnnnnnnnnnnnnnnnnnnnnnnnnnnnnnnnnnnnnnnnnnnnnnnnnnnnnnnnnnnnnnnnnnnnnnnnnnnnnnnnnnnnnnnnnnnnnnnnnnnnnnnnnnnnnnnnnnnnnnnnnnnnnnnnnnnnnnnnnnnnnnnnnnnnacacacacacacacacacacacacacacacacacacacacacacacacacacaaataaacaataaaaaacccaacatcaataataaaatagaacaattctaacaatatagcataagttactttacatgtatgaattgtttgtctctggaacttccatttaatattttcagacagtgtgtgaccttcagtaattaaaaccacggaaacaatggataagggagaaaactgtaataagttacatgttatttatttaaaaaatattgattaacctttggcttttgccacaggctatgaccgttgaagcacatagatttgtgggggctttccttggggagactgagaaatcttgctgagggagtaattttgaagctaaatcagaaaactcagtaagccaatgtattagtcacttttttactagacactatgttgctctagctggcctggaactaattttgtagaccaggctgaccttgaactcacaaagatccacttgcctctgtctgaggggttagaggcatgccccaccacacctggtcttagttacttttttgtgttgttgttgtgaccaaatccctggcaagaatcaagggaagaaagatttgttttgacagacatttggatacaatgtcgtatggatacactgaatttagatacaatggattcttcattgaggccaaagggcatcgtggtggaaatgactgtggcaacaataggagtaagaggctgctcattcacatctggatgcatcagcaagcattgaggggtcaggcggcaaggctggcctagaaaccccaaggtctgcagatagctgacttcctcctgctaagtgctccctcctaagcattccaaagagcaatcttctaagcctcccaaaactgcccagggaactggtaactaagtgctcacatacaggagctagtagcggagggcggagggcgctttctcagacagtagcagcaagtggaagagcacatacatgaggctgagcgacaacagctattgaagccttggcgtagacactccctgcccccgcccaagcagtttggggtgcaaagacagcacaggggctggaagtcagttactgtgacatcagtgggttttcagcagacggacagaatcttaactggtgtttttagagagagtgttctggctgctctgcccgggcaggcttgtgggaggtggagggcagtcgggatggctgcttggtccagtctttgtagaaggaagcaattgttcttgagccactggcttcactttccatgggcacagagtcttagctgttcctccctggacaatggttatatgtactctgcttggttctctgaggtcagtgcagtgagtgcagtttccagcctggctggaacaagtaggactgaaggttcattcagacttccttctgcaaatgaggaaaagttgcaaatgagaaacagagcgcagcccttcctcagggtgggccatcgtggagccaagtacccgaaaggctgtgggagtgaggatttcaatcatgctctaaatgaacggatactgggaaggacaattttaggggctggtggaaaatagagagcttttgggcaattggctactggggctcagtgtgtgtgtgcttctaagatccacaacctgtgatgcctgcccagcaaaagatggccgagatgtttttctttgttaccagattaacctatatgaagccacccagtgcttctgtgaaatcaatggtgttttaaaatgttaaaagccgccctttttctttattttagtataggaagctggctggaggtacgtcttggatgtctacatttgagagacttctctaagcaagcaggccacctcttcagtcatctttttaatttcccttgcaccgtaacagttttaagtgactgatgaagggggactgcccatctttcccaggcaatgaagctcagaggctcatggaccagatcgttgttgggtcatcccttaagccaggcagaatagatggtaatggtgttcagtgcctggaatagaaagaaatagaaagttaactgaggcaccacagaaagagttttctagaatttgttgtatttgcagaaatttgttttcttccttccttgtaaattatttacatactttgcaattgtctttcccgccaggtcctccccttttgaactaatttcagacttagactggcgttataagaatactacaaagaatcccttttttctctccaactgctccccccatccccagaatcctcagcaagtcacttgtaactctgatgtctcatctctcctgcatacttgagtgtgtctttcctacatcaaagacacatcaccacagcatgaccaccagcaccaggaaacgcactggtgcactggtaccattaatgcacaggcccattcaagtctgccagatgtctcaataatggcctttgtgttgcgtctgattcagggccaggcactgcattcaggaacccttcctttttaatctgtcctcagcttgcatgaacttgacattttttttttttttgacaattagaggccattatcctatagaatatctgccaatctgggctccttgggcatttcctcgtgatgttattcaggtcaggtactttcaaatcacatcctcacaagtgtgatgccttcatccagcgttcttgtgggtcacatacgactctgatgtgaccctttcccgatgatgttcatttcctcgcctgattaaggagttgttagccttttgttgttgttgttaagttattcccccctttgttgtaaaaatattttgtgagagatacttttaggcctatgcagaggccccatttatcagtcttttcccttacagcttagtatttaccaatctttctccacctgctcctcctatgttttaaaatttattagggggtatgtctaggatgggtgtgtggaaggcagagggcaacttgctgtgatccgttctgtttttctaccgtgcattctgggaattgaactcaggccattgggcttggcagtaggcatctctacctactgagccatctcaccagccctagttattgttccttgagacaggatctggtgacatagcccaggccagcttcagactcaatatggagcccttgtaggccttaaacttgtgatgctgctcctgcaccagccttccaggagctgggtaaacaggctgtgcctgccagcatgccccacttttcatgggtgctccttacctgaagaattatcgctttgctaggtaccaaatgttaatgtccggttcccattgttctgtttgttgattgacattcttctttatggaaaagcttactctctgtttacttattcctggatccctacatttttattattacttatttggtgctcatattctgtctgatttggctaccatgggccttttaagctgaagtttgacactatgttgtgttctgttctgttctgttctcttctcttctcttctcttttcttttcttttcttttcttttctttttttttttttttggatatattttgttatcctttgaagaccttttccttttttcccccaaataagtaagcaaacactttggttaaggcttgtcttttgtgttccctggcctgaccttggagtcagccattgttctaagaatctctggttctggttagtggtgtattcagaaactaagctttgaacagggcattgttcttgatgtttctgtggcttgtcccaggctctctgagaggacaaggatagagaacacatatacacatggacatacatgtatatttacaatatgtatatatacatacatacttacacgcacatgctttttcacatctacatttacttctgtatttttaaaaaagatttatttatttactttatgtatatgagtacaccattgctctcttcagacacaccagaagaggccatcagatcccattacagatggttgtgagccaccatgcggttgctgggaattacaggacctctggaagagcagctgtgctcttaactgctgagccatctctccatccctatttctgtattttaacatgtgaaaaaccatgaatccaaaccaattccctctccactgctagcccagggccctccatgaagctagccttctgccggtataacttccttccctgtattctgactgtatttattctgtacttgcctagctgtgtgcatgtgctactgtcaagtcctgtggttgccatccttgtcccctggctcctgttattgcgcctgcatgaggctgctgtcttctgtagaggcagcctgtcatctgtctcccagcttgtttccttccttcatctgtcctccctgcacctcccccccacaatggccttcctcctttcatatacaaggatgccgctgccttctctccccactgaagctcactctatgccagtccccatgctcaccacgttgaccttctctcttcatccacggctattctacttcacactctgatcaccacagacggtgccgttgaaagccacagagatggatcctcttagttctggaagccagaagcctgaaagcaaggtgttggccaagttacttcttactggaggctgagggagaagactggtggaannnnnnnnnnnnnnnnnnnnattctatggcttatagatgggactgtttccctctctctctctctcttttctctctctctctctctctctctctctctctctctctctctctgagtgtgtcagtgtctagatatcatctacatagcaagacattgatcatatgggacttaaagaattatataattatataattataagagcctgaatagaccaccccagatagacttcttcggtattttttcaagctgattactctgggaaactcaggcacaggagtaggtctgggaagctctgtaaaagcaacctaagacatacgtgcagtaaagagagagacaatgtattagagagagtgttagcatcagagagggttgctatgaccactcttattacctaagaccgtatctggccaacagtgctttaggccacatatgcacttcacatgcatgcaaccataaccccacataagcctcaaatgcttctgtagctgaagatgttgcttatactccaatcacctgcctccgtttgggtcttgcattcagtgggatgcctgtgtgtatggtttagatagggtttcagataggactttcctcttgttaatctgccttatgccatcttaatttgtatccccgccaaagaatctagaagggtagaaggaaaccccattcatttccttccctacaggaggtaggcctactttaattcaggatagcctccttttaatgtgggtacatcttcagagataccattctcaacaaaggagctgcattcacagtttttggtagatgagaatgtcgtgaggctggggtgtttgggggaagagttttcaagctcgtatctgtttgctcttctctgctgaatgctctcttggcttaagtcatttagataagatgagaagaaaggaagaaggcagggagataggacctctttccagtgggttcaggagggaatcctctatagatagattagacccatcgtctcatctaaagtccaggccttctgctgacatcagaacagtctaggaaactctggattcagagtgagcacaggctagcacccattttgaaggtattgggcttgtgccttgaagatattgtagccttcactttgttcaggaaacatttccaccttctgtgctggctactttagtgttagggtgtgacccccatcccaagctgtccattttgaagccaaacaactatgccattgttcaagatgccagccaagtgtgtgtcccaaggatataagtaccatttagctggagcatttgggaggggtcagccatgactgtcactaatgcagaaggagaagatggctttgttgtcccataacaaagttcctttccacagtgcccaagagaaagcctgctgtgtaacctgtggcacagggcatccagtagtttgtgcgtgagtcttaattaccttgacagctgaaaaacctgcttcttcgccctgatttcttctcattccaatgtcttaaacattcccatgcaaatcatacttccaaattctgtcttagtccaagggttttactgctgtgagcagacgccatgaccaaggcaactcttataaagacaacatttaattggggctggcttacaggttcagaggttcagttcatcatcatcaagtcaggaacatggcagtgtgcaggcaggcgtggtgcaggcagagcttctacatcttcatctgaaggctgctagcagaatactagcttccaggcagctaggatgggagtcttaaagcccccacacacggtgacacacctactccaacaaggccacaccctctaaaagtgccactccctgggccaaacatattcaaaccagtatacattcccagtatctcattattcagctctgccacattttatttaaacatcttccaggagtctagatatttttttttcaatcaactgaaatgctttaaaagtataaacagtgttccttaagcatctttggtttttcttttacagagttgagggctggacccaaggccttgtactttctagacaagtgctctatgactaagctacatccccaatcttcccttaaatatctttaaccatacattttgtatctgcagaaattatcggttattaactaaaagctatttatttatatgctcggaatttaatcatctcaaactccgaggaagtttcatttttcttttcaggagagaaaaatggaattataagatcttggcttctgctaccttctgcatttggttctggaagtagtgccctgggaagtggatgcagttgacagtggccacctaacagcttttaagttgtggagagagtagtagcagagagttttataatggcaggctgatttctcatttataaaatcccaattcttatctcatataaggtgtggcaataaagagatgcccaggctacaggttcaccctgcacacttaaaagacacataggaaccaaggaggtttcccctggtgcccattttgcctttgggtacttagaatatcctggaggcatagttgctaagacaccaaaaaaccatcttacatcctgcttaaaggcctctatcttattccatgataaggaaagacaatgctgggccctatggagatcatgactctttaagacatcccatattggggcaagagaaatgggtcagtggttaagagtgcttgtagaacaattttgaggacaagaattcctatcccagcccctacataacaaacctgtgcacccttggaaccccagctccaagtgggaaggagacaagaggctcttgcgatcctgctggcttctagcctagcaggaaggtgtgagccccgggtcgaggagagactttattttaaaatgaataggcaaagttggaagacacccgactattttttcctggactctgtgtgttacacataagcacatgcacctgcatacttgcacacacatgggtaacttagataataatagtctttttaaaaatctcgttaaacattagggctgaggatgcgggtcagaagctggtcgtgtgctgcatctgcaaggctactgggcatggtggcacacttttataatcttactgttcaaggagtaaaggcaggaggatcaatttaaagtccgttttgactacataatatgaaacttttcttcaacatcagtgacaacacccaacaacattccatgttgctgagtgttgagtgatcccctggagactgaggcaggaggatcaggtgtttgggactaatctgagttgtatggtgacatattgagaccctatttctaagcaaaaacacaagttgtcaaattaatcagctatgaaccaggcaagatgactttccattagcatccagatatttcatagtgttatcaaattagtaaggcccatggtaacagttggaactccacaggccttaaatctccttcttggaaggtgtgatggcttatgtatgcttggcccagggagtggcaccattagaagatatggccctattagagtaggtgtgaccttgttggagtaggtatgtcactgtgggcatgggctttaagacgctcatccttgctgtctggaagccactattctgctagtagccttcagatgaagatgtagaactctcagctcttcctgtaccatgcctgtctggatgctgccaagttcccgccttgatgataatggactgaacctctgaacctgtaaggagccccaattaaatgttgtccttataagagttgccttggtcaactcacaaaatatgtactcactgataagtgaatattagcccaaaacttaggatacccaagatataagatacaatttgctaaacgcatgaaactcaagaagaacgaagaccaaagtgtggacactgtgccccttcttagaattgggaacaaaacacccatggaaggaattacagagacaaagtttggagctgtgacgaaaggatggaccatctagagactgctatatccagggatccaccccataatcagcttccaaacgctgacaccattgcatacactagcaagattttgctgaaaggacccagatatagctgtctcaagtgagactatgcctagcaaacacagaggtggatgctcacagtcagctattggatggatcacagggcccccaatggaggagctagagaaagtacctaaggagctaaaggggtctgcaacccaataggtggaacaacattatgaactaaccagtaccccggagctctggactctagctgcatatgtatcaaaagatggcctagtcggccatcactggaaagagaggcccattggacacacaaactttatatgccccagtacaggggaacgccagggccaaaaaaatgggaatgggtgggtagggaagtggggggggagggtatgggggactttttgggatcgcactggaaatgtaatcgaggaaaatacgtaataaaatattaaaaaaaggaaaattaaagatatataaataaaatgcaagattttcacctaaaaaaaaaaaaagagttgccttggtcatggtgtctgttcacagcagtaaaaccctaactaagacaggaggggaagttcaagtcttcctcagaaagccttaggaagtctcttggtattgagaaatacaggtcaaacaaagtgctgagatatttaagtggctgaagtagttctctggcttgggaatctggcactcttgtgaaggagtcggaagcaacatggcctcttagcttcttgtgcttctcccagcaactggcaggaggtagagatgggcagataggaagggcgtgttagtggcttccaataccttcagtaagtgttaatgtgaaattagcatcagggtggtgggacattagctttctgtaggacttaggctcctgagatagctctccaggttaatcagaaacagggccaggcagggcgcctgcttctcctcctttgctttcggttcctttgcaaacctggaagcatgcgcactggccaggcggccctgctttaggaaggaagttacgttgctgaagcaactggagagagtacccaagtgacgtaattggggaagtctcctctggttcttcctcttccagtttcttaaggaaaggggtggaaagagggaaggcgcctgcttcttagcacacagagagtggggaaatactgttttccttggaaaactacaaaagcgaagctgtggctggacagggtgtgtggttatttatgttaatccctactttccgggaaggcaccagacgggggctggatcaaggaaattgaaaaatggcttcctcttcagtaccctcagtccctggagctgacactgagtttgttgtactgtatcctcctgccctacctgtggcctctgcagcacaggctcccagtgtggagaagggtcagatggtgacatccaggccttgtggatactccatgtttggcctgcaagtatgtgtgtttcttacccagaggggaaatgatttggatttaagatggctgttcaagtctcagctgtaatggtcaggagtgatgtagccttggtcaccctatttaacatcaagggcctgcttcagctgtagagtaggaatcacagcagcactttcatactggtgaatgcacagagctaatgctctttatgcctataacttgcacaatgccattaagcacttgggcatggtagctgttgataatagttttcgctgagtgtggggagatgctggacttgacagcctgtgctgtttgcaggagcttgcaggtctagacctggatcctttagttattcacactcaaggtcctccacttagcagtaggttgtgttctaagaggtgactaagcttgcagaatatgagctaggctgttttcaaaccaagcttctcaatatagtatccgctcaatggctagtggctagcctcctctggcacctccacaggggtgtccagggaagatactttgtttgcaccaggcatctgtgggtgaccctgacttggaaactgtcttttactcttaggtgaggtgttaggtgtatgtaagtgactagcaagtagcttattggactctgtagataaaggcgattgttgcaaaagtctgccgggtagaactgatctatacttcttaggtgtaatgtgtaatactgtggtcatatgtatttacacatatagcaacctcaacgcaggcttccggctccagagaacctttgtcttgatggattaaagcatagaaaaatgaagcagacactggaaggcagtgtgattatatgttaaataattgttagaggttgtgttacgagttcacaaggggatttttgagtcctatgttgtagggtagacattgtagaagagatagcattggaaaatatgcagagggttggttgactatttcgtgactggacctttcttagtgctccagcctcatgcatctaattgaccctccaacattgtttggactgtcccaaggagatctcaaacaataggtcagaagtcaaccttggcatgtcctcagaccacattgggttgcagcagctgaacgccaatggctcccacctcatcggaaaacagaggaaaggaggtcacattagtgcacagatgtttgaagagtttgaaggagagttagaaagttagaaggaagagcccgtcggtgtctgtattctccacgaagccaccttcacgatcatctgctgccattaaagatggggtgagtccatgaagctcgaaggaggcaaaggccgaaagggcttttgggagaactgagaggaggcactggcaaggaaagcagcagagacccgaggatcggtggaggcggagtcacggacccggcctatcatgacgttttgcagcaagagcgaatgaggcaggttggtgagatccattcgtagtgaggaaatggagctactgtgttgggatgtacatggggccaaagcacattccagggagcggaagcaagagagccaggtcgagacacagaaaagcacctggggaagctgtactcagtgggcagagctgcccaggaaactaaaatgattctggagaattttggagacctaggaaggacctttctttgtaggtcatggcaggaggtctggactttttagaaagatatcagatggaaagctctgaacacgggcatggccactgcagacttgtttctgaaattgccaagtagaatctggaaacagaccgatgtcagaatcggccactgcaggactgatgaagaaggtagtaccgctaatcgggctgccctcatgaagatggagagggtgtggtcacagggcagcccggtggaagcagatggctaagcgtggcagtaggtgggagggtgagggaagtggcaatgagtgacgtcaagtacaacggggccaatcaaactttaagaggtctagcggttttctgattagtgtacttaatctggactccttagcacttgtctcggagctgctcctgaaacccaatggggcctctgagcacaacacaggggcaagagcattgcaagttgcatacattggcgaggcttaccctggagcagaagaaccattcttgtgaggctgtaatgagaaccgctttctgggatgactgtgtcacctgtcataccccaaactggcgatatgttagtgtcttttgagcatacatatggagaccctaaggcagttttgctgtgtgtttatggtggtcacacaacactacacattatgatcagaggctaagtcaaactgcgttaggtaccacggtagtctgtgcccagagacaatttcgtttttttgtaaaattgctatggtagtatataatatctcccaaaaggacccagaactcacctaatcagaaaattctgtgtagaaagcaggtacactaaactctaatttgtgtgattctcggcgtgggaagcctgctttgtgataaaggcattttggaattttaatttcatgtgcatttgtttcgcattagtcatgaacttcattcaccagtagcctcctcctgtcccatgactcattcggagatgtttgtcagccatcagggatgcggaaggccattagattaatgggcactaagtggcagtggttccccccacttagtggcatatcgaaattactctaagataatgaaagtgaatcctgttccctgccctggagagtcttattaggctggggttagggaattttccttcaaagttctccaggtgataacattgcacaatattgttttagagactgggagagattcaaaccagaaaaggtggctgtggcttgtgctgcctctgcctctgcctctctgcctctgcctctgcctctctgcctctgcctctctgcctctctgcctctctgcctctctgcctctgcctctgcctctgcctctctgcctctgcctctctgcctctgcctctctgcctctgcctctctgcctctgcctctgcctctgcctctctgtgagtgtgtgtatgagtgtactcgcatgcaaggtgtgggtaagtgtgcaccagtgtgtatgtgcatgtggagaccagagtttgcccctggctttcttccttatctgctttatctttgagatagaatctttcactgaacttagagctggttcacctagactggctggcccactaatcctaggaatcctcctgtctctgtctccccggtgtgggggctacagaggagttataatgtctggcttttcacacagatgctggggactgggtcctcatactgttttggtaagcactgtacttgatcaagcttgaaacatggtctttgtatttattttctgtgcatttgtgtgtgccggagggtatgtatgtacaccacgtgtgtgcagtgcctgcagaggccaaagggggacatagatctcctggaactagagttatagatggctgttacacactgctcgttgcggctcttcacttccaagccatttctccagcccccctggagtgtattctttgatggaactgacatatatctttaaaaagttttataaaacagcaaatcagaaaacgaagatgaagtttaacaaaactttgaaaggatcagcactctattggtttagatagcaatagccatttttttctatgtccatccaaatgtcaaaccatctttctgttttcatgactggcagtgttgacttacttcgtcaggcttccaccagaatatgtggagtgatgtgtacaaatgccacagagacacaggaaacagccaaatgtgaaatctaacacctcctcctcaacacatcacggcgtattgtcttagctctgaaggtgatatccctgtgcatgcaaatgtcagcaagctcttgtacatctatctcttagtagcttacaggttactaaggatgcatatatttatttatttttgtcttcttttatcccttatacttgccaatatcctctttccctacctgcctacacacgtacgtacgtacgtacacacacacacacacacacacacacacacacacacacacacactgttaaagggtcaggtcagcctaaatgcaattctctttaaaccttatcagccacagtattagtatcaacgatgctacagcaccatatatgatgaggtctgaaataggaggaagttccttgcaattatgtcgactctatttgtagcaccttcttatattttctattctatactccagtccattaaaattaaattaaacttgctgatcataaaccaagaatgccaatctttttttcttcttcttcttcttttggttttccaggacagggtttctctgtgtagccctgactgtcctggaactcactttgtagaccaggctggcctcgaactcagaaatttgcctgtctctgcctcccgagtgctgggattaaaggcgtgtgccaccactgcccggcgagaataccaatcttaattaaaaaaaaaaaaccaaacaaacaataacaaaacccccaaacacattgcacagtgccttagcaagcttttaccagcggtttgagaaacactgggttttgctgtggcccttggaggcagaaaggtttggattggatcttgagccttgccgctcctctgaggtcaggctaagtaagtggctccatttcttccagtacaagatggagatgagacgctctgcccgggtggcttgttgggaggctaaatgacgctatgcacgggaagctctgagctcctcgtaagctccggaatgaatgtggtattggaaaccatggtggctgtcgttctcagctccgcttctccccgtctctgtgcttctgcatggacgtccttacacacatcagtcagggtgaggagtctagaatattctataagaagtgaatgtggattagggggagaattattgagtgctaaccaagaattactactggaagtttctgttacagtccttgaactttataataatttccccctttctgttttcagggggagcatcgcccctctttcctagtcttcctttcccctcacccccatacctcctcccttttggctttttatttttaacttatttatctcatcttttgggatgggtttccttttttcctttttttttttttagctatttttactcatctctaaaatggaaataacaatatctgatggctaaggcggttgtgtgtgctactactgaagattggtgttaaatacctaggatttgtttctgaagtggtgggtgactccggagcatcatctgtgatgctgcctgaggcggttcctctgtcctcatcagcaccacagccctgctttgaccctcttttatctcaccctgcttgtctgttgaactctctttggccaggcatttcctctgctccaatctgctcttcctctgacataaatgctttccttggaaatccaattaatagtgatttatggattccttatgaactagttaacttagttggcaattaagtacagactgctctctggtctccactgcatcattttattatgataattacagaattattagttagcgttatatgatttatgtctcacatcctcagcgaacttatgagttccctgagggtagcaaccatagcttacatatctccaagtacacctacccccactacagcaattagcacaggcagatccctgtaatcctgtgtgttaagagctatctgttgagggtaactggggacccagacagcatgtgcctgaagacaagagtgtccagtgggctggggacatggctgtgtgacatggtaagtggcaagaacacgcagaagcactcgatgatgaaggtgcagaagagcccgggtgtggcatgaccactgtcagcttctaggacagagattcaaacccagctttgtcctgagtgatttagtttgcatctttctttcattgtgtctcacttgtgcacctgtctaatatgactcctactaaactgtgtatagaaaattctggaaggttaatagttgagggacttcaatttttatctctctctgtctctgtctctgtctctgcctctctcaactctcctgccttggcttcctgagtgctggggttatagggtaccccaccatgtttaggctatggtgggaatctgtaagtatttctccaagtaaaaaaatgacttgatttcatctttactcttgaatgaaatattgtctgaacataaaaatccacaaggtggtctttttcctttaatgctttttctttaaaattatttttgacatcgtgtgcgtgcatgcgtgtttgtgcacatatgcagccacagtgcagtgtgggggtcagagaacaacttctaggagttggttctttccttccatcgtagtgttgtggggactgaactcaagtcatctggtttgctggcttgggcctttgtctgctaaattatgctggcccaggacttctttcaaaggtcttctggcttccattgtttctgtggagtactgaatttgagcttaaaggtttgggatattttgctgttggctttgttttttcaaaggtaacatgtcttttgccctctgttttttttctttctctttctcttttttttttcttttcttttcttttttttttttttctgttttgggcttgggtatggtttttatctgtgtttggccatttgtggttttcagtgacttttgatgtgtgattagaaaatgtcccgttgtggtcttctcaagaatttgcctcacactttgtcttgtctttgtagactttcaaattagccacagtttaaaccctgcagtgttcccctatggaatctatgctcgtcttacactgtctcatctttgtgactttcagcctcactctggaatttcctttgacctgttttctggttcacatatgccccccacccccatccaggtatcaaagctatttttaggcacaccccataagttcttaattttaatgatatccattaattctataatttaaaatttttaatggtttatctgacaaaatttttccacctttgccttttgttttcctatagctggttttagaactacccaagggctagggggtggttctggctttcagtcagaatttgggaggcagagacaggtggatctctgtgaatttgagcccagtttgatctacatagtgagaccctgtctaaaataaatgcctgaagatgtttggtctgtgtgcatccatgtacataccattatatctgcttaaggcctgtgtctgtggcctgtgggtctgtttccactgatgtttgtcgccattgatctttatgttcctaattatagttactgaatgtagcgactgcatcagaagaactccagacagagtggttaacctttgagagtgtcaccgtcttcagtgtaagagtgacatggaagctctaggnnnnnnnnnnnnnnnnnnnnnnnnnnnnnnnnnnnnnnnnnnnnnnnnnnnnnnnnnnnnnnnnnnnnnnnnnnnnnnnnnnnnnnnnnnnnnnnnnnnnnnnnnnnnnnnnnnnnnnnnnnnnnnnnnnnnnnnnnnnnnnnnnnnnnnnnnnnnnnnnnnnnnnnnnnnnnnnnnnnnnnnnnnnnnnnnnnnnnnnnnnnnnnnnnnnnnnnnnnnnnnnnnnnnnnnnnnnnnnnnnnnnnnnnnnnnnnnnnnnnnnnnnnnnnnnnnnnnnnnnnnnnnnnnnnnnnnnnnnnnnnnnnnnnnnnnnnnnnnnnnnnnnnnnnnnnnnnnnnnnnnnnnnnnnnnnnnnnnnnnnnnnnnncgctccctcactccctcgctccttccctcccttcccctttccttccttccattattattttatttcagcttcagggatccaactgtgctcctcatgtttacaactcaagcactctactgaccaaaccaccttccgaacctatccatttatttttacttactctcatttattttattttatttttcagttatgtgtgtgtgcatgtgtgtgtctgtgtgtgtgagtacatgtgagcgcaggtgcccttggcagctacaggcattgtcttgccctctgagctggagttacaggtggttggctggacaggtgtacccccaacctgggtgcctacaaacaagccctggtcttctgaaaaagcagcaagggctctcaactgctcagctacatctccagccccacttaggttattacttacaatgcttgggaaagttccagggcctccttttcctggctcagttttgattgccagttgtctccttggtcacctgaatgtgccccaaattctggtcagcttctgagccctgcaacctcctcccagaggttggcacatgcacttgggatgtttagacatctctagaaggacataaagtcaaaatgtttgaaatggtattttaggaggatgcacgtgctggtggtgtgtaagaaagagaaacgggtgcaaaagggcccatagaacagcagagaggccatgctaactgagggcgatctggagtaacaagtagagcccctggcttcccccatcatatagactctgtagaatctcagtttcccaacctttctgcttttctctaagctatctctctataggggtgcgggtatgtcctaaccaagcccctgtctcctagggccgagatatttaaataacagaactcaacaaaacttcagtactaatagttgcttcatcagaaaatcaatatccctattgtaagaaatatggtaaaattgtattgctatcccaataaccaaatctcagttatttagccagagattaaacatggctgccaatggcaccagtcaggaccgtggcgttgttaacttcgttgggaaccacttgtagtatgttgatcacaacaagtaccttgcctggctttctgcagtggcctccgcaacactgattaccgaacagtagtttcaccatctcattggttttgcttcctgtggtttctcttgccctgggtcagctgtgttctgaaaacattaagtgtaaaattccctaaaattccataaataaacacgaagtactgagtgatgtggtgagtcctcacacatttggccctaactcacctgggcagtaagtcacccacttgtcctgtgtgtccatgtcctacaaggttgtcctcagcatcctagttatcagatcagctgtcacagtcttggatggtccgagctcaagtaacatttatcttagttaagcagtgcccacggggccagggtagtgaagcttgttaccagtgaggtggccaaaaagaaatcacaaggtttcttcatattcaaagataagagtcggtgccatggtctgcatgtggtggtcagaggacaactctatggttgtcctgagtctgatctttctacatttttgtactttcctccactgaaccaaccccggatggaggaatttcacatttttttggtagataattataaaggcaagagtaaggtcaacacatttttaaaggtagttattataggtagtagggaattagaaatagagactcctgttagagtgtagagctaactgaatcctcagcagaaaaatcaagaggggcaagttgctctccccttcaactacagcacatgagagccttagtgtgtatgttgtatgcagcgggaaaaatagtgaaaataaatttcagaaaatccctaattgtttttttttttttttttttttttacatttttattcacatgtcttggtttattttgtgttcctgaaatgaaacactggagattgtgtttttatgaaagaaaggtttttagtcttagaggttcaggaacatgaaacctcatatagcagacatgacagggacagagacttttggaattagattttaggggaggtgcaaggcttgctgatgaaaagtcccccattgtttgcaagagtgattttctctgtgtgtgtgtgtgtgtgtgtttgcctgtctgcatgccatgcctcgagaggccagaaggaggcatcagcttccttggagttggaattacagatggttgtgagttgccacgtgggtgctaggaaccaagctcgggtcttctgcaagagtaactgtgctcttaaccattgagatatttctccagaactctaacgaccattcattccggaacaaatccagccccctgggacctatccttggacctactcatgacatcagggctccatagcctagcagtagatctacttcttgaagttccaccaggtcaccttgtacctcactaggtaaaaggtacctcacaagtttccagcttatgaacctttgagggacaaaccaaacaatcagctacagtattgtggctatcgacgagataaacgttgagtctgggttgcgttgaattcctgttcgtgatgggctaacagacagatggagcagtagggcctggaaattagatgaatggaaaagatctgtcagctggaaagaccagacgttgtaggatgccatagaacacccaagcaataaatatgtaaaaattaaagggtatctggatcctggcttctcagagcatacaagcttagttttctctctggcaattgagcagttgcacaatggccttccaggacttgtagggtcaggctggtctttcgagtacttcctgttgttacctggtgtctggttgctggtcttttcttcttcaaggtcgttgtgttttctccttcctgtattagttcttgtaggtgccgtaacaaagtaccagactgtgtggcttatcaccatggttctctatttgccacagttctaccacaagtagaaaatcagggtgcctgcttcatctgaaaactataggagagactccatcttgtttgattccagatactggaagccttagatattctttggtttggggggaagattcacccaggctctgttgctgcctttgtgtagctggcttctctccatatctatatccctagttcctctttgtctgtattttcagttccctcttacaatgacatcagcttctggtgaaatgctgctcaggacattgccatcagtagataaatacatagccttcatgttttaagataacttgtttaacacaccctgttgactaacactgaatttatgctgagcaaaggaatatttacctttaatctcagcctccaggaggcagagctgtgcagatttctgggagttcaaggctggtttggtgtacatagcaagttccagggaagccagagctacatagaaagaacctggctcaaaaataaaccgctacaataaaatgatcttacagccaaacacatatgacactgatatgacacatgcctgagtctcttgagtaagcttgtctgattacatatattttctgcatgaggcgcatcacagcctctgtgtgtatgtgtgtgtgtgatcttgaattgttttgtgttgttgtaatagcacagactgaataatttgtaaaagacagaaatccattcttccgtaagtctcacctggaaagtccaagaccaaagctgaagcatctagtatatacttggtgtatctttcacatgacagaaggcagaagggcaaaggtgacaaaacctgaatttccacatgtcaggagtgcataagaacaagagaacccaccttgaaaccacttttactgaaatttaaatgtgcttatatgaaggtataactcccactaaataaatacatcctcaaagacctcaatacccaacactgatatattagggtctgggtcttactatgaaagtttgagggggcaaaagtaatcaaactatagtgggtgggtgagtgtgcatatgtgcatgtttgagtatgttggtgtgaataactgtaagcatggaagtatgaatgtgtttgatgcatgtgtgtacattagagtgtggtatgtgtgtgtttgaattgtatgactttaagtatataggtggatggatgaatctgtagatgtgttggagtgtgagcgtgtgggtgcattttagcttatctgagtgtataggtgaggggctggcagggaagcctccacttgcccatcagggataagccctatcaactgcttgatgtactcacagctcggtaccttatacttttttttttgcgggggggaggtttaaatgagaagaagatcaacaaaaaaacacagggatgtgaaaaatgtcatccctaagtagaccacagaaaggactttagtttaaagtgggagagaggtggtgagaatatagagaattgctctgtttgacctcagctgggtgtgtttgccccaggcatccagcatttcccccttttgtgcgagtaggtaatgactatggaaacaatgtaaggatgtgtttcgcagttacaaatacatctttagtaagctattgcctatgcacagaacttggaaagaatgcacaccagctgtatctctccttatgaactgttgcttaaaggagggaaagcttcgtgaaatatttcaagtgattatcatttttttttcttaaataggttatcagtggaaaaagcatgggggggggaatatatactgagatgatctcgcactggaagcgtggctcctcacctgccccctcacctgccccctcacctgccccctcacatacccctcatcctgccctgcccctgagtttaggcatgccagcagcacttctgttacgtcacctcagaagtagcgtccattgctttctcttcatgactcctgaaactgtccccactttcgctcttctggccccattccatgtggtgaggtcttcctctaagggaagattggaggacattgtggtcactactcggcaaggcagaggctttatggtggcagcggtgtgtctagcttctcgcagagttcccagcatgctttggcaactccttacacccgtacacaggactcttcatgtttctaattcccatctttaaagagtcctgtaagaatcaagatgttttatcctgtccaattctcagaacctccttttcagtccaagatctttgaatggatagatgatgaatgactaagagattgaatgaatgtgagaatggaacaaatttgagattcataaaaaacagctgtcttggtgactgttcatcaccttcccatgtcctttgtaacgcctccaaggcttttcctactgcctcaaaagattggccacctggagcctgcaggtgttgcatgagaccacccttccatggcggctttgccttgctagctcagaacttacctggtccttgtgttggccatttactgtgtagaaggaggaacttgggttttttttttttttttttacaagattacacattgtcctctgagaggatgaagttcatgctctcagagagctcacagtttgcatgggaaagtgaggctgcacacagctgaaaactttataggcataacaggagatgagatgaaagccgggactgaaatagctgccctaaagcaatgtctgcttcttgaggaagatatgtgagtggtgtaggagttgggagaggaagggttgcttcaggctggagtgctctggaatgacctttgtgagaagtggagaggctaggtcttggagcctggtggaagagtgacaacgcccaggaggaaggaagagctgggtgtgatgaagacacaaagtggacttgagctttgtgtgggggcagtgtacggagaaaaggggggatggctcccaagtacaaaggtgaggcccttgttgattcatgtcatggtgcttgttttcttggcaccagtgggggacagatcatagaaactagagtgtagagcatagaggattgcttggcaagatggaagagagaattatgtggcatgaatcatctcgatccacatctatagagttttttttttctttcagttaagcttggagcaaaagagttaaggttgtaaggtcacattgccatggatgcctgagtcaacatcaccttgaattccaggtgtcagactgaatgtaaatgtacaaacatgagtaggaagatgtcaggcagagagtgggtagcagctttattagttattccacaggggccgagtttgggtgggaagaaaagagccgactgtatagtctggtaggtaggagtgtgtgtgtgtgtgtgtgtgtgtgtgtgtgtgtgtgtaggcagtgtgtgccctggtggagtgacaatattccagccatgcaaatgattgtcaaaggaaaaatgagcaaaggtgaaaggcatgcaagtgaggccaaggctgggaggctggacaggaagggaaatgctggatgcagtgactaagagattgtactaggggagatgaggaagtaaagaggaggacagggaagtcactgctgagctctgaacatagagtacgtctagaaggaatgactagacagtaacaaaccttaaacctttagtggactaaattaattagcattttagtgccagtattgagaggtcaaagtattgatacatccgaggtcctcaagggatatatcagttaccatagctctttgtctcaggactgtttacccggcatttgatttccttttggatggtaaaatattggtccttgaatgttggatatgctgacagtttcttctataagcacagcacagagaggaaggataaaggtttattcgagacaaagtcactgagaggcatctgggcctacagctagttgggtgcatggcataccatgcccataaaaacttctttcagctgagagtcagcacggaaaatgtctggtctggtccattttgacattcactgggagaacaggattgtggaaagagcagatggcaggggaactgaatatactcaactcctgcctaggaagaggctgctgggaaaaggtccgtgccagggggtagaactttgtggtgcagataagaccgtcagtcgcagaaataccaaacgctgtccttctcttctgccacagggtaccatgccggtggaacggatgcgaatgcgcccgtggctggaggagcagataaattccaatacgataccagggctaaagtggctgaacaaggtaggtgcgcagtgcgtgtgtgtgcatgtgtgtgtgcgtgagtgaatgaatgtgtgtgtgcatgtatgtgaatgtatgtgaatgtgtgcatgtgtgtatatgtgtgcatatatgtgtatgtgtgaatgtgtgtgtatgtgtgtgtatgtgtatgtatgtgtgtgtatatgtgtatgtgtggatgtgtgttcggggacatgagagacagagagacagaagaagacagagagacagagagagacagggagggaggaggagagaagagaaaagagaagagaaggtaggtgtctcttgatgaaagtgggcccagtggatcaccaaataaagttgtgttcaaaatcttatgctcattcctataggaaacagccagtgattataaaatgcaaattcatcatatcaaaaagggtttggccacatttactgaacgacagtggggcacagggcaagggtggatgttaagtgatgaggaaggatgnnnnnnnnnnnnnnnnnnnntttcctacacatatatcctgtaggcactgcctgtgttttcttatagacgtttcagttttacaggtctcactttaagatctttgatctacttggagttagttttcatgaaaggcgctaggtatcggtcttgttttctttcttctgtatgtggtcagtttcccagcaccaagttgttgaaagaagatgtgttctccattctgtatcctgccacatggctgaatctatcatttctagaagttgttcggtaaagttttgaggatctctaatggatagtatcatgttatctgcaaatagaggtagtgtgacttctttctctatttgtatccctttagtttccatctcctaccctgttgctctagctggtgctttgagcacagtactgaaagtgaatagggatagtggacatctctgtctcctttcaagcgtttcttcatttcggatgatattgtcttgactttctgacatacagcctttactatgttccagcctttattttgttgattattatgattgtgagattttggtctttatgtccacttatgtagtttattatatttattgacttggatatattgaatttcagggataaagcaaacttggctgtggtgtataatctttttgatgtgtgtctgtgtttggtttgcaagtttccttttaactatgagcagtaagtgccctgtttaccattcgttctgtcattgactggttggagaatccagtcttgttctgaatttatctgtatggttgcttgtaatttttgccaggccatttgtttaggaatgcaggaggcctctactgcatggttcatcatttctcttgtagctctgtgtgatttccattctggttgttggtattcacagtaaggatttgtttagaccaaggcactgcagctgctccttggaccaatgacctttctctttttctcactttcaaacaggcttgtgtttttgtaaatatcagactatctctgcagagggtaaaaagtccaaacagaaggaacaaactagttagaacatcttatcagtgtgttggggggggggtggtcggtggctggagcagatagcagaattggtttccatggtcaccaaagtgtgtgtgtgtgtgtgtgtgtgtgtgtgtgtgtgtggtgtgcctttcaccatgctcaagacagtctcagtagttctccctcagttgggcaggtctgttcatatgcacacatgggaggaatcagatgcattctttccattgggagtgtgtacagccactatgtgtgcaggaccttgaaggattgggtcactggactctgaagatgtctcagggtctatgtagacatgttgcaacacggttcctatcccttggaacataagaatctttgacaagaatccttgttaaaaatctcagtttaaaaatgaatcttggatctggagagattggtttagcagttaagggaatatactgatcttgaaggagactctagttcagttcccaacacccatgtcagagtgcctcacaaccaactgtaaccccagcttcttggggacccagtgccccctgtacatgcacacagagacacacatacatacatnnnnnnnnnnnnnnnnnnnnatatgtatgtatgtactttctttatatgaaacccctacttgtgtatctacctgccctaacaaagtagttgttaatcatttacatttccccaaatgcacatgtgtgtgcatttctaatgttttgattttttaaatacagttcctcatgttgtcgtgacccccaaccataaaattatttcattgctacttcataactgtattttgctactgttatgaaccgtaatgtaaatatctgatatgcaggatatctgatatgtgatgctcagaaaggtcttgatatacaggttaggaactactggtttagaggaacagctaagtatgccttctctgaggagacccaagggagattttttttctttcaccaagaacaccaagaattctgagcaaatctctgtttcctcttctttactctactctctctcttcattttttaatctaaaggacacggtgaataatttaatggggcaggctttatttttgcaccaggtgcaagagcttaaaaccagaaagcagattgtggccagcttttagtgagggaaaaagatattgtcaagaaaacaaaacaaaaccaaccaaaacttctggtttcattttatcttctcaggttcctcttaaacttttttctttcccttacctatttattttgaatttaagaagactgtaattgaatatctctgcttgagtcctttcttccagaaaggatgggacaccgaaaaatagaaataaataaactacatacttgctttacatgtcctgtcatgtactggaaggttttgtggcaagcttggaagctgaggctcaggtatatgctcagtctctgctaaaaacacaagcaagagctcaggtcacccttgatcgctcagtgagcaacaatcaaataggggaataaggagagagggatggtagttcagagacagtgtagggagatatagggtaacaggtaaaagcaatggcagttggtatttgttaagtagtttttgctacttactcatctaagcaagggattaattacatacatcaagtcacttaatccccactctgggaaagggctgttattttccatgttgcagaccaggaaactgaggtacagagaggtaaggaaggctccagtgtgagattgattttcaagaaaagcaaatggtttgtttccactttttcttttttggacactagcttcctattctctcttttgctcctcctgaaccatatctgtatgtggcgaacacaaagtgtcattgttccttttgtgtcagctaggcactggcaacctgtagttgggtggtttttacaggaggttgaccagtagtctctagctctaaagacctatcccaatctttataatcttggaatgtggccctatatgggggtttcagatgcagttaaggacttcaagatgggagcatctggattaatctgtctggactgtaagtccaaggacaggtgtctttagaagagactgaagactgaagaagacacacacagagaagctttgccaaggaggtgtggtgcagccacagcctatgaactcctggagctatcagaggctgagagaatctcttctagaagcttttaaaacaccgaaaccctgccaacaccttgactttggatttttgactttcagaactgtgataggatgtatttcacctttaagccacttagggtatggtcatcttttataactgctttagggaataagtgtcccctctaggttcttctcattcatgggggctccttgtatgctatccactactcccagtgttggggataaaaaggtcttgtacatattgggcacatcctttgccactgagatacattcccagccttgtctgaatttttctactgtagggtcagaggcaacaatttctctttgtataactaaatccttagtgtgctcaggggggcattccctgctgggtttttctgctctggcttttggtgccacctttctcttccaaaagaagactggagaaagggacaacctggtcatctcttgaacacttctactaggctggacctgaggccgtctagttgaaaggagcatgtcgttggctctaacttcctccacttctcaggacaatgttgacacaggaatgcctaggctgctctgtgtctgagggtccctgttaggcaggtagcccacagggctaagctacagtaggtgtgtgtctgtgcacataaacagtaggggcctcagatgggtcagggtattttctatccatacctaaacttctacgggcatctttttataggtttcctctaactgaggctttttgacattcatctgttgacacaaatacttcaccaagggcatgttgccttttctttactattcacaagtactctaaagaacccctgtctattttgagtggctgggtgtctttccaaaacctcatttcttgttgaagactgttgggattctagtaaaacagaagacccatccctaagactttgtgattctcttacacgacagttggtttctcagttcaccttgtgttttcatggttgcagaatgtgttaatctgcttaccatgaatttatctgaggactcacagtgcaggtggcaggagcttctgtacagcatggagcccaagtcctggtgagggctgctttacaacatggctgacagcagaagacgcaagtctgtaagctaagagaaaatttctgggcagggtccgagttgctgctaaaaaaaaaatagcagcagattccttaaggaatgagagcactcctatcagactcaatccacttctctaaacagcacctacccattcataagggcagagtctgtgatctaattactctacactggactctcatcacttaacccatccgtgctgcagacaaaggaagccttgcaagacacactcaggctgcatccagaccctagcagtggatgctcaggatacacttttatccacgcctatgagctgtcagtacagtacagtatagctgtcctgatggttactctatgtacagtgccagacctagtatctgatcagataggaggcttttcatatagcgtgcttatgaatctgtgaataaaggcaaggaacccaaattcatggctatttttattgttgttgttttacactaagataaccaagcttggtggtatacatctgtaaccttcatactcagcatggctgaaaatttgagtctaaatgggctatctatggaaaccctgccagcagcagcagaagaagaagaggaggaggaggaaagaaagagaagaaaaaagaaaggaaggaagtcaggcaggtaggcaagtaggcaggcaggaaggaaggaaggaagaaaaaaaagaaaggaaggaagaagagaaatcaatgctgggataatggcttgaccactatcatgtctgtctccaaggaagagtccagtcagtaattatttaagccttaatttgttttcatgtcctacttctaataaaattgaaggagacctgtcatgtagcagggcccagccacagtggaagagtccagatgagcatctaagaagttgccagagcagcatccgtaccacttgtttgtgaaagacaccgtggaagggccatctactctttacgacagtatttgcatgtggcatagtacggctgagtcatacatttagaatgagtagaagacccaatctacccacatccaggtttctcactatctatagctttaccttttctgtgtggctagaagggggttttatcttaaagccattggatgatgttgcatatctgtaaggtttaacggtatctccttattatctcctatatctttgtcatttggacaaagtcaataatttttttttttttagtatcactgtcccacttacattcagatgttttgtatattcccaagataccttctaaaaataatttatttttgagattataaatattaacctcacttcctccttttctttccaccttctgcactcttccatgcatcccctgccccccacactcttgtaaattcatggcctctttttcttccattgatatttattcttaaaccataaatataacctgttcagcctgtataatattacttctatgtgtgttctcaggttgaccatttggtcacatggtagatttatttttagcttccccacaatgatttatagactggtcggactagtttgcaagcctgccagcagtgagtgagagttctgatcttaccacatcccctctccagccttggctgtctattgtttattaatctttgacattctgactgcggtgcaattaaatctcagagttgttttgagctgggttttcctaattgctagggattgtgaacaatttttttttctgatatttcttagactcccccccccccccccttgagaactctgtgttcagattcaggtttgtcttttaaatgggtcttttgtttctttgtttgactctggttttttagttctttatatattctggatgttaattctctatctgatacatagctggcaatgattctcacccattctctgagcttacgctaatccttgttgactgtttcttcagctgtgtggaagacacactttttagtttcatgaaatctcccttgtcagttgttgactttaatgtgcaaaccaatgaagtcctactcagggagtcttttcctacacatatatcctgtaggcactgcctgtgttttcttatagacgtgtcagttttacaggtctcactttaagatctttgatctacttggagttagttttcatgaaaggcactaggtatcggtcttgttttctttcttctgtatgtggtcagtttcccagcaccaagttgttgaaagaagatgtgttctccattctgtatcctgccacatggctgaatttatcatttctagaagttgttcggtaaagttttgaggatctctaatggacagtatcatgttatttgcaaatagaggtagtctgacttctttctctatttgtatccctttagtttccatctcctaccctgttgctctagctggtgctttgagcacatactgaaagtgagtagggatagtggacatctctgtctccttcctgatttctgtcgtatcgattcaagcgtttcttcatttcggataatattgtcttgactttctgacatacagcctttactatgttccagcnnnnnnnnnnnnnnnnnnnnnnnnnnnnnnnnnnnnnnnnnnnnnnnnnnnnnnnnnnnnnnnnnnnnnnnnnnnnnnnnnnnnnnnnnnnnnnnnnnnnnnnnnnnnnnnnnnnnnnnnnnnnnnnnnnnnnnnnnnnnnnnnnnnnnnnnnnnnnnnnnnnnnnnnnnnnnnnnnnnnnnnnnnnnnnnnnnnnnnnnnnnnnnnnnnnnnnnnnnnnnnnnnnnnnnnnnnnnnnnnnnnnnnnnnnnnnnnnnnnnnnnnnnnnnnnnnnnnnnnnnnnnnnnnnnnnnnnnnnnnnnnnnnnnnnnnnnnnnnnnnnnnnnnnnnnnnnnnnnnnnnnnnnnnnnnnnnnnnnnnnnnnnnnnnnnnnnnnnnnnnnnnnnnnnnnnnnnnnnnnnnnnnnnnnnnnnnnnnnnnnnnnnnnnnnnnnnnnnnnnnnnnnnnnnnnnnnnnnnnnnnnnnnnnnnnnnnnnnnnnnnnnnnnnnnnnnnnnnnnnnnnnnnnnnnnnnnnnnnnnnnnnnnnnnnnnnnnnnnnnnnnnnnnnnnnnnnnnnnnnnnnnnnnnnnnnnnnnnnnnnnnnnnnnnnnnnnnnnnnnnnnnnnnnnnnnnnnnnnnnnnnnnnnnnnnnnnnnnnnnnnnnnnnnnnnnnnnnnnnnnnnnnnnnnnnnnnnnnnnnnnnnnnnnnnnnnnnnnnnnnnnnnnnnnnnnnnnnnnnnnnnnnnnnnnnnnnnnnnnnnnnnnnnnnnnnnnnnnnnnnnnnnnnnnnnnnnnnnnnnnnnnnnnnnnnnncagtaattggtttccatggtcaccaaactgtgtgtgtgtgtgtgtgtgtgtgtgtgtgtgtgtgtgtgtgtgtgtgtgtggtgtgcctttcaccatgctcaagacagtctcagtagttctccctcagttgggcaggtctgttcatatgcacacatgggaggaatcagatgcattctttccattgggagtgtgtacagccactatgtgtgcaggaccttgaaggattgggtcactggactctgaagatgtctcagggtctatgtagacatgttgcaacacggttcctatcccttggaacataagaatctttgacaagaatccttgttaaaaatctcagtttaaaaatgaatcttggatctggagagattggcttagcagttaagggaatatactgatcttgaaggagactctagttcagttcccaacacccatgtcagagtgcctcacaaccaactgtaaccccagcttcttggggacccagtgccccctgtacatgcacacagagacacacatacatacatataagtacaaaataaagtgcaggcctacaatgaaacttatacttttccatgaaagtatttccaagctctggaatatatttattcagcagtgctttttatgcaatatgaaaaactggttaaaagctatgtgtggtttttaaaagcttaccactttaacttttttaaagtgtacatttcagacacattaggcacctgcagggcataccacagccacctaccaactccttccagaacttttctcaccccacccaaagaaaacacctcaccccttaagcaggcactgcctttttcttctttcctcagttcctggcaactgctgagccacctttagcctctaccaaagcttctacaggaagctttgggcttcctgggcattcggtataaacggggccattggatgtttgttccctttgtgttcctttggttgtgtctgggttatttttgttagaaccatctttaaaaagtccatccatatggttgtatgtgtcagtacctcgttcctgatctgtataaactaaatggaatgatatccaatgacatgcaagaagtttagtagagtgatagtcctctgtatgcacgcaccacacttggtttctgggtccatcagctggtgggcgtttggactgctttcatcatcgggctgtataagtatgtgtatatccacgttatcagtttttgctaagtacttataattctttgagtacacatccagacattaagcaaaactgtggcattgccagcgttgtgtgctcacctttctgaggagaggccagattgtttcccacagtggctttgctagtccacgtgtcccccnnnnnnnnnnnnnnnnnnnnnnnnnnnnnnnnnnnnnnnnnnnnnnnnnnnnnnnnnnnnnnnnnnnnnnnnnnnnnnnnnnnccgcagtgaaggtgttgttttagtttacaactccttagtgattggtaacaaccaacacattttcatgtatgtatacttttttaaattttattttatttttattttttcggttctttattcatgtatgcgcacaccccccgcaaacatgcaatgcttgaaaagatgttgcctggcgaattcaggttgtgttccgtcggaatttgtttcatctagaaaaccttctgtacttattctttgatggtttcatacatgtcaacagtatattttgatcacatccatccctcatatccctcccactcctcctggaccccacttcatgttcttcatgttcttcatgatcttcatgttcactctttttgtttaaaccattcacggagtttcattagtaccacccatgagtacacaggtatggggccgtcagctagagcatgagtgatatcttagcagccatacctccaaagaaagatggcactccttcctgagcagcagccaactgtcaaattgctcctcagcccgggtgagactttgtgagcctgtctcccctccgttctcaatgctgactggcttggttttgcatggcagacatagctggggctagttcacaggtctaacagtcatgacgtctctcgacacttctcttcactctcccagtgtcacagtctttctgcccctttgtccgtgccactgcctgagttttgaggcacttgatgtggataactcatttgggaccaagcactaaatagtcacttattcttagtggctctgaatagttacattggatgctgcccactgcacaaaggaacttctctagccaagactgggagcagcactattctgtggctataaacaaaaatatttagaaggcagtctggaaacacgtcaatttaggggaaaaaatgtcctgggtttccagccagggcttgcaacttttgcccaggtttacaatagcagacacaaatctgcacctgtggagcaggtctcaaatgcaagcagagagaagctggttacagacattgctgtcacactgcaccagtggacacgttccctggctggtctgcattatagcatacagagtccagtgctggaccactgacagtttaagacactgatgtgtttcctccctggcatctctgtagcaccttgcagcattctgaaatctaggcatcagggaaaccttcccatcaggtcatgtccttttcattcacattcattttcacatcaaaataagagacctcattaagtaattttgctctcggatttttcatgcacattaaaaatttaaaattccactcagcccccttcattggcccacctgtgggcaacacatgctgaacagtgaagaatatgaaaatagctgtaactttcagttcttctttattaactgcctgttataaatacagtcaatttcccctctctaataacagttatggaaactctccagcattttgaaatatcgtcagttcagtctctgtgagtggttttgtgtagagttctcaagtcccttggagacagctgggtccctttctagactcactgtgtgagatcaggtggtggaaattccctcctgaccttcgttttcttccccactggatgatgctggcatccctggtatttagaaattatctggagtccccaaaaacttgaaggaaggaaggaaggaaggaaggaaggaaggaaggaaggaaggaaggaaggaaaagaaaaaaaaaacacctctcccccaacctccatcacattcctgggctttaatcgccatagaatcccagtcaacaggacagagaatccaaatctaaaaagatgagagactgtgtgtggggtaatagggggtcacatgaccttggctttggttttagatacttcgacccccaagaattccttggtaaaataattgattcctttcttcagttcctcacttgtaagattgaaatcataagtttaactccttaggcaataacaagaaacaaaaatgagtctcatgtgcacgtgcacagtcagatgttcggtgtgcaggcatgttcggtctgcaggcatggtcagagggcaggcatggtcagagggcaggcatggtcagagggaaggcacggtcagagggaaggcatggtcagagggcaggcatggtcagagggcaggcatgatcagtgtgcaggcatggtcagaggccaggcctacccaccttcctttcacacatgggatttcacaatgagtaggacctttttcctggaacattagtttctgcatgtctttgctagattgatcgaagccattgtgagttgtggtcagaaaggtagagtctagtataaagtttatattgaaattattgccaagctggatatctttgcatttctttctactatgtccaagacagtacctagacctgagagggattagaacagtatatgcacgtgtgcacacacatacatgtgcacacacacacacacacacacacacacacacacacactgcaaaactgaagttacttgtttcctgaagcagtggtttccaatacactagacattcctttagcagcatgacaagaagaaatgataaaatgcttactagaagttccagccagaggctcgttgtcagtcgaaaggcaagggggacatagaagcatggaacaatacattgtagagaaaatcttcacctttggccttataatatacgtttttgttttgttttgttttctgtcaggccatgcaaaattctaaatttcctcctggtcagatcattagaattagggacccagtggggcagtgggattgttaaattttattttacttgcattttctttaagttgtgtgtgctgcatatgtacagcatgctcacggggttcctagtgtgcatgtataatggccgtcctcatcagtagctctgcaccttagattttgagacagtgtctctcactgaacctggagcctactgacggggcaagactgagcatgcgccaggagtcttctggtcttaactttagcaggactaggattacaggctgtgctggatagacttatgtcaacttgtgagaagctaaaaatcttctgagaagagggaacctcagataagaaaatgcctctggctctctggctatagacaaggctgtaggaatttttctcaattcgtgattgatatgggaggatccaacccattgtgggtggtgtcatgggtgggcttgtggtcttgggctcaataagaaattaggctgaacaaaccatgaggagtaagcctcactcctccatggcctctgtatcagctcttgcctacaggttctgccctgtttgagttcctgtcctgactctcttcaatgataaacattgatacggatgtgtaagccaaataaacttttttttcctactttggtcgtggtgttttatcacagcaatagtaacactaagacataggcacgcactgcacctagctttttatgtgggtgtttacacttgggtgttcatgtttgcatggtgagcacttagccaactgagccaacttcccagcccaggggcttgtctgacagtcgacttccctgcagacactcaacagactcagttttgcttagctgtgaagttgagcactagaactttagatgcagcccatgtgtcttcagtcaaagcccatgtcttgcttcagtgtggacctaactttttttttcccctttcatttcaggagaagaagattttccagatcccctggatgcatgcggctcggcacggatgggacgtggaaaaggatgctccgctcttcagaaactgggcgatccatacaggtgttaaaccttgccttgtttattcacacagttnnnnnnnnnnnnnnnnnnnnnnnnnnnnnnnnnnnnnnnnnnnnnnnnnnnnnnnnnnnnnnnnnnnnnnnnnnnnnnnnnnnnnnnnnnnnnnnnnnnnnnnnnnnnnnnnnnnnnnnnnnnnnnttattacaaaaattctgcaaggagatatctttagatgtggaccttttatttcatattggaagctcgtctctgcttgttggcattctagtcttgtgtatagttggcatctcaattctaccattttattttccccctcaaactatatggtagagccagagtgaccatcttgtcacggcgtggcttccattgtctaggcttttaaaaataaaatgccagcaccttagaaatgtctcagcaaaatgggattgttccagcaaagcacttagaacagaaaggctttttgcacctcccctccttcccagcaggactggtagacatcccctccttgtctaatgtccctcccccttttccttatctttggctattttgctaggaaagcatcaaccaggaatagataaaccagatccaaaaacatggaaagcaaattttcgatgtgccatgaattccctgcccgacattgaggaagtgaaggacagaagcataaagaaaggaaacaacgccttcagagtctaccggatgctgcccttatccgaacgaccttccaagaaaggtaaagatgtttaccgactaaataaacgaaccctcagtgtccgtaacagtaccattttggttttctcatttctgcctctgtcatcactttccagggtagaatacttgtccactctagatgagacaatcctctctttactggccttggaaaaatgactttcaaggcaccaaaggcagaaaagaggcctttggtattttgatctcatatcaatgaggcagcgggtttcagaaagaatgtcatgtaagaacgtccatgtttctctgtccttccgtgaattgatccagaactacctttctgttgccacaggaaagaaaccaaagacagaaaaagaagagagagttaagcacatcaaggtaatctttggttgactagaaagcccctgttgtgaccgtattgtcatggtacctgttctgtctcatcaggaccttggcggaggctttggcctttctcctgctattgcgttttacatgcttttaacatctcctctgcatggacccacctgcagacacaagtccacagatactttgcctagtccagcgtcccagagcaaaaggtgtagatgatgccactgatccgcagagcttggcagtcccatgtctcagctccagacaccagcttgtatctaaggctgtgaaatatgactttagaaacatgtttgaaaatcagagaaaaaaatttttatctctaatagagatgtattagctctatatctgtcacaagccattaggttgggaacacagtagttcgtatactccattagcaagagtttcagtggttcattctctgctttgtgagcgataagtcccaggagttttccatggagacaggtctgtgggcttaaggttttcagttgactaggttggtctaaccacacccctatatttcaatgatcttagtgcatagaaggtgtagtagcccttgttaaatacggaggaaggtgtcagataatcccatgcccgactggggaggtccatcagttgttaagcaaagagcacacagcacagctagagacccaaagaccacccaagagatgatataagtgcctggcttctgtgtacagagtaagggactgaagaatgagttgactggcctttctgtaagatcccatggctccttagcactgaaattgaagtggatgtaggacattctgatttatcttaaaaaaaaaaaaccacgaagggacataatttaggtatctcattagacttcagaagggacagcatcctgtgtgtgccatgagggtacttggctgctctccaggattctccgcccctgccaggtaccttcatggaaaatgtagtagtgtctgtgtagaacctatccacatcttccatctactttaaattaccccttggttactttttatacctaatatgatatgaaagttgttgtgttttatcatttagataacaataagaggaacaggtctatatatgttttgtacagaccagtgattggttgaatatgtgggaaatatgtaggtctagaattgtgaatacatatggctgtctgttgttagacttttttttttttaatgtgtctaggctgcctacatgtatgtctgtgcactatgtacttgcctggtacctgcagaggcctcagatcccttggagctggagttaaggacagttgtgagcctccaggtagatgctgagaattgaacccgggtcctctcagagagtagcgagtgctagtaactctaaagccatttctccagctcctgtagttagagtctgagggaaatcttagctagctgttcaaggttgagaggtgcttatctctgtgatggaaaataaatattttaggtagactagcagtgacactttgtttcatttttgatgttttaaagtttctgatttattttaaaaatagcaccggactggggactggagaggcagctcagtggttaagactgtgtctaggggacctgagtttggtccccagcacctatgtcaggtggctcccaactacctttaacttcagcttcaagagatccaaagccctcttctggcctctacagacatacacctctctctctctctctttctctctcaatctctctctctctttcccccccccatatccctctctctctcacacacacatgcttaaataaataattcaataaatagcataggactaatgattaattttgttgtaatttttattgtggaaaatttttatacatgtaggaaggagtaagatttactgtagatcaccctctaattttaatatcaatcaattcttgaccagatttgcttcatcagtgcttccatcctttccctcactttcaatatcatcatagatatttgacccattttgactacagaaacaatttgtgatagttgtcaaaatattttcaggcaaatctcaaatatgatgtttcttctgtaagcatttcactatatatttttaaaagtacatgccctttaaaaataccatgctgtcattattttagctgatgaatttgacaggaatccctctgtatcgttaaatatctagccaatgctcagttttcctattatcacagaaatggtactacagttttatatacatatatatctgtaatatagttatacatatatacgtgtaatatatattttatatatgtctatttgtatctgtaatatatatgtatatattaccttaactaatacccacaccatcagctgggtgtggtagagagcacatatctgtaatcccagcatccaagaggctaagttagggagatcttgagggtgattgtcctgcaccatataatttgaagaaaactttgtttcggaaaagaaagagaaatttacctgagaaccccataggaactttttgctgtatctcaagaatttttcttttttaaaaataataccttttaatggtttatttttacttcctgtgcgttggtgtttggcgtaggtgttgtccgtgtgaggcagtcagatctggaactggagttgctgacagttgtgagctgccgtgtggttgctgggaattgagcccaggtcctctggaacccagaattttctttcttccttccttccttcctttctttcttccttccttcctctctttctttctttgtttctttctttgtttctttctttctttctttctttctttctttctttctttctttctttctttgcttgcttggttggtttttctttgagacacagtgtcactgtgtagcctaggctagccccagacttgcagcagctctctgccctcagcctgtctagtactggatcatggaccagagccaccacagccaccacgagtgaccttgctttcagtctagggacattttctatgtctctttttataaaacaaaacaaaacacagcattattttctccctatgattataaaaaaactaattattagccatactgttttccatggtgatatttttagacctgcattttgagtgtcccaaatatatctctacatctcagtaagagatgtataacttttttttcccaccacaaatacctagtttgaagaattcactgtactcttaggtgtgattgtctcatatttagtatgttcacagcattcagtgactagcatagagcaaactatacatatctgataactgagtgggagcatgaacatttattaaaaacgcagatatatttattctgtatggtgggagtcaggggctttacagtacagatttaatttcataattgcagcgagtagaaaaacaacagcagaataacatttacttttcactatattttccccacacgtaaccactatattccattcagtatcaaataccaaaggttatatggctggccgttacgttatgtctctttaagacagacacactacttccggtgaagcagtcaaggctgagacatgcagcatcccggggctgtaggaatgtaaggaaatgtgcttcctagggtgggtggcatgtgggggtcctcgtaagaaaagggtagctttggttacatcagcctcgtggggccactaaaatgtggtaggcacagccctggtgagacttagccatgttcatccaggaagtgagcggccttaaatgaagccacgtgggtggagctcctgctcaggagcatctgttatgaaatccttgtgtaacaaagctatgattaacactgtgttcctcaagggacattgttccttcagcggaaggctgatgaatcatacttagtgcagcctaacctttggatgtagctatcttttgcatttgtcttgcatgcagtgttatagtagaacgtgtatcaggccggtgggtttttcccaattctggggtttatagttgctaaaggcattgatcgatctgcagaatgattccaaagttaattccacaatggctttgggatcattacagttaaaagattgtctttaataaaggattaatagtctacttttttgttaaaagtctaagtatgtaagctgtgccaggtttgatggcatatgccctgtaatcctagcaactgggaagtggaggtagagggtcaggaattttaaggtaaacctaggctacataggaagtttgaagtcagcctgtgctacaataaatcctggttcataaaataaaacaaccaccagccatactgggccatggacacattcactgtatgttccttgctgtttcagaaaatagtttctccaaggatccgtggagggaggacgttgtcagagttaaaatggagtcactgggcatggtagtgttttcctgtcagtctggccttgacaaggctggagcagggggatattaagtttaagggaagtctgggcttcatgataaacccttatctcaaaccaagatgaagttggttgtgccagctcttcccaaagtcaaggggtttgaagaaaatgctttttatgcatggatagctgacaataaatatgttctaactttccttcattccaacctgtgttcatctaaacacagacaaattccacctcaaacagaaactggggtgttgtaactggcttggcagaaatgaaggtatttttgaagagaagtgaacagacaattcaaacagtggaccccaaagaaatgggacgtttccccagaaatctcttgcagggagaaggaaaagcccccaaccaatggggaaacttgtctcccagtgagatttcacaccatcctaataatttgttagaccacgctttcatctcgaagcctgttctgcaagccatgtttggtcgcccatcctcaatagccacttaaaagagccaaattaatagtagaaaactgaaaattgagattttttttcaatatgacaacattgtggagaagaacagaaagatccggtaaaccctcaggtccatctttaagaacctgaaaggccaccatcttcagggtcccgaaaggcaataaaagtttaaatagaagacagagaacatgaacatctatctacacagtgctggtcaaggtgtggtcctgcccaccactgacccatcatgttctgggcttcagttacattttgtaaggccatctaattggaagagctacacctctaaaatatcttcatttttatcactgtctatctgagagtatattctgtgtgctcagtgggccacacatcactaaaataaactacctctgtggcgctacctgtctgacctaagaaaattagaataagagaaacgttagtaagcagtctcagactgaacagtgaatgtatgcgtttcagaaaataccatggaacagattgccctggtacaacagattgctctgttccatataggcaagaccaaggacgataaggctaacagtaggcagggtggtaggtgttgacaatttttagttcctctaaatgatactattcccttatttagctcttcctgggatggtcagagttttccccttttccctatctaggaagtacaggcataggggatgagtcattttcccaagatggcatggctttctggagtttgagaactcttctgggagctgcagaacttgagcctgaccctggggagggaaatgtggcccagatcagataatgctcactccttaggaagggatgcttcatgagtgaaggcctagaggtcagcgttatttggtttcctctgaatgaatatggaaactggcttaatttaatcaggggcattgtgtggagaacaatggaaaataaagatgcccaggtaagatggatatgaacgagtgcttcctgcatcagggggagtgggggggggttggttgcagatgaaaacacaagcatttccaaatcaacgcatcagtgttcccatggaaaccgaatagaaaggggcgtaatgtcatttggtggaagtcactggtctgtgttcgttccgagggcagccatgtggttagaaattacagaatagctggtgtccattctgcagacctttctcacaagactgtttcctgcaacagtacattcctgattagacaggacgattggggcagcagcagctccttccttgcttgggaaaactcttcaggtttaagactatgatgaccagggaacctgtatcggagggcgacttgaaaacacatcagagctgctttggataaagccagctaggaagatgaagcaggttaggagctatccatcactggccattcccacccccctcccctgctggtggactaagtcacttctctggacacagaaagggatagctttcatcttagaggaaagaaaacatagtttattctagagctaaatttgagtgaccatggctctggaacaccgatttaggtcactccagattccatgttccaccgtggaaacagctttgtgaggttttatagttatgcagaatcaagaaagtcctgtcatggcaaatttaaaccacatcggtgggtgcctcagagaggctttctcggtgatcaggggaacctttcccataggcctcatatctgatggcattcttactttgggagttgttagaagctagtgttgtgctgtgaggcaacatagttcaaaaagtgtttattgactagtcccaccatgttggttctgacacagtgtgggcaaggatagctattaaggaagctaaagctagctcaagatgagctaattagtcctacaccatttcagtctccttatcttactgaagttctactcagtgtatcagtctctttagatgcagctccttgccaggaagtcttgttaacacttctttaggaaatcaagttgagctacttggggcaaaggtttggagcccagtggatcaaggtaaaaggaagaaaatggcagactgcacagtaacaaatatagacaaagatggtgaccgttgggatggagcccaggggacattgcttccgagtatggagcgtgaagacaggagtagttaaaagaggaagatacagagaaggaatactaggtctggagcttgtttgtgagtgaaatgacatctggcaagcagatgtcatgctgagtgtctgaggcccaaaggtgtgaccctttactccagaatgacattggaagtcttgaaaacaggcccttttccaagacagaaattctccgagatgtagggaaagaaaagggagtgaggaattagccatgggaagctggtcagttagagatgagtaaagatggccttccttcagggaaggaaaggtggaggcaggctggaggctgcttggcagcatttgttctccatgatgctatggctgctgaggtgacctctgcaccctctagagttctgtctctgcctttcttcatgaagctcagcctggcccttttcacagagacctggaggcactcttagatctgaggtcctcagattgactttgagagagtagtttgagataggaggtcgataggaatgggaaatatacttagtgccctgggccctgggaggatggatctagacacaatgctttagcacagggatgaggcagaagagacttagagcagaggggtaaggtgttccactcactggttcctctgttgctttctctcacaagcccagctagatggcaagcccatctagcaagccaaggccagagaccaaccaaagtgaccctgtgtcgggtgttaaggatagccatcagtcacccttaaaactctctgcagtacccatttccttttacttaaaaaaaatcttttaagctacaccaggtctagattttgtaattacagaagatgcctttgagcctaaatatttggcagggttaatttagcagtgcagagggaatctacctgagagtgggttacttgtttgtgtttgtttgtttgtttctttgtttgtttttgttggagtgaggccagaggcttagaaaccaatgtagccccaggtaagctgatttagaagagaacctctagcatgatgctcaggtctcaatgggctaggccccagtgcaggggtaaagtgagggagtattgagccaggcagaggtgggtccccagagataaccaggacaggccatccatcttttacactgcctctgcatgttcatagagaaccatcaccttttcccacagtttggaacccttgggtttttaatgttatttagggtttttgtaaagatgattgtattgccttatttagtatctgtttgtatgtctgtgcatgtgcccaaacatgtacagtgtgtagcgccatacacagtggaggtcagagaaccccgtgcctcttttattcttatttttcaacctcttagcttttgatatccccatttctaactgtttcaaaagtcttggctgagttcttgaggaagcttccacaccctggaaggagacttgtcagggagctagcacggcacataatgttctatatgtcaccatcttgtccactggagcactgcttctcagccttcataatgctttgaccctttagttcctcgtggtctggagacccccaacagtaagattattttcatggctacttcatagcttcaaatttgctacttttgtgaatcataatgtaaacatctgatatgcaggatatctgatatccaatgatgcgaagggatcattaacttccccaagcaggtcatgacccacaggttgagaacggattctctggggtgacagaaccaatgagagtcttcccagagtggttgtaggaggagtaagacattagttgagtgttctacctcaggcaggacaccaggtaggcagagagaagcagcagcccactccatccatcctgttctccatctggatgggtgcagaagatgaggctcctgcatcacaccaggctaaaagtatcatgatcttggaaaatgaacttagtgagtcctaattttgagaagtgacaaaagtgtcgtttgtcaccaatagctacactatagatcatgtgaaacacttagaggtctctgttgcaaagtcggaatagttctattttcagataaacgcaaacctggctgttctgttactttgataagaattctagaaatagaatcacgggtaagaaaggaaacaaaaggagaacgcacaaaagcagttcttccagccctttgtctagagtcctgtacttagttttcttggggaggaattgaggaaagggcgtgccataatggaacgtggaccatgattgcggagggaaaaatggagcagggaccattgggagccccaaagaaaagatggcgcccacggtgaggtgcgcatgtgcagggtctgcaggtgattcaggctgtcaagagggaggcaaagtcctcgctgtcctgtggatggagcttaggggaaggggcttgagaaaggacccttggatatgggaagaacagtttaactggtgaccttcgatggtagcgagtgttctttaagaataaatgtcttgtctatattcgtctcctttaagcttctcctcacccggtggcatggtacccattaccattctcagccgccatgtggctaaaatgactcaagaggaattaaagggttaaattcagcctgtgagaagcagaggagccaggcttggtcacctggtctgattccagagtcatcttctgggggcttcattctgcagctggaggcaggacaggactataggcctccccaagggtgtgcttgaggaggtggagggagccgaggcaggcatttgtctagatgtttgacaatcaaggaagggaaactggtaagatccctccccctcttcctgaaagaacaagccttctcttggaacttactaacaagggggaaatgcaagacgctgagagaaaggggtgaaatttctgttcagtggctctgcccttgggtgttctgggtatttgacctatggtatagtgggtaaaccctccagttagggctttttgtttgtttgtttgttttgttttgttttccttaagctgagctgagcatcgaggtgatgcccttcagataaaatcatcaagggagtttgccagaggatcgtgaggactatacagagtttgatctcaattccccagtgtgaccaattgataagaatgccctggatgccttagaatgcccagcactcctgactttactgctttacccacaacgctcctctgcttacagcccctatctccactttcttcctccagctatttcttccattttggattcctcgggagttgtccgactatgtggcttttgtctggcttattgctgtctctgaaacaaatgtagtcttaccggaaggaaataccctcatcaaagttctgagtctcaatcatactttagaactggttttctttggttggttggtcggtactctcaggagatggagggttcaagtacacttgaatgaagaacagatacagagttcaaacagggaaagaatgtattctcctttgtcctcgtcagtgtcattatgtagtagcctcttgggctgggcgggagttttaggcacaggaaggatgttgatgtgacggtgtggaggtgggattacctgtctggtgataggccagtgagaggagacttcagctaaggttgtggctcatgttaccatccagccaccagtgcagtgttgctcaagtggccgtagcacatgatgaagtgtgctcaagttctcacttccattttccttggagctccggtcactggctcatcacctaggcagagttcattttaaagaagtgattgcaaaagttagaagcatgccttctctgcaggaatccaggagtgggttctcctgagtactgcctcagagggggaggaggctcaggacccaggcaagggacgcacagaacagtgctacggctccgtccaaccacagaacagtcttctgtgtatctgcagctgcaggtatttcccgagggcaagccagatgtgctgagaacatttccttggaggaaaaatgaaagaaaccgaatagctagcttctttaatgtcaggctgatttaaagagacaggggatgcatttgggacatgacacgaatgactaaccccaggattcaaccaattagacagggggagaattgaagctaagaaaggggagaggaaggaggtgttctcaattcttttttcttttcttcttcctagcaagaaccagttgagtcatctttggggcttagtaatggagtaagtggcttttctcctgagtatgcggtcctgacttcagctataaaaaatgaagtggatagtacggtgaacatcataggtaaactgttttgacatcttctttttatactcacgagcagcctttgaggtttaaactctgtacaaaaaaaaaaaaaaaaaaaaaaaaaaaaaaaaaaaaaacccagtaatctcaaaataacacagtcagtaagaggaggtcttggaacgtgtccaaatcccagtgctagcccctaggtttcagagcttccacaatgagatatgaaggtttgtagaggagtgagaaccaagaaaagaaggccaggcatacaagcttcctctctggtggctagcggttagcagcacttcatcaatcatggccagccatgtggacaaaatgtcatttgtttaacttgggagccaaggagaggaaagaccatctctgtgggtccccttagcattgaccttatgcacatctgcccagaggtggcacacatttcataggccaagaaactgaggcacagaaaccctctgtcaaaggactgactggctcagtagatttgcagagacttttccaccctcgagatgcagttctgggaatgaagtaaacagggagcgatctgggctctattcctacttttgtggggagcgagtaaacaggcaaagccacaggtaagcaaaggatcctcatttgtagtctgtgatgcaaaggaagaaaagggaggtgactaggaattacctagaaactggatttgcatgggttgggagggtgtcctcagaagagtgaccttccgccatagtgcctgtgtgaggaggagcaggtgacatgcggaggcaggcaggatgctgacagaaaccctacaaaaaagcatctgaaggaacagaaagcagccagtgtcacatagtttcagaagtatggtgactgctcatgacatcccctcagagacagcggttctttgatggctgttgtcagcttgaccacatctggaattaactaaaacccaagcagctgggtccacctgtgagggatttttttccttaattaaatcctttaaaacaagaggacccacttttaatcccgattgtttgaggtgggacagtccacctttaatctgggccacaccttctgctggcagcctataaaaaggacatggaagaaggaggatctttagttttttgcctccttgccctcaccctcattggcaattccattccttcactggcattagagccactttttcgggattctggtacacactgaagaacagctgagatatccatgcttatggactgaacaaatgctagattcttggacttttcattggtagacagaccttatcgaactagctggaccacagtctataagccactctaaaatcctttatatgtgtgtatatacaaatatatgtctgcatatatatatacatacacacacatatatatacatgtatatgtgtgtatatatatataatttttttctgttggttctgttattctagagaactctgactaatacagattttagaatcagaaatcgctctagaacaacagaagtataatatgcatttttaaaatatctggaataggcttttcaatatggcaatacctacagttattgaggcctctcctgggaattcaaagaatattaaaaagatgtgaactgttttataaactgaaagagatgagtgcatttgggtatcctaattcaccagttgtgagaggcaacagatgtggtggcccaggatagaaaacgtttgacagtttatggaaaaataaggaacatgatgattgttgagtacccctagtctctctagatcatttaacagtggaaaataatgagctccgaaataaatctaaccaccggttagtgtctctgaatagtgtgcagaacaacagtgtaaagctgaccagctccaaatgcacagaaacagcctaaaggtttctaagtgtgccccggtagagaatcgtctctctggcagccacagagcacaagttgcagaaaaccaaaccaaaggcctcattgtaaggatgactgagtaacagtgaaaattcaagtcccagtcttggaggatgttggagtaaggacattaattggtcaagaaccggatcctgtaacttgggatggaaatatgtggggagactcaattgaagttgagaactttgagccctcaggttcttgagggtttatttttacctgaggtcttagtctctctaccctcagcagatagactcacactaccccctctgaaattttgccctttttacctttgaccaaggaaatgaatccctcattgtctgctaaaccagcagtaactttctctgaaagagatgccagccatgacaatactgttgtccctcagggcccaccaatacttacctctagacctataatcagacttaaggctaagcaggctcctagaagggagccggaatgtgtggatcacaaggaagtgcaccccatacactactaaagagtttaacaagtttgctgatcgtttatgcagaactctaggaaatatgtgtggggttttttgggtgtgggataacgcaggaggaacataagactgagtttattgatacggtccctctgaagggaggtcctaggtttaatacggaagtttgctcagttaaaaggactgtgaaaattttgtttgaatggttggtgaagcacttgtcaaaagatggcctatcaaggaggaattggagacggctgatcttccttggcttagtgttaatgaagggcttttacgactcagggaaattgcagtgctagagtggacatgccgtccttcacataggaaggcccggaagatgcgttcttcactagtcttatgtaagacaattaaattggtgagagggccctggcatagctgaagagctttgtttccctttttctcgtgtcagatcttagggttggaaacactactgctcagttggatgaattaaatgcagtaggtttaattggggcacaaaggggcaccgaatagccagaggtgaggtgattgtagttatcaccagcatagaccaagcaatattcatagtgtcctgagctataatgggcgatgcagataaagtaaattttataattagatgactcatgtggactttaggtgctggctaatcaatatggtgttcccaggcatgaagtagataaaaagcccactgcatttgtagttactatgtgtcagtggaaaaattctcaaacaaatgaaggaaaggttacaatggatagtggcaaaaggcaattccagcctataaaccagttttcaggcttcagcccgtttgcagacccagaacccttggaatgaagcgatggcccctaaggaaggatcttgataaaaggagttagtctttctccactccttccccccagaaggatatatggccttttaccagggtgactgtaacgatcagaaaggaaacagtcagaatttccagggtctattggatactggttctgaattgacactgagtctgggagatttcaagaaacatggtagccctcatgttaaagaaggggcttatggaagtcaggtgattaacagagttttggatgaagtacaactaacagacccaaggggtccctgaactcatcctgtagttcatttcccagatccagaatgtgtaattgggatagacatctaaatagacgttggtatgatcctacactggttccctgtggagtgagggatattatggttgaaaaggctaaatggaagccattggagttgtctcccccagggggaaataatgaatcaaaggcaatttcccattccagaaggaattgaagaaatgagtgccaccctccaggacttgaaatacacagggaccgggtggttcccaccgcatctccctttaactctcctatatggctagtgcaaaagacactgtatcatggagcatgactattgaaaacttaatcaagtagtgactcccaatttgtagcatctgtactagatgcggtgtccttccttgagcagattaatgcagcttcttgtacatggtatgcagctgttgatctagcaaatgcctttttcttggtacctgtccgtgaggaccatcagaagcagtttgccttcagttggcaaggccagcagtatacctttacggttttactcaaggacataagaactctacagccctgtgtcacaactttgttcaaagagatctggatcatatttctcttccaaaaaaatatcacattggtgcactatattgatgatgatatgctgactggactcaatgagcaagaggcaacaaccactttggatttttctgtaacacattctcatcaaaggatgagaaataaatccaaccaaaacttcaaggagtccaatggtgtgtgtcatgtaaaggtattctttcgtaggtgaggaataagttattgcactcggtccctgttaccaacaagaaagaagggctgaatgttatgacagttagtgggtctgtttggattcttaagacagcctattcctcatgtgggtatgttattccagcctgtattccaagtgatttggaaagctgctagctttgaatgaggtctgaaacaggagggggctcttcaacaggtccaggctgctttacccccttggaccatatgatccagcaggcttagtggtacttgaggtgtcaatactgtttggagcctttggcaggcccctagaggtgaatcacagaagagacctttgggattttggagcaaggctctaccatcatcggcagacaactcttctttctctgagagacagttctttgcctgctgttgggccttggtggaaactgaatgcttgacagttggccccaaagttaccatgcagtctgaacttcccgtcatgagctgagtgttctctgatgcaccaagttataaaacagggtgtgtacagcagaaatctgtcgtcaaatggaagtggtatatatgtgactagacctaggaagtcctaaaggcacaaataatttacaataaggaattgctcaaacacctatggtttctactcctgttacagtgtcatctcttcccaagcatccacatagagcctcatggggtgtgccctatgatcatccgagtgaaggaaagaagactagggcctgattctacacgctatgcagacgttgcccagaaatggacagctgtagcattacaactccctttctgagacaaccctgaatgacatcagtgaaggtacatcttcacagtaggcagagattagggtagtccccatggtcatacagtttgcttggaaggagaaatgaccagatgtgaattgtcactgattcatgggctgtagccaatggattggctggatggtcagggacttggaaaaggcaaggttggaaaattggtgagaaagacatttggggaagatgtggctagatctctccaaacggggaggctatgtgaagatacttgtgccccatgtaaatgatcttgaaaggtgactttggcagaggaagcttttagtaatcgagtacataggatgacccattctgtggacagtcagcctctttccctagctatccctatcattgcccagagaacccatgaataaagtggccctggtggcagagatggaggttatacacgggcttgacaaggacttctactctctaagtttcacctgactacagctgctactgagtttcatatctatcatcagaaaccaacacagagtcccagatactacaccatcccctggagtgaccagctaatgacctggtggcaggttgactacattgggccccttcctctgtggaaaagacaatgctctgcccttactagagtagctacttattatggtaatggatttgcctttccttcatgtaatgcttctgtcaaaactaccatccatggatttacagaatacatcacttttctaccaccacagtatttcacatagtattgctactgatcaaggaatttaactttacagccagagaaatgtgatagtggtaccacaattgtggtccactggtcttaccgtgtctcccaccattctgaagcagctagcctgatagttaaaatggcctttttaaaaacacagttgtagcattaattaggtggcagaagtctgaaggtctgggcaggattccccaaaggtgctatatgctttgaattaatgtctaagatatggtacaattttcccatagccaggattcagaaatcagagggtagacaaggtagttccactcactgtcaaccctagtgacccataaggaaaatctttactttctgttcccatggccttaaagtctgctggcttagaaatttgtgttgcagatgggagagagctcctgccaggagccacaacaaacatttcactgagctggactctcagactcccttctgcctacttagggcttctgatgcccttaaaccaaggctaagaaaggaataacattgttaggaggggtgattgatccagattaccatggggaaattggattgctcctccacaatggaggcaagaaggattatgtctggagtgtgggagatcctttagggcatctcttggtgcaaccacatcctgttattaaagtcaataggaagctacaacaacttaatccaggcaggatgacaaagggcacagacccttcagaaatgaaagtatggatcactcctccaggaaaaaagccaagacttggtgcaggtcttgccaagggtggaggaaatacagaatgggtagtagaggaaggtagttataaataccagccaaggtcatgtgcccagttgcagacatgaggatgataactgacaagagtatttctgtcatattttggtaagaaggcatttgtgcatatatctgagttttctgtccttgatttctttatcatgtaatttaacaccaattaagagcatatcagtggtcatagtatttaagttctgagatcccaaaagaatgttcgttaagacacattgccacctactgcaaaatactttaataaattttagtatgtaaatactcacttttctaacaatacttaacattttatttctaaaacaaagtattatttaccttttgttttagataagatataaatttttccttagtcggaattattttactatattttattattaaaataagttttaaatttaaatatattttatcatatttatctctttcccaagtctttttacatcccaagtttgtggttatataagggataattatatcataattatgacctggttaaatatataatacatttgtcattatatgtatgatagtcatatcatgttatgtataattatgagctggttattgttttcatttggaaattaagcacgacataagatacgatttcatgtcaagttaactaggggtgaacttttggtggttattcatggctttcaacttgactatatctgtaatgaaccaaaacccaagtgtctgggtacactgtgagggtttttttcttaatcaaataatttgaagtgggaagatccatttttaatctgaatctctgatatggaatgatgcacctaatctagctcttttgaggtgggtatgttcacctttaatctgggccacaccttctgctaccagcctatatcaaggattggaaaaagga

SEQ ID NO: 1295 - DNA, 2435 bp, Mus musculus
tctcaggcaagccggggactaacttttagttttgctcctgcgattattcaactgacgggctttcatttccattttacacaccctaacaacactcacaccttgcgggattgtattggtagcgtggaaaaaaaaaaagcacattgagagggtaccatgccggtggaacggatgcgaatgcgcccgtggctggaggagcagataaattccaatacgataccagggctaaagtggctgaacaaggagaagaagattttccagatcccctggatgcatgcggctcggcacggatgggacgtggaaaaggatgctccgctcttcagaaactgggcgatccatacaggaaagcatcaaccaggaatagataaaccagatccaaaaacatggaaagcaaattttcgatgtgccatgaattccctgcccgacattgaggaagtgaaggacagaagcataaagaaaggaaacaacgccttcagagtctaccggatgctgcccttatccgaacgaccttccaagaaaggaaagaaaccaaagacagaaaaagaagagagagttaagcacatcaagcaagaaccagttgagtcatctttggggcttagtaatggagtaagtggcttttctcctgagtatgcggtcctgacttcagctataaaaaatgaagtggatagtacggtgaacatcatagttgtaggacagtcccatctggacagcaacattgaagatcaagagatcgtcactaacccgccagacatctgccaggttgtagaagtgaccactgagagtgatgaccagccagtcagcatgagtgagctctaccctctacagatttctcctgtgtcttcctacgcagaaagcgaaactaccgacagtgtggccagtgatgaagagaacgcagaggggagaccacactggaggaagaggagcatcgaaggcaagcagtacctcagcaacatggggacacggaacacctatctgctgcccagcatggcgacctttgtcacctccaacaagccagatctgcaggtcaccatcaaagaggatagctgtccgatgccttacaacagctcctggcccccatttacagaccttccccttcctgccccagtgacccccacgcccagcagcagtcggccagaccgggagacccgggccagtgtcatcaagaagacatctgatatcacccaggcccgtgtcaagagctgttaagcctttgactctccctggtggttgttgggatttcttagctttgtgttgttctttgtttgtattatattattttttttctctatgatacctatcttagacacatctaagggagaaagccttgacgatagattattgattgctgtgtccaactccagagctggagcttcttcttaactcaggactccagccccccccccccctcggtagatgcgtatctctagaacctgctggatctgccagggctactccctcaagttcaaggaccaacagccacacgggcagtggaggtgctgcgttgcctacggtcaaggccagcatggtggagtggatgcctcagaacggaggagaaaatgtgaactagctggaatttttttattcttgtgaatatgtacataggcagtacgagcaatgtcgcgggctgcttctgcaccttatcttgaagcacttacaataggccttcttgtaatcttgctctccttcacagcacactcggcgaccccttctgtgtccactaccccactacccacccctccctcctcaacccctccatcccggtcctctatgcgccccttccccccaaccaatcccatcacaacctcttacctatcctttccctcccaaccccttctatcccagcccaccacctaccccactcctccccaactcctccattctagcccattacccacgcctctctcctcagcccagcctaccccatcccaccctgttcctttcctccagtttcctctcctcaaaggcaaggctctacatcttggaggaggaggaggagaagaaaatgagtttcttcaccgctgtcccattttaagactgcttgaataataaaaaaaaatctttctaatctgctatgcttgaatggcacgcggtacaaaggaaaactgtcatggaaatattatgcaaattcccagatctgaagacggaaaatactctaattctaaccagagcaagcttttttatttttttatacaaggggaatattttattcaaggtaaaaaaattctaaataaaatataattgttttttatcttttctacagcaaatttataattttaagattccttttcctgttcatcagcagttgttattacatcccttgtggcacattttttttttaattttgtaaaggtgaaaaaaaaacttttatgagctcatgtagcaatcaaattatcctgtggattgataataaatgaatatggtatatagttaaagatttt

SEQ ID NO: 1296 - DNA, 1050 bp, Mus musculus
atgccggtggaacggatgcgaatgcgcccgtggctggaggagcagataaattccaatacgataccagggctaaagtggctgaacaaggagaagaagattttccagatcccctggatgcatgcggctcggcacggatgggacgtggaaaaggatgctccgctcttcagaaactgggcgatccatacaggaaagcatcaaccaggaatagataaaccagatccaaaaacatggaaagcaaattttcgatgtgccatgaattccctgcccgacattgaggaagtgaaggacagaagcataaagaaaggaaacaacgccttcagagtctaccggatgctgcccttatccgaacgaccttccaagaaaggaaagaaaccaaagacagaaaaagaagagagagttaagcacatcaagcaagaaccagttgagtcatctttggggcttagtaatggagtaagtggcttttctcctgagtatgcggtcctgacttcagctataaaaaatgaagtggatagtacggtgaacatcatagttgtaggacagtcccatctggacagcaacattgaagatcaagagatcgtcactaacccgccagacatctgccaggttgtagaagtgaccactgagagtgatgaccagccagtcagcatgagtgagctctaccctctacagatttctcctgtgtcttcctacgcagaaagcgaaactaccgacagtgtggccagtgatgaagagaacgcagaggggagaccacactggaggaagaggagcatcgaaggcaagcagtacctcagcaacatggggacacggaacacctatctgctgcccagcatggcgacctttgtcacctccaacaagccagatctgcaggtcaccatcaaagaggatagctgtccgatgccttacaacagctcctggcccccatttacagaccttccccttcctgccccagtgacccccacgcccagcagcagtcggccagaccgggagacccgggccagtgtcatcaagaagacatctgatatcacccaggcccgtgtcaagagctgttaa

SEQ ID NO: 1297 - DNA, 96593 bp, Homo sapiens
agttgaatatacttcttcttcttttttttgagacaaggtcttgctctgttgcccaggctagagtactgtgacaccactgaaaccgacccaatagttccatagacagtttttttcttggaaaaccgtatcaattgatccttctggtcttaaagcttgaaatttacatttgttttatctgagcttcttcctcaggaaaggacctccaggtctggcaaaaagtacctaagaactgaaacttaccagctaatcatatccagacaatgagatgccaggccctcattcatcatgattgcttccttgcccctccctagttcctgctttcttacacattattacacatcttccctgctacataaacccctaattttagtggccagggagatggatttaagactgatctcccatctccttggctgcaacacccgatgaaagccttcttccttggcaataattgttgcttagtgattggtgattggctttctgtgaggtgagcagcgggacctagactgaacccctggcattttggggacatggtcacggctcactgcagctttgaactcctgggctcaataaatcctcccatctaagcctcccatgtagctgagaccacaggctcgagccaccacgcccagctgatttttgtaatttttttgtagagacggggtctatctgtgttgctcaggctggtctcgaactcctggtctcaagcaatcctcttgccttggcctcccaagtgctgggattatacacgcgaaccatcacacacacctggcctggcctagcttgttttttttttttctttttaaagttgttgtgtatttgtgtgggcgtgtttggtaaaagaacattaattaattttatttatttgtggaaatggaaattggagagaaagttaaaggggaataaatattttgacttaggaattcaaaaatagaattaaaaagactgaattgttttagagtgttacaaatgtgtcatgcaatagactgagagggcaataaagaacagttgaaaattcctctaagaaatcaacgacttggcaggtgcagtggctcacacctgtaatcccaacatcttgggaggctgaggtaggaggatcatttaaggccagaagtctgaaaccagcctggacaacatagtgagactctgtccctacaaaaaataagaaaattatccaggcatggtggtgcacacctctggttccatctactcaggtggttgaggcaggaggattgcttgaacccaggagttaaaggctgcagtgagctgtgattgtgccattgcactccagcctgggtgacagggaaagaccctgactctaaaaaacttttaaaaaaatcaacaactgaagaaattcttgcatttcattgatgttgcagagacaactgggaaatgtatagtgtcagtttttaaaaccacaagtcgatcttatttagaaccctttaaagtcttcctattgctcttaaaataaaatgcaaaccccttattctggtgtctcccacctgttcaccacatccctgtcctctttctgtcacacaactctgaaatcagtcatttcctgtctgttcccagaatattgccagaccctcttgcttcccagacctctggccccactctttcctctgcttcggtgaagttggtacctgtggagggtcgaattgtgttctcctcctgcaaattcatatgctgaagtcccaactcccagtacctcagaacatggtcttatttggacataggttagttggagatataattagttaaaatgaggtcctatgggaatagggtgggctccttatccaatacgatcaatataagtgtccttatcaaaaaaggaaatgtgggccgggcgcggtggctcacgcctataattctggcactctgggaggccgaggtggagggatcatgaggtcaggggatcgagaccatccttgctaacacggtgaaaccccgtctctactaaaaatagaaaaaattagctggacgtggtggcgggctcctgtagtcccagctacttgggaggctgaggcaggagaatggcgtgaacctgggaggcagagcttgcagtgagccaagatcgggccactgcattccagcctgggcgacagagcaagattcagtctcaaaaaaaaaaaaaaaaaaaaaaaaaaaggaaatgtggacacagacacatgtgcagggagaacaccacataaccatcaagacagagattggggtgatgcatttacaagccaaagaatgcccaagcatgctggcaaaccaccagaagccaggaggtgtggaagtctcccccacagccttgagaaggaaccaactctgtagatgccttgttctcagacttccagcctccataactataagacaataaattttggttatttaggccactcagttgtgggactttcttatggcagccttgacaaactaatacaggactacatcattcttcacgtcttggcttaaatctcatttcctcagagcaagcttcttgaccacctagttgacacagcattttctaccaaagcgcctgttgatttccttcagagcactgagacaaacctgtgactattgtgttggtttgcttgtttatttgtctgttgccttcaccttcactagagcatcaggggcatgggcgcaggggtcttgtctggctcttgctttcttcacagcagctctcagagtgcctggagcatcccagtgctcaataaacatggagggtaaatgacgccaagatgcatcaaaggttaaggagaatgcgccaagagctgtgtacgtgaattgccatgcacatttggtatttagcagagataaagttttttaaggaagtgagaacatttctaaatgttctcaatcctttgttttatgacactctgctgtctttctgactggcgaatttccaaacattttcaaatagaataaaggtgtattattcagaatgctatgaagtttgggaaggaagagaacacactgaacatcatcatgcttcatacgctgagaccaaaggcttacagagaaatggtgaaagttgcagcaaatgagcaaagaacctgaatagacattttccatacaagacatacaaatggccaacaggtgtatgcaaaagtgctcgacatcatgaatcatcagagaaatgcaaatcaaaatcacaatgagatatatctccctcctgttagaagggctataaaagggaacctttgcacacttggtgggaatatagactgttgcagccattatggaaaacagtatggaggtgcctccaaaaattaaaatggaattaccattagaatgagactaccaaatggaaccaccatgcgatccagcaatcccacttctgggtacatatcaaaaggaaataaaatcaatatcctgaggagatgtctgctcccttatattcactgcggcgttatttccaatagccaagacgtggaaacagcccaagtgtccaccaatagatgaacagataaagaaactgtggttcatatatacaatggaatattattcaaccataaaaagagaaagaaatcctatctcattggcaacatggatgaacttgggagacattatgctaagtaaaataagccagacacagaaagacaaatattgtgtggtttcacttacatgtggaatctataaatgttaaactcagagaagcagaaagtaaaatggtggttgccagtgactggaagtggaatggagagatgttagtcaaaagatacaaaacgtttagttatgtataatatcaatatgttgtgggagctgatcatagcagggcgagtggcggatgttttaattcatttgtggtaattgttacacaatatatgtgtatcaaataatcatgttgtttactttgaatatgttcaatctttatttgacaattacatattttatttttacttactttaaataaatttctttatttatttatttacagatagggcctccttctgtcacccagtctggagttcagtggcatgattatagctcactgcagacttgaacacctggtctcaagggaacctcctgcctcagcctttcaagtagctaggactataggtgcacgctaccacaccctcttaatttttttttttttttttgtgtgtgtgtgtgtagacagtctcgctatatttcccaggctggttttgaaatcctgtcctcaagtgatcctcctgccttgaccttccaaagctctgagattacaggaatgagccaccatgcctggctgacaattaaatattttaaaataagaaaacaaatataacaatattaaaaatttcttcaaatatacagatgaccagtgaaccaagtagtctcctaaatttaggttacaaatttgaaatttattctttaaaatatcttcaatacctgaaactattatagtaattgctctgcagaacgtcaaggcaaagctatagacaccatgtccctctgtctttaaaggtaaaaggactactttatagtttgtcaccatagagaaataaggaatatttcacatattccacagccatttgggaaattatgccaaaaaacacttcatgaagttttcaaagttgaaagccttcctttgggaaaggaaaaacacacgcacgcacgcacacacacacgcacacacacagacacacaaacacacagagatgcacacacacacagacatagacacacacacacacacacacacacacagacacacacagaaatccaggcaattttagagaatgtgttttcccttcagaacagggcagaatgagtatcacccaaaactgagcaatgtattactcaatgtaaactcatgattttcagaaaatagttgcaacaaaatgacccccacttcctagtttcttgtaaaatggaaggaaccattacataaagtaacagtcaaacatgctcaagaatttttcaacttgaggccaatgacctttgaactttgactgatggttttttcaatcccattgctgttctattgccgcaaaaaatttaacttggctgtgtgtttattcaacttggacttcacaataatgttctttgcaactcaggactgttaatctgtggcttttgtattggcaactgttctggcaagggtggaaccctcgttttccatgactttctaacctcctgaattgcagcaccttggaggggagctccagtggccaagacagaagtggtcccagtgattctggggagaaaactgagcatctgcttgcagacctggggctcctgattaaatcatagctataaatacttaggttttcatttatatgccttcatgttacacattcctaagttgcatgtacagttctgaaggctgtgattacaggtggagatgatgtcggtgccattactgggatgccacagtggaaatcaacatgtcaacctacaagactgtaagaaaacgtcttagaaggctggcactttcattcatttggttcactgctgtatccctagtgctgggaaatgttcctgagcactcaacagattttatttgaatgatcattttatgaaactttgtttcaattttaggaaactaagttaaaaacccatttgaaaggggtcaactttgaatgtgtctttacatttcttccttagttaagatccactcaaggagagatccggcactattgtgctcaagtaatattgtctgcacccgactcccctgaaaagaaatgagtcctgaggcagccaggcagatcttttaggatattccatcccacaggtgaaatacaaacatgcttcatccaggagatgactctagtttcactataaaagacccttcaacttttttcacgttagactgaagtgtttggtcagatttcctcagtatgacaaaggttactctttttttttttttttttttttgagatggagtctcgctctggctctgtcgcccaggctggagtgcagtggtgtgatctcggctcactgcaagctccacctcccgggttcatgtcgttctcctgcctcagcttcccgagtagctgggactacaggcgcccaccaccacgcccggctaatttttgtatttttagtagagacgggttttcaccgtgttagccaggatgttctcgatctcctgacctcatgatccacccgcttcggcctcccaaagtgctgggattacaggcgtgagccactgagcctactttcttacccaggcttccaaaaaggctggagtttccacagagatttattactatatgcatctcatcaaagggctaagatacttcttgactgtgtatatcagtaccatgtggctgttttggttcatttgtacatttttggtttgcagtgacatgtcatcaagggcctaagaacagaaattcattctgtctatgttttatgagtttaggggcctggaaaattgcaagcaacacccatgcttcagggaggccccaggactcaggaaagggggcagtctgtgagtcctcccagtttcccagctaatcaatgaagtgaacagtgcaaggctgtggaaaagatgttctctctgacttgggacatgtataatttgttgcacctgagacatgtgtaggagttaatgtggtcagagctcagaagttacagattttggagtcatcagcaaatagtgatatctgaagccctgggcgtggaggagaacacccaaagataaagcatgtagaatgagaaaataagagggttgaggatagaatgcctggaaacaccataatttagggggctggcagcagacgaggaaccggccaagaactagaataggacagcaggctgtcacatgggcatcgtggagagcagcctgcacagtcagcattcttaaatcctacacacagacagaggagatgcggattggaaacggtcccttagaaagatcactagaaggaaatacataaaaatatccacaggtctattcctgactagtgagatgtcaggtggcttatgttcttctctcaccattcttgcatcttccaaattctgtacaagaaacattaattacatttatattaaaaagctattaaaatataaaacaaggctctgatcaagtctaaaatattttatgagagcctgatgaaaagagcaagtaattattaattcacaagtatttcagtgcctgtgtgctgggcaccatgctaaagataaaacaatgaacaagaggacagctctgttgtttgacaaaaaggagcggaggctggtttggcaagggagggatgtagggcttgtgggacacaatggcaggagatgaggctggaaaggtcgtttggtgccagattacaatggactttatgtgtcttgtcaaataatatggtctttattctgaaggctacagagaggcttttgaggggggcagtgttaggtttggaattgtgctttacctgaagttaattttcgactggattttggcagtagtgtggctgctggcctgggggagtccaagcaggagaccaggagcacaggcagcaggcaagtgcagtaactgaatgaaggcagtgccctgagcacgggccaggcccagagatatttaggggtagcgtcaataggatatgactgattggatgtatgttgcacgaagtagggcattaagaaaaaaaaggaacaacaaacttcttcctgcttatcaaagaccataatgagggcaatggcctttcctgaaacacgttccttgggaagtcaagcatgagcatcacaatagtttggaagctatctgcacccagcaagtgagtttccagttagcctcacgcatggcaataggtgcttaggatgcaggatgcaggttcgtggccccggccctgtctggctcccctgaaatcacaccacagaggcagctgcctttcgtaaacacaaggcaggcagtgttagctggtccaactagacctcattctttctttcacctggggcctgtgcacggaggctgctgacatgagtggactcccacgtgtgtggtgaacgagaagttcaaagtgacactttgcattcttcccttcttctccactctcctcttcccgctccaggaaaaataaaggaagatgattgttttggtacaggaaaaaaaaaatgaatactaggtttttaacttgtgtcccgggttgggtaaagaatgacaactattctatagtttgtatagactttcccttagtggtcattgctatatgacataagaaagtcagtgcctgggccaggcactgtcacaggcctgtagtcccagctacttgggaggttgaagcaggaggatcgcttaaggccaggagttcaaggttacagtaagctatgatagcacaacctgagtgacagagcaagaccctctctttttttttttttttttttttgagacagagtttcgctcttgttgcccaggctggagtgcaatggcacaatctcggctcaccacaacctgcgcctcctgggttcaagcaattctcctgcctcagcctcccaagtagctgggattagaggcatgcgccaccaaacctggctaattttgtatttttagtagagatggagtttctccatgttggtcaggctggtcacaaactcccgacctcaggtgatcctcctgccttggcctcccaaaatgctgggattacaggcatgagccactgcacccggcctaccctgtctcttaaaaaaaaaaaaagtgagtattataatagaggggataaggaataatgtgtatgtgaggtctatttctgagaccagagccacaaaacagaatcctgcaccttagccattttcttaccacacgcgttttcttggatacttccatttttccagtctatataattcaatacttctgtgacagagaggtgttggagttttttgttttgtttttgttttttcgcaactctttacatacaaacagctatggtctcccaggaaggaacttcctctgttgagtacagaagtctgggaaaagactggtgaaattgcatgcgaggaagaaacaggtctaactaaatgtgaatctatacttttaaagcaagggaccacaaagggtaggtcccaaggaagttgcattgcttgctgcacttgtcacacgggctgtactttcttctctcatttatttccatttacagcgttgaaaactgaggccttaggctttggttgaaaaccgaggccaagggtgaccagccagtgagttaaggaggccccagccgaactttgctggaagtgctccagcataaagcctctctccagaaccagccgccactgagacgtcttgaagtcaaagtaactcacacccttgtccacctcgccctgcggtgaagaaacttcggtcgcacaggctccagaactcatcttggcgtgggctgtgacttactgggggatgggcctccttttcgttctagctcctaaatggagcggagcgccaggtggtgtcagagggggcggcggcccctccaatggtggcaccctcagccacggataaggttccaattaggtaaggacgcaagtaatgctgtcgtttcggctgactgctcctttcattccttggaggtggtcggtgtcacaaaacgaattttcatttactctcaacagtcacaccagccctgctaactggatggtcgcagccccgtgccttcgccggacgccctcctggaaccttcaggccaccctgaggatggagactcgggtgcccgctctcctcccctaccgccgcgggcctgcgccccccgccccggaccccgactcggacgttctagccgcacgtgcgggcgcccctgggtgcgagccgcggactcacgagccgctgcttgttgctcccgccgccgcgacctggggaagcgaaaatgaaattgacttttccgagaaatgatgaaagcggcgctgcccgccaatgagctgctgcggcgaacttccgcacctcccggccgggccgctcgcgccctccctccgcctccacctcccggttgcacaagcttgaaacaaacactggggaggaagggcggagggaggagggcggagaggggaggcgagggagggagcgcggccggaggagggcggggggtggggggatttccagccgcggctcttcgcagtttcctctccttgttttgctttcgatctggactgttctcaggcaagccggggagtaacttttagttttgctcctgcgattattcaactgacgggctttcatttccatttcacacaccctagcaacacttataccttgcggaattgtattggtagcgtgaaaaaagcacactgagaggtaacatttttcaaataatagttgtgactgtgtgtgtttctctcgagggcatgtttctggggactgtggggggccgtgtgtgtatgcgtgtcctgatgccttgacacgatgttttgcagacggaaaatgccggggttcataaatattaatactgatttttggaggaacagtcggcgcaattatggatcatctgattttaggggaagcaggttctgctgctgttgctgctgctactggggctgctgaggctgcgaggaggaggaggaggaggaggtagagagggaggaggaggaggaggttggtggaggtttaatttcacttttggatttgcagatgcggagaggtggctccatggacacagacctgctgtgtgtgcttctgcgccccaggtgttgtgtgtgggggtgcaggtcagctggagtcgggcctcatttaaaacaaaattgtgtgtatgtgcgtgtttgtgtgtgcgcgcgtgtgtgtgtgtgcagccaccgccgccaccggatccgaaggaggggagcgggtccttctcggtgcccgcggcggcgcctctccaggctgcctccagcgtaaataagcaggcaccgctccccggccgggaggagcgcctccagccacggccagaggaaacttgctggggcgccccgcggcggtccaggggctcgcctgcctgccgggctcggggtcgggtcgcgggcgtcgggtgccagcggccggggcgggagggcgggctcggagccgggccgggcgccgggcctggccgacgcgccctgcttcctgggggctgggccgccgccgccgccgctcagaagggacgccgcgtcctccttcccgccggccagcgcccggtcgggccctggggctttgtcattgcacttgtcccagcgcgccaggggctcgggcggcgcgtcccaggaaggcaccgtgccgaggggtcagccgcccgggccgcggcctagcgccgtgcgcccccgggtccccgcaggcgcccccggccggcctcgcgcgctgggcctgacccgcctcggctacggagcgggcgaggtgggggcggggagcctccggggaccgagcggcgcagtgggggccggcgtcccctcggggtcccggggcgcgggccgcggcggggtggggacgcgagtgcccgccccgtgccctccgacccggctccgggcgccgggtgacattcgcccgctggccgaacatggttggtgcaaagccgcggcggccgccacttcctttccgcctcgccggtagggctcgcccaccgagtgaagccggccgcggccaatcgcggcgcccgcctgctcccagtggcacggcctgggggccggcgtccgccggggctggggaagccgttccaagttccaagggtcgcgggtgtaactcatgcccctcccagcacgcgccggcgtctccccttggcccccggtctgggtgcgtttgccaccctctcctccttgttccctaagaagcgggggaggggaaggaggcgggcagcctgggcagggcgccagagccgtggtcgggcaccaggtgaaacgcccgggtcagtctgtgtaggccggacccttggcgctcggctgcggatgtgatcccggggactggcggccgaggtagctcagaagagcgaggtggctttcgctcgtttctgacccgctactgtctgaaacttggggacatattgcccgccccctccctcttcaacctcctccctccggtggctccttgtccttggttatggaaggaaaaaactcagttgttctaaatgaggaaaagtggtgctggcattcgtcttcagccaccggcctccttatggctgtgactcggtctgcttttgatgaatggccaggaggtatggaggatagttagatttcctgttgtggattttcaggcatcaccgagactgctgtcaagcctgcagtcatttactagttttcatatcgactgcaggttctctttgagcagttcagtttttggtgcttaagggcaggtgcacaacggggtctggggttagaccaggcggtggatagtcttgatgctaggcagatgcagttatccctaccaggcccagagggtgactctgtttaacttcaccacgcacgcagattcaggattctctgatttccccaactttcctttattcttcttttagtgggagaaggggcaaaagtagaaacctaaaaaatcctgggaaaaggagccttttctgaggaaacttcagcagatgaaatatttaagacttgaactgggatctctagggggaacgttggaacatctattgattgatgtgtcaaagtccggaatttcactgtaattagtgaacgattataacttgtaactttgtctgttatgtaagaaattacattttggtctcttagatccaagagttcttgtctgttacgatttgtaactgcttgttaaaattaaacatttacatatttcattctcagtgagttgtcatttttttgttagagaaagttccagttatttcagatttacttacctgtaaaaatgtcagcataatcaaaagtaaggatctgtagtcaaactggaagcaaattatggcaaacacatgcgtgccatgaagttctgacagccttatgaacaatggtcccacttttatcccactttctgaaacactttattaggcaaatagtgcaccagagcaaaagatgtttaaacttactggaaaaatagacactttggatgctccacatttgatgtgcatcaattttctcatgttaccaacgatgttatatttttattcttaacatcatctcgtacaaaactgttgtttttagagcattttcacataatatccttttgatagtgaaaaaccactgtactctatctaaatggagtatctgggttatagttcccttatctgccttataccaaaaagggcttaacgcagacaagagaatttatgtacacactcaataaatatccttagaacatctattataagccagacacagtgctagcctctgtatactcaactgacagcgagaaagacagcatctttacactaggttgtgttctggtgagtgagctgaccattaacaacaaaaaatatagttattaccttttggggttagctgtaaggaggataataataatttttaactatatctcgtaagtgttgctttcatgaacaattgagatactgtatatgaaagaacattgcataaattatggcagtctacaaatgtgtaaggcattaactttcaaaattatatcagattattcttagtgtaaaaaggccagataatcatgactggattagacactatctttctcatagaatttccagcaaggagggattttacttctgagcatatataaataatgataaaagattaaacatggaataacttttatataaagtatcaaaaaaatttcacagtggaatccgatattgtcagtgaattttttcctgtcagaaggaaagttaggtggtatccatggagaccaaatgatatggaaataacagtgattggaccaatgtattttccctctttatgtcagataagaaaatcttcccaagcctctctgtgctttagtctgaatcttcttcactctcgtgtcaacttcttcattatctgtcattgcaggtgtgcactgggctgattgtagtattttgcttttaccaccttttttttcttttctttttttttttttgaggcagagtcttgctctgttgcccagactggtgtacagtggcacactttcagctcaccgcaacctctgcttccaggttcaagcaattcctgtgcttcagcttcccgagtagttgggactacaggtgtgcgcaggcgtgcgctaccatgcctggctaatttttgtatttttagtagagacggggtttcagcatgctggccaggcttgtctcgaactcctgacctcaggtgatctgcccacctcagccttctgaagttctgggattacaggcatgagccactgcgccggcctgctttaccatcttggctcatgtgcatttattgaatgcttactgtgtgcccaacactgtatatgtgacaacatacatgaaagtaaatattaactgatagcatatatttataacatatattacaatacgtaatatatgcaaataaatgaaactgcggtgaaatgtcagttattattagtaaaaattagttcttcttttcatctgtatgagacatgatgttccttcctgcacaggggtaggaggtcaggaccttcggtctctgcctgccccgtcggccccctgtgtttggcctgagtgtaatcagtggtcggtgcacgatgccagcttcatgcacagtgtgctgaattgaggagtggctctggtggcgggagtgactgatggaaaagtgggtgaggaagttccatcaaactttaatttatcaacaaagaacaaagaatgatgaataacatatagggtccagatttgaacatgaagacagtattttttatagagtaccaaggaaaacacacaagcaggaaacacagctcacaggtcccctttgtccctgggactccgtctgaggctcgttggattcagagcaagcagcaggcctgaagtcttggcattgaccttcaaagatcccctaaaaataattttccccctcagaagctccatcttatgacaaactgtctctgaaacaaattgtgtttatttaagtagacttcatgtatcctttttcttttattagagtcaaagtctcactctgtccaccaggctggagtgcggtggctcgatcatagctcactacaggctcaaactcctgggcacaagtgatcctcctgcctcagtctcctgagtagctgggacaacaggcatgtgccaccccaaagcccgacatacatttttgtgtagagacggggtctcgctatgttgcccagactggtctcaaacccttggcctcaaatgatcctccctcctcagcatcccaaagtgctgggattataggcgtgagccactgcacccggccctagtgcccatttttattcctcagaaacacatatgacttccagtcagaactcctgattgccttgagaaaactggtatcatcaaatctcactgatctcattatagccaaaggtagagacccgtggtgtgttggacaggctggccggctccgtgtgagagaaactcaccatcccgttaggctttctgaggcactgaaactagccgggaccctccatcaataacttggtctgcttggggatccagggaccccatgcaattattttaaatgaataattgattttgttaaatgtagtaacacatgcaatggttttcttaaatgcacacattgtgttattatttcatttgtttattaaatatttcttgacagccagctgtgtacaaggctctgcggtggaaggtgcatgaactcagatgcctagagtggccttttagttctccaatcacttcctcctttggaagttttcactgtaaaatgtggctggataattctgtcatcctcaggagacagaacctgtgtgtgttgtgaaaatcacctggggaggggacttttagaaattacacgggaccttttagatttgagactatctgtagccccctttcccttccttccccttcctgccttgatagcgagcctcttattcaccattggatccctgctccccagcctccctcaggtgtgtggccagagtagaaatggaaagccactgaatcgaggatctcttcccagggccaaatagttgatcttttccttggctcagatgaaacctctttccacattttaaaaagcacttcggacaggggcctgtggtcactctgttggctctgcccacttgcccttgcttgccatacagaaatgggactcatgttaagtttgtgatacattgaattttccttttttttttcttttttgagaaagagtctcgatcttgtctcctgggctggagggcagtggtgtgatctcggctcactgcaacctccgcctcctgggttaaagtgattcttctgcctcagcctcccgagtagctgggattacaggcatatgccaccacgccgggctaatttttgtatttttagtagagatgaggtttcgccatgttggccggctggtctcgaactcctgacctcaggtgatctgcccgcctcagcctcccaaagtattcggattacaggtgtgagccaccgcgcccagcccagttttccattttgaagaggcaagaaggactttattttattttatgtatttgtctctttgtccaggaaggccatggagaattaggcgtttggttttgttttgtttctattttggtttataactcctttatcagtttagtattcccttctgataagcaagaaagagcggagttgacaaagaatggctgcagatgagaagcaggtgtgtgaggttccttctgatgatggattctaagtatttttatcccaaaggcaagactaatttagttcagcaaaataccttaatttaggattttgtgtgataaaagcctgtcctgttttcattaaatgacgatttttgagaattaactacttgctgtgtgattttcataaataatttcatttgggcatacttaacactgttgctatctgctgaaggcatttgatactcgcacacctaatgccatcaaaggagagatgagtatacactttaatttgttcttattgagtgtacattttaattgttcttatgaatgtcagattttgggaagatccaaagaagtactctgtagacagaatacgctgtcctggccccctaagcttagaatcctaccaattttcccatttcatgagattgacctttcagatgaggagggactgcatacaaattgctttatttcaagtaatatctaccatgttatttttgaaagaattcttttgtcctttttaccctagatctattggaaaagatgagaaaaattacagtggtgataagagtgtcttaacacctagatatgatgggtgtgtcgggtgaaaggatagcaatgggaggctggtggaaagtgagagttgggggatggggtgatgagaaggaaaataggtgactagtgactcctggattcttgaatgggagagagtgaagagacaatcaggcagggagattttctgtctttgcataaatgtcactgaaagagttttagagatcggaggggtgaggtgaagttggttaggcaattagtgataactcaaggaccagttgaaagactggaggaccctccactgctgactgtgggatcagatccttttatcctggggatgagaaaggctgatgggaaaactgctaggcagctgctgacattataccaccaggaaacatgaagttgtgagtagttgtcacttggacatggctgaagtcaccttagggtacagtgatgttgctgcatcacaacgtttaggtcatcaatgggccatacacatgactgtggccccataagatgataatatcatacttttaccttttgctatgtttagatacacagatacttgccattgtgctacagtggcctacggtcctcagtacagtaacctgcagtacatgtttgcagcctggaagccataggccataccataaacctgggtgtgtaggaggttataccatgtaggtttgtgtaagtacactctgtgatgttcacacaatgacaaaattgcttaatggtgcatttctcagaatgtataagtgtgctgatgttgatgcattgtttggggatggggaaactgatactcactatgtgaggccccaaactcaatctaaaattgcctttggaggcaaccacggaaatacggtaatagctctcttaggccttctccccccgtactgatcttccttggtactgttttattttatttttaaactcttgaaataatacataatagatgtatgtattttcagggcacatgtaataatttaatgcattcatatttgtaatttgtaatgataaatcaatgtaattgtgctattgagattgtgggaggtaaatatggaatcagggaaatagaatgggctgataatgtgttttcctaaagaacagatgggattggccgtgcgcggtggctcacgcctgtaatcccagcactttgggaggccgaggcgggcggatttcctgaggtcaggagttcaagatcagcctggccaacatggtgaaaccccgtctctactaaaaatacaaaaattagctgggcatggtggcgggcacctgtagtcccagctactcgggaggctgaggcaggagaatcgcttgaacccaggcggcggaggttgcagtgagccgagatcgcaccagcttgggtgacaagcgtgagacttcatctcaaaaaaaaacaaaaaacaaaaaacaaccagatgggacaagttaaaactgaactatgaattccataagtgggtagtgtgggtcactgagtggggcactgagtactccacagtgactgtagtcaggattctacattgaaataaactttctggaatttaccttggtgctatatacttaaagtcttaaaaatgttaagctctctgttccagaaattctgcttcttggaacctacttacgtgaagtaaccagagatgggaacaaagatgtatgtacacggatgtttattgaattagcttttgttatgtaaaaacttggaaacaagctaaatatccaacaatagagacacatttgaacgaattacggcacatccagacagactataggtagcttataaagctcgtgttttcgagcagcgtttagtgatgggaaaatatttatgatctatgctgattgggtggggaaaaaaggatatgaaattgtgcttctagttttatttttaaaacatatgtgtatattggggtatttttaaaaacctggaagaaaacatatctttttgatggtgaaattgtgggtgtttggcttttttttttccttcttgaaacatttttgtattttccaaatttaaaacagcaagcacaattaccaattacccttttaaccagaaaaatattctcaagagagtgctaatatgtcatctctgccctcacctctggtccacgtaaggttaggaaaaacacactgggtgctgccgaggaggaggctgtgcatggacggggccattctcgagcctttctgcctccatgtgtggagcaggctctagagccagggctttcctggccaggctcttggaagcctttgtcctcagacagctgtggctacttggagacacttagattggtggctttttggtgaggttgggacataatgttttgtcagtaactgtgaagggcttgagatatgatttcacttcacagttaacattctttatacatatgaatactgcagaaacacaaaacccctgggtaggagaaaagagttccttgttgatatttacaactggggcaacagcctgagtgacactattgtgtcaggcccctaaaccttgacccttaggtgacactgaaaactaatggaatgtacatgtgggctacactttgttgacagggacagagcagctgtccctctcccgtcccaaaaggagagagagagaaaaaaaaaagaagaagaaaaaggaaaaccaaacagacaaacaccttagctcccctgacatgggatgaaaaggttccaggggtcttatcctaacctttcagaatgtgagacacttgtaacctggggatgtctccaaggtctgtttttcatgctttttgaaatacacatgcctagggagatacgtcttcccagcaccttgggaaccaaggtgaaattatttggtcctcttgaggagattagaggttttattatccttttggaaaagagcatttaatgtacacaaatggctacagatctaattctcatggtaagtgaagtataaaatgtttgtaggggaagtgagagtgaacattccctgtcttcatgtcctgtatagtccctatcttcatgtcctgtacattccctatcttcatatgctatacagtcgctattttcatatcctatatggctcctatattcatatcccatacattccctatcctatacattccctaccttcatgtcatatatggtcctatcttcagaccttttatggtccccatcttcataccctatacattccttatcttcatgtcctgaacagtctccatcttcatatcctatacattccctatcttcatttcttaacagtccccatcttcatatcctatatagtccccatcttcatgtcctgtacattccctatcttcatatcttcctatcctatacattccctatcatcatgtcctaaatggtcgctgtcttcatatgctgtacattgtctatcttcatgtccaatacattccctatcttcatgtcctatacggtccctatcttcatgtcataaacggtccctatcttcgcatcatatgcattccctatcttcgtgtcctatacattttttccctttatattctattcatttctgtgtgttaggaggtgaaggcattttataggagtctggaaagaagcctgagaagttgtattttcccctcacacctgcctttaccagacccctgttggagaatgacagtagagcttaatcagagtgtgacctctgacttttcaaactgaagacctcaaatctccaatttttatctgaaaaaatattagaatagtttcactctctttatgaacatggagacgtttttggattgctacggaagtaggattgggcatgaccattatgagttcagaggctgaatgccgtaccacagcccatcaaaaaaaatatatatatatatgcacgatattgtccaatacaaatataatgtgagccacatgtatagttttaattttctagtagccacttagaaaagtaaaaagaagtaggtaaaattaattgtaataatatatctcatttaactaattttatctaaaatatttcagtatgtcgttaatgtaaaaatactaatgagatattttgtatccatttttcatactgagtatttaaaatccaatgtgtcctttgcacctatagcacgtcttaattcagcccagccacattccaagggcatggtagacccatgtggctggtggctaccatcttggttggtgcagcataaggaaatcaatcaaggtgtgaagacaatacaggggaaagttgtagtacagtcctgaaaggactgaaggaaagtagagttggagtggttattttggtcataactgtatgaatctccctgtggctctccccacaaaccatacctgatctcttcagcctaaaacaatgaaatgctctgaatttctatagaagcagcatactctacatcccattcctagggtagttagctatctgcatcttgatgagatgaatgtttcattctagactcttgaactgttatgaaaatcttagattatttgaatttttccatttgtatcacctatgtggtaagttatttgagagccaggatccagtccgatttatttgcattcctcaccggtgtttgacacctttaagacctagataaatattagtttatttgattttcagctgtaaagcaaaggttagcttgaaaggctgaattccagctcaggaagggtggcacagatctagtttgtactagaaacctaatggtatatgaattgaacacataaacattaggatttgtcactttgcattaggatttgttactttgtattaggggttccacacccagaaggtgaaaaattgttcggtttttctcctttgtatccagacctttaaaaaatattatcagtttcttcttttgatgtttaagttccaatgatgatcctaatactttcttgtagggataaataagctatatttggtgatgacctggagataaacatttggaagctgctactttttccatgggttctttgttaacaataactttgttattaacaaacacagcccacaacatctaggcgatgaaattcttttgaaatcaagtatagtattttacagttgccttcatttgttctctttgactgtaattgttgggttgaagcaacagacttatccagagagccaaggcaatttatttttactgaagactacctaagaactgcttaggtagcttttctctgcaagattaaatgcgaccttcatggaatcatgttagcagggccagcagctagaaaaataaagactaaaccaaaccttcagcagcgaaattcccagctgctcagtggctcagagctttcctgattgctttcttccaatgaaaacactgtagattagttttaagtgaattctagtaggtttggggatttgcaactgacagaagaacagcaaagtgtaatctcactttaaaataatagtcctgaaggtaaatctctattggctctttcttaggatgctgggatttttgttcatatgggaaaacttaactcatacacactgtttagctgacctttgaaggtaaggccctagaaggcagacggaggctggacacctggggatgtggggcaggactgctgctcctctttcttctctccattgtaggcgggtggaaacttgggaagcctgcgaggaaggtccctgtagggaatgtagctgacccgttttttccacttttgggtgtggtcatcctgactattggtgaagtcagggtgaattgaaaatgttacaggagaggatttacttaacttacaggtgcttttaatgcattgcgatttttgtttttcttgaaagtcctcgcagtttgggagatgggggttgggggttggggggcggtgggggggcgggtagaggagagtgctcagctgaaaccgttgactattttgatcattcatccattcagtcatttatttagcaggtgtttattcagtgctaacgatatgtagagggaggtataaaacgaaagaaaattatcttcgatttgaggtagccaggtaggtagatggtctgcattccttacagttaggagcctaattcttccagatagagaaaacacaattaggcaagtaagatgacagttccagaaacgattttacttatctgtgaatcccttttatagttcttccatgggccctgtggggttgtttcagattgtaggggaagccgcagtgctaatgtgacagatttttttgccaagtgtatacattttattttttttaaaacagactcttaatagattgtaaaataggcatagaacaacatattgttttgttgttctttctgtttttccacaattctcccacatttagtttggaacatggaactatggtctggtgtcattaaggaaaactgatggggttaaatcctgataattatctcccctctctacttccccttcccttgtggggagacactgtaaccagcagagctgcagaatcagtactcctgccccccgcggtaaagtgaaggaagctgatgaaagatatccaggaactcttggcactatttttgaaatttttatgtggattggaaataatttcaaaataaaaaggtttttttaaggcttcccattagtgctctagagttactgttgcttatttaaaataacagcctaatagagtatatttgtaagttcctttgtttgcttccccacgtcgatctaaaagggattttatgtagctctttttctacgtaggtcctactttagatatcatttagtaccctctcctcacagggcttgagaagacattgccttgaaggggaaactggtccttacttcattttgaaaatgcttccttttctctcttcgcgtgtgtgtgtgtgcgtgtgcatgtgtgtgtgtgcgtgcatgtgtgtgtgtgtgcgcgtgcatgtgtgtgtgtgtgtgcgtgcatgcgtgtgtgtgtgtttggctatagtgaatactttaagttgcctgaaattaaggaataattatcatccataaaagcactgaaggaaacagtggcagcaagtagggaattcataaatgcatgttgaagcattctttttaaaactgtggtaaaatttacaaaacaaaatttaccattacaatcatcttaaagtgtataatttggtgacattaattacattcacaaggttgcctaagcatcaccaccatccatctccagaactttttcagtatctggatcagaatctctatacccattaaacaataactgcttcccgcagcccctggcagccagcattctactttctgtctgtgaatctgaccactcgagatgtctcatgtaagtggaatcatacagtctttgtctttttgtgtctggcttattttgcttagcagaatgttttccaggtccacccatgttgtagcatgcatcagagcttcattcctctgtaagactgagtaatattcctagattgtgttcgtccattcatctgttggtagatactgggattcttattaatttggctattgtgaataaggctgctgtgatcattggtataaaagtatctgtttgagtccctgctttcagttatttcaattctgtagaatggctgggtcatacggtaatcctatgtttaacatttgaagaaccaccaaattgttttccatagctgtaccattttgcatccccatcagcaatgcacaccggttccagcttctccacaccttttaccaacatttgttattattatctttttgttttgatagggccaccctaataggtatgaagtggtagctcacgatggttttgatttgcatttccctggtaattaatgatgctgagcatcacttcatgtgctcctagccatttgtatatcttcttaggaggaatgtctattcaagggctttcttcatttttgattttgttgttgttgagctgtaggtttgagtcattcattttgtggttttgaaaatgacacactagtaagtctgaaaaactaagcttctccccattacagtatatgtagcatgtggcaaaaagttctgttttagaattttgagatgctgtgaagctgatgaagcacactttgaggaattaacttaggctggagtgaagtaaatcagagcgcatgggtaagtgagaatcagatagaatctcgcaccatgctggaattgggagtttctgtagcaacgattgcctgccccttcccttcattttttcagctggagaaatcaagtaacctgctcagtgtattgtagccaggttaagtacttagtatgttttgttgaactgtgcagtaaataattattttttttctgttgtattttgaatccagaaatgtcttgtgagaggagaaatagcagtgcttgaatatggtagtggatttatcctcgcggctgcccttgtggtagcctctctgcttgggactcggatatggtagtgaatttatcattgcggctgctctgtctgcttgggactcatgaaaaaagccttagagttcttcacttctgtggtatttcaggataaagattagtaaaaacagcctcagagtaacatttggggacttaagaatttaaatataatccattcaatcatggttcaatagtattactgagtggatgaaaaaaaaatattgccgtaataacagatctgttaagtaaaatggataaaagcatttgtgtatttattgtgaattgttgacagcaggagaagccattcatttgttcttacaagagccatagtagataaagaaattcagtgaaatatcacaactgtatggaagcaaattcattgttggtttagttttatgtcctgcggaaatttttcgttttgctcaatccttttgaagagttgaactttattgaaaactatagcctggcaaggtcatgtgtggattataactgagttgtaaataattggaagaagatgcataatatatgtgagaaacagagaaataatatatgtgttgtgaagcagagtggtaagaggagttgcaaaaatttttattctcttcaggcttggggcaacgattttaaaaatccttaaaattagttttaagtactgtgaaaacaaacatgataatgatgaaattaaattgaagactctcttctacaaacaaatatcttaaataaaaccctcagaggaagtcattccttcagcagacaattttgaacagctgtgtgtgaagccctatgctgcgaagatgtaaggttgaaaatttcagatccatgctctcaaagagcttatcatttggttagagagacaagcaggtaaataaccattcctggtcatgaaaagaacgaaagatgggcttcatggaagcacagcaagccaaaggctaagggagagaagaggaagaagcagtatcttctttttattctttttaatttactggagctacccatcatgaactaagaattacgtctttgaccagagaaactggggcgtgcctcaccactgacttctgactggccggaaggagggaggcaatgtcatctggtggccagtgggtgagcagggcatttttggttgaaagaacagcaagagcaaagacatgaagggttgacagtttcttccgttcctggtgcatggaccactctccagggtggctggaacaaacagatgaaggagggagtgtcagagccagttcctggtggccacaaatatctcactcagtgcatgtgttcctgtttcccagtaaggaagggttttgttccgaggatacagccagcttttttcttttttttttggaaggtttttgaggatttggaacattttcccctgtgcatttcagaaaatgatagctaatgactgttagcagcagggcgtgtcgcagctgtgcacctgcagcgttggagaggagctctgaggcgtgtgcatttgtagtctgcggtccattgcgggaaggactgggttgtgcctttgataatagccaggcctgtctttgaggtgcttttatataagtttctaagaggaaatgatgaataggtacaaaaatattttttgtactctcttttgtttgttttgaattggtttgtaaagagagtgattatagtaagtttataatcctcaagtgaggaggaattaaagacagttggctcaaattcaggtaagaaacccaagttagagaatcaaggataatggcaagacccccagaaacaatgccttcatagggcagaagttaggacagggcttcctatccgcccagagtgtccccaggtcttccgagtgacgtcacgccgggccacagaagggctgggcgaacacctcaggtgcaaaccttagccagtgggactcaggaactggagggagccccagagctgcccgtgccatattgaggcttcttccctgcattgggaccacatggatgatccaggaaaattcccctctgtcaaggtcaacagacaacctttaaatcacctgcctccttaattcccatttgtcacataacacagtctattcacaggtcgcagaggctagcgtgtgggatacttgggaggcattattccacctgtatcatgtgttaacccaaccacctcacactcttcatccgacgcagctacagagtgtttggggagatgtggccatcaggggccgaggccctcacagctggggtgaccggctgccttgatggcattgactggatgtttgccggactcttcacttccctggggcgataaattggaagatgttattcaaaggcctagatattcctgtggtttatttcagtatttcaccgtctccactgtattatcactaactgccgtgtttgaaccggttgtatgttgtggagggccgagccacaggactcgcgtagactcggtaccctcagtacgtgttggctgaattcagttgcagtgactgacttggtcctccaattgttatttgctgtccagacacagaggcgcctgcaggacattggtgcccctgggctcaggcacccggtttcccggtagggagggcggaccgggccgcaggaaagcgcgtcagccgggtgtgtgccctggctggaccgaggggtttcctccgctcagtcggcagggaccctcgctgaggtgcgaggacacatggctgactctgaactcgcagcttcagggaaaccttccagcagtttctccaccgcggctctcacgttccccgtggcgcagcttcttcgtatcaccaatggctcggacacgcgggcgccacccctctcttgcccttgtcgttgttcttccttttgttgggaatgttctttcttcccttccacctgaggatccctcggcttccaggcccagttcagatgccccctcttctaggaagccttccagagtcctctcttctgggtttttacataaaatattaaaacttccccataggcctttgaaaaaaattcatctatttgaagtgcagagtcacatttttgtgaggcgaatgaactaatgggggtgagtctgatgcagagagggaactcgaacccagtgtgtcagacgcccgtgatcagtgtgatcagtgatggtgggtgtgcggccgcagggcaggcacccactcgggtgtgctcttcctggcaggcttcgagtctcacctccgggacaccacgtcttgcttgaaagcttgctttaacactgacgtgcccaccttcgtctttgcagggtaagtcctttgaggccagagatcatgtcttcatcatctttgtatactccacagagctttagataatgcttggcacacagcgattttcatgcggttggctcggggtaaggtttttggaatgaaaagttgaaccaacgtaattcaaaagtgtattaacatccttagccggattcacccggaaaatggcatgtaaatagtaaaatttttttttaggttgcatgctttttgtagtcattttatttcctttgcttatcatttgttcataagtttatccatcacaacgtatagttaatatcatccgccttatcctcctcagcccttgccctcagtgagttttccaggagggattcatccactttcttatcaatgagtgattactacatgtcattatgtgcaagctactgtgctcggtattttgggatgagtgagatgggactcctcctcacaggactttatacagagataagcccgttgccaagtacctgaagctgtaagctttggttgcatcagaaggtggaaggaggctgagtgcggtggctcatgcctgtaatcccagcgctttgggaggctgagatgggaggatcacttgaggccaggaggttgagaccagcctgggcaacatggggagacgcctttctctacaaaaaaaaaaaaaaaaaaaaaaagaagaagaaggaagggagggggaggggagggagagggagggaagggggaggggaggggaggaagaagaaaggaatcagtgggataagaggttagaagaagaaggtggagggaatcagtgggaacaagaggttagaaaggtgggatggggatgaattatggtggccaggagtccagattttattcaatgggcgttgtggaaccatggaaggattttctgcaaggtcaggagccatttggggagattaatctggccaagaatgtgcagggtggagaatatgcttctattacagaaggtggaccctggacatcgtcttgctccttgtggaacactgacttagtcactgcagttaggtggagcacgggccctactgtttggaatttctttggggaagtcttaggggagaccaaggaaatctcacctcatacttttcctcctaacataaactagcctttatctgtttcttctcacggtagctctgctaagttgctattaagatctctgtttagtgatgaggaaactatggcttggcgaagttgaaggttgtgagtggtgaggttccagttcaggtgtgcttgatgccaaatctgagctcccactaccatattatgctttaacaaggagagggaaagaaaagaaatcattgtggtcctgggaggggttggcagagaggggaaatagtgaccatccaatggatgccagatccgaccctcccacctctggctaccattcggaaactggtgagaggcagtaggtatcttccaaaaatatttgaagacagttctgcagcttgcagaggagacatggattcttgcttcggaggtattcctgtacttagagtggtagcaattttggctctttttccagttggaattcattggtaattgggatggtttatcccaggaatagaatcaaactagcggaaactgtagtgcgtaagtttatagtttgtgtgctggagcttgaccagatttgaacataaagagttaaattggatgtctccataataattaataataataacaccaagaatagctggtaacctttatggagagctccctggcagaggggacagcttaaaggaaatcctcaaaggaaaagtggcagcaagaagcagatcctgagggccagcctgtggatgtggagtgtgggaggaaatcatttactctcatccaggggaaaagatagtgcccttcaaatcaacctttcagaacaggttattttcaggcaactggtttttgggaaggcgttggttttcaaggtagtctgctagtgatgtgattgaagtcagaaagcagcaattttgttgctctatgcaaataggttttcttaggttccagttccagtatgctggctctttgagtttctgttatttgacttttcacaaatactgaccacattgacatctcctctctcttgtccccttgtcttttctgtgttcctgaaggggcaaaacacaccttttgaggtctgtggagctcaaaaatgaagtcaaaggtgactgggtgacacaaacagctcaggtaattcaggtcctgccgtttctgccacgctcctcctcctcaagccagcatggctcagttatccactctgatgtctacccttttcccacgtgcctcctcttattgaacttgttctctatactgttacgtctccagtgtctgcatcagaggactgagaggtcttttccggcttgcatactgcaggctgacacagtcttaaaggaacttcctactgcactctgaggaggaggagctgtgccttctcgaggtcatgttacttctcctgtactgcaaaggcagtgctcagaggacgtgctgattaagggaaatataggatcacttcttttcccattttccatatggaaagaagctttgaaaatgcagtatgtgctcgagtccatatgctttgaaatctgtgcatgattcttgctttgctgaattgcagaggctgatgccatctagatgctgcgacccagggccaaacacacctaagggtcccagcatgagtttcaatttataaaatacttttaaaagtcagtctacccttttaggtcttaatggccttgcataaatttttctagaaaatgctctttaaaaaaatgatggagtaaaaaatactcttagattttcataatttaaatgtatctggaaggtaatttatctgcaattcacagttttctcatgttgtctgttttttacagaaaagaatattacatgtgtatctgcatcagatttcaagatcattgtagttttttctttttttaattttaagacagcatgtttcacacatgattagattacttgggaagcattcctagaagtgacatggctgggtccaagggtgtagttttaaaatttttaataccttggccaagctgctgtttggaaattttgtacctattttatactcccatagtgcatgtaagatgcaaaacactattctagatattttacatgtttatttgcttttttcttctctctctatttcttctttctttctttccctttttttttttttttttttttgagacagggtcctgctctgttgctcatgctggagtgtagtggcatgatcatagctcactgcagcctctacctcctgggctcaaatgaacctcctgcttcggcctcccaaagtgctgggattacaggtgtgagccaccgcattgccttattttacatgcttcttcatttaatcctcacaaagcctgatgagaacagagaaggtcagtaacctgcccaaagtcacagctaaatgatagagctgggggcgaaagcaggcagtgccgcagagctccacggtccatgttgttgctgcgcccggtctgcacttccatggcagccggcatgagaacatgagcaaagagaggctgtgatgagactccttccttctgggagcctctggatatggctatggcctcgtctttcactctgcttcttgattcatcaggtaggacaggtgcagaatgcttttcctgggccgaagcctatggtcttcgcattctttgtgcagcggtataatttggaaagaagcaatggtcactttggagagccagcccctttgctcagctctcctgtgcccctgtgctgctgtcgttgcccctgtcacctctgccagcatcatttcccatgactgcagtgctggggggacttgggcctggcctgggtccctacatcacctgaggagggtctccaaatagaggtgtgaaggttttacagagattgtgtagggatttcaggctttaaacccttgcttgtctttgctgctgcatttggtgtgagagattgcaaaaaatgtgtatgtttttatcggtgcaaccctagggtcatacagggtcaaaaggcttcctcttttaggaagagtcccagacagctgctaacttatcttcttgttccatccctgtttatgggggatttgtatttttaattgcctttcactctgaacaaagactgagcaagcagaaagtgttgggaagggccccagggaacattctggcttgtgttttctttctgatctgtgggcctgggggacttcaatgttcactttcctgacaggaggagacaaccataggaactagtgtggtgtccagtgccagctggggaaggaaaccagtttcctagcatttatgtttcaggatcaatggcacatgtagaaaaatactatatcccaggggttctatattaccaagaatacccctgaagatgaagcccatttttggatcctcagttctcatgataatggagtttgatgacctagagtcagctttggcatgggctaagccagagcacccttttaaaatgaggatagtaatgagaacgaccccatggggttactgtgagggttaaatgagataatgtatagagtttaatgctgagtgcatcatgggtgcccagtgaatagtcattgctctcacaatccccaccaccactattatctccctagacatcaggagaacaattttgtgaagcaactttggacttttgcatgtatatatttataaacaattcagtgcctgcaaatgtagaagctgatttaagtaccttggcccttatggtaggaaggtctctggggccccttcaccttgaccctctttacctttagagtttcttctttcttcacactttcatgaggaagtatgtgcctctttgaactgaatttctacccaagtaccatggaatctaaacagttcagtgcttttcaacttctcacgttgcataatatttgccatttgattcaaaattacgtgataaaagaaatggaggaggtaaacttgccagacaattcctgtgtctgtttttgcatttgtgcctctgggtatttagtcttttcggtttgcaccagggcttccgtggaggaggagggcatgtgaaatggagcagttgcttacgtactggtctcagtggacggtgtggatgtcattcatagggcatgcacagcaacaaacaaacaaacaaacaaatgccatttaacgtgatccttggaaaggtatttttataataactttagtttttaaatcaaatatttagaatgtcatggagaaagaacaatgatattacaaatgccatcataaaggaaccttagggagactattttaaagaaattttgaatctaaatatttaaagcttttcttattttataagtattttatgtatttgattggtaaggtaaagcacatacgtattgttaggtaaactcgacttaaaggaaataatacttttaaatggctacttaagatttcaaattttataaaaatatttaggaaaagtatttttccactttctaataagcagaaatagtttgcattacattttttcatttcagaactaaacagtgctattattcactacattaagcctagtgtgtgccagattaatgtgtaatataaatacagtttaaggaaaatgatgctgatttttcgtgtagcgtgataacaataatatattccaaagattgaaataacttgaaatctactgcaagccccaaatcccttatttgcaatccaaaatgctctgaaactgaaagttattatcatgactcatttggcaggatagtctgccctgaattgacatgaagctattcatagcttttatttatcccaatcagtgtgaatgttcgtgtttcactgcagaaatattaactgtgttggattaaggggttctgccctaattactttccggggtgttttgttccttgtggtatatggtatgtgtaccgcattatcttgctaacatccacacacttttgaattctgaagactttatctggccccaagattttgaatagaagacggtgagcctgcgtcagtatacctagcccctacaaccagaggcttctcacatcctggtgtttccaggaacagtcgctctttatatctgtttcaggtgtcagtattaatgagaccccattcacattcagaagtgctccattttggcttggtcaccatactaaccacataccatagttcttggtaacggccagcgcagtgttggtgaacatcagtacatttctagtgaattcccatgtataaaataaacaagatctacataaacaacattccagattgtatcttgaaaacctaaagtcatttaaagcattattggtaaggtatccccgactgcctgtctagatggcatttcccacgcattggtgcacgcttcttttgatggcagttcatccttctcctcactgtgattgcctgtgtccctgtcttctctttctaggctgcaagctccttccgtcattgcgtatcactgtgctgggcgtatatagcaagttcattatttagtcaactaatatttattgagcgttggcctctgccgtactctgggccctgggaatagcatggtgaacaaaacagaattgactttggtcctcatggagattcttgtctacagatttgggggcctggcctggtgaaatggagaaggtttgctgtcaagtgactttgaagccaaatctgaaaaatgagtaagagttagcttgtgagaggggatgctcttgaggctgaggggtgacagacgcagagacttgggacggacccctcgctggaggcttgtggggtaaggacaggctttaggcagtggaatgatgagagtctgtttgtgcttttggaagggtgttctggctgtagggcagagctgggttggggttgggggccgaggagagcagtctgaatggctgcctggtccaggctttgtggaaggaaggatcggttcttcacccctggtttcggtttctgttctcagtgtgggagctgttcttggacagtgctgtgtgctcttctccggagtccgaggccaggggagtaactgcagtgttcagccaagtacgagcaagtggaactgacagttgttcaggcttccgtcttgcacacgtcgaggaaacgttgtaaacaagaaacaaaaagcaaagcccttactcctagtgggtcttccctgagccaagtgcttgaaaagctgtgggagtgggaactgttgtcatgatcgaaaatgaaactattctgggaatgccagatttggggcgctgggaaccctgaagtgtcctgcagagaactggtggtggaggggcctctggaggacaaacatctacaatttgcaaatctatcagtgacccagcgatggcacttctggcggtttttcttccaccttaactttgaggtgaggcagagtgacttggaaaccaattctgtgctttaaaatataaaacataaataacttctattgaattagcacagaagtttggctggaggtaaatctttggcgcctaaatctgagcgcttttctctcaaatacgcacgagagctctttggccgtcttatttctcctcttctacacaactgaacaatttaaatgaattatggaccatcactcctcatctcccccaggaaatgaagcttagagcctccttgttcagctaattgttgcttgattaagctgccccttatggatggatagataaagtgattgatgcatgtgcttattaataccatcctggtgcatggaggacgaataaaccgccagcagcttcatttaagcaccacaaagggggtttcctagagtttgttgtatttgcagaaaggctgtcgtcgtctttccctctgtactggaaattacttacctacttggtattgtctttctggccaagtcgttttcttttgagctaatttcagacttccaccacagtttaacaatagtacaaagaattatttttctacatctttggagagtaacttgccaatactgatatcccatcactcctgagtacttgaatgtgtctttgctgtaacgaagatagtctccattgagaccctggcacggccatcagaatcaggaaactagcaccgctgtgtgagtcgcctcccaccggcagaccctgttcctgttggaatgtctcagtcatgtcccttgcagcaggagaatctgatgcagggctaggtgttgaatttcggtgccctgcctccttcattattccttgacttccatgaacttgacacttttgacaatgacaaggcaattttcttagagaatgtgtatccgtttgggcttgttgacgtttctggttatgcatttcttacaagaatatcacggcggtgagactttcttcttcttgcatccttacaggtgatacatgcttttgacttgccccttaattcgtaacgttcatttgatcttttaattaaggagccatcagtcagccttctccatgataaagttagtctttttccctttgtcataaaaaatattttgtgggaggtatttttgaggctatgtaagtatcccatttttcaccagccttttactcactggttagcatccattggtatttcttggctgagtactactttgatagctaccaaatgtcgatcttctaagtccatcattcttcctacatttatttgtttgcattctacattatgggaaagctttttcattcccctatttatttattcgtagattccaattttgttcaatgacagaaatacatttcagtcatgtatttgggtgctcagattgtcttagatgtggccagtgggagctccatcaggttgggttctgtgacttttttttgacatgttgctattatcttttgagcccttccttatttcctttcccaggcttatcttttgctttccctgccccagctctggagtcagccatttctccaaggagccctgattccttttggtggaggatggtgtttggaaaccaagatttgggcactgcctgtgctcattgctgttggggtcttgctgttcccaggcccttttagtgtcaaggttagagaatatgtgtattagttgcatatatacttacacatatgcatgctttttttgttttttttgagacggagtcttgctctgtcacccaggctggagtgcaatggcgcgatcttggctcactgcaagctccacttcctgggttcaagcaattctccctgcctcagcctcccgagtagctgggactacaggtgcccgtcaccacgcctggctaattttttttttatttttagtagagacggggtttcaccgtgttagccggggtggtctcgatctcctgacctcgtgatccgtccgcctcctatgcatgcttttttacctctgtatttatttctgtgtttatcgagatatatgaaaaagcacaaattcaaatcaagtcctcctattctagtgccacagcctgggttattgtagttttctttctttctgtatctgtaacttccttctccagtagtcaaaagcctcacttccattaccctggtatataatataatttactcagttgcctgtgtgtatgtggtcttatgtccccacggttgccccaccacaatgacgatgccctcctcacctccctgttctggctcccagcccctgcacagggctgtggtctccctcctgtgtctatcctcactgcccacatgggcttttgtattctgtgtgccaggtggctgctgccccagccaccctaacaggtgctctctttctgccaatacctaccctggctgcacctgcccctctacccctagtgtctactctattagtttcctgtggctgccataacaaattaccgcaaactgggaagcatgaaacaacagaaatttattccctcacagttttgaaggccaaaagttggcaattaaggtatgggcagggttggttcctattggggaccctgagcgggaatctgcaccatgcctctctcctaccttctggtggctgctagcaatccttggctttctttggcttatggaggagtcactctaatgcctgcctctgtcttcatacaacattctcctttcttctatgtgtgtctgtgtccaagtttccctcttcttaaaaggacaccagtcatattggatttagggcccattctaatctggtatgacctcgtttaacttgattatatctgcacagactccatatgcagaaaaggtcacattcacaggctccaggtggacacgaatgttggggggccactgttcaacccagtacatcttctttgctgcgttgcatcaaatgggcttttggagtaaatcattcataaaggaagggtggaggaaggaagggaagaaggaaactcagttgttttgagaagaatgttctctattactgtattgttcttcttcttcttcttttttttttttttgtgatggagtctcactctgtcgcccaggttggagtgcagtggcatgatctcaattcactgtaacctctgcctccagggttcaagcgattctcctgactcagcctcttgagtagctgagattacaggcacacaccaccatgcccagctaatttatataaattttagtagagatgggctttcaccatgttgaccaggctggtgttgatctcttgagctcacgtaatccgcctgccttggcctcccaaagtgctgggattacaggtgtgagccactgtgcctggcctattgttcttattttctcatctaaaattagggcaccctgctgacatcaggacagtcttggaaaactcaggacttaagagtgagcacaggatggcacttagtgtgatgacactgggctgttcaggaaacacgttcaccttctgttctgtgccaacccggggttggggcacacccccgccccccagaggcccagttccaggtcaaacaactgtctcttggtgcatgttgtcagcccggcgcatgctctgagttctgtaagggtgagtgaacggggaactctgactgtcattggtgctgtgggggaagagagcagcgtgtcagcacgtggactcagctggggactcatggggaagccaccatggtacggcagggcctggaagtttgcgcgtggtccttgattgccctgatggttaaaaccacctgctccccgacttttttcacattatgctctgtgcattcctgcacaaattaaatattctagacagtagttctcccttatctgtggttttgcttttagtggttacagttacccatggtcaactgaggtctgaaaatattaaatgggaaattccagaaataaacaattcataagttttaaattgtgcactgttgcaagtagcatgatggaatgtaacatcccacctcttcctgcccaggacataaatcatccctttgttgagatgagggaatctgctgtagtcccaatactctattatttgactctattacattttctttaaacatcttcccactgtctggtatttgggttagttttgctatataaataatgctctttgaacaatgttgaccataaatttgtgtctgcagaaactattatttgttaaatatcaactattgatggatcaggtactaggctaggcatgttacacatcttatttaatccttaccgcaaaccatgcggaagttatcccattttacagaggagaaaactgaggcatagggtcttgggttctgttaccttctgcgtttggttcctgaagcagtgccctgggaagtggctatagttgccggatggagacctgaatggcttctacagttgtggagatggtgaccagcaccaggggatttctgaatttttggggcaatggcttgttgatttctcatttaaggtctcatttttatcactatactgtatatgagataaggttcctctcctcatctcatatacagtatagtgataaaaaagcgtcactagccaaggctggctcctgcccacttgtcatggatatgggagccgccgaggtcttccctggtctctgccctgcccttagggggctgtgctgtcctggagtcatgtggctgtcagacctcgggtgtcatcctgagtcctgcattgcagctgccatcctactccatgatgaataagggtaggcctatgaagggcctaatcacttattaggaatttgcatgttgccaaattaataagctaagggtcagacatgattgatcaccattaatacccaaaccatttcctagggctgtcatctcagcaggagttgtggtcatagatgagcttacactggctagggaaagctttctgggatgggtggatttaaaactgtctcctggatttctcaaagaactaaaaatagaactgccattcaacccagcaattccattactgggtatatactgaaaggaaaagaaatcattctagcaaaagatacctgtacttttatgtttattgcaacactattcacaatagcaaagatatggacttaacctaggtcctcatcagcagtggaccggataaagaaaatatggtatatatacactatggaatactatgcagccataaaaacaatgaaatcattcacaataagaagcatggagctggaggtcattatcttaaatgaattaacacagaatcagaaaaccaaatactaccacatgttctcacttataagacggagctaaacactgagtacacatggacatgaggatgggaacaagaaacagtgaggattccagaaggggagagagaggaagtagggcaagggttgaaaaactacctattgggtactatgttcactacttggacagcaggatcattaggagcccaaaccccagtatcattgcaatatacccatgtaacaaacctgcacaggtacccctgaatttaaaactgaaagcaaaaacaaaaacaacctgtaatcccagcactttgagaagctgaggtgggtggatcagctgaggtcaggagtttgagaccagcctggccaacatggtgaaaccccatctctactaaaaatgcaaaaattcaccgggcaaggtggcacgtgcctgtaatcccagctacacaggaggctgaggcaggagaatcgcttgaacctgggaggcggagggtgcagtgagcagagatcgtgccattgcactccagcctgggtgacaagagtgagactctgtctcaaacaaaacaaaacaacccctcccaccccgctgcccccaccacccccacccccacccccacaaagttatcttctgaagaccaagagagaagtacttggtatcaagtggtaaaaaacaaacagggctgagagatttaagtaggttggagaaaggagttttggggcacggggtttttgtacttcttggaggtcctgatactaaaaatgaggtcatttttagagtgggaagcaaaacggccccataacgaagtgtttgctcttcatatgcactgaaacggcaggaggtggaaactgacaaatattgaggatgcttactacttcactggttttcagcaccttaaataaatgttaatgtgaaattaacattaagatagtggcgcgtttgccttctatgggacttacttgtgcttctgaaatagttcttcaggttaatcggttatgggctgggcagggcacactttcctccccttctgccttcaaaagaccctggaagcacccaggtggccctgctttatggcagaagcagcaactaaaatgaaacaactgattcatctgcatccaggtgatgcaaagccaggaaaaagcccctctggttctctcttgtttccttaaagagagcatggaggtgaaggggtggagagagggcgagtatctttattttggagtatgggagtgttttcctagtccggactacaaaaggaaagctcgggttggccaggaaacgcagcatgttttgttgatgcccactcgctgggaaagtattaaatggggcaggaagtgtgactttggaaggggctgcataaaggaggctgggaaactgcttcctgtgcacccgggccagctcaggagctggaacgatgtttggcaggctgtggggatcttgctgccctggctgtgtccccttccacacaggctcccagtgcagatgccaggtcagacggaggtgtggggccctctctacctcttgatgtgaaccccagtttggcctgcctgtgcgagcctcatatccaaatgctaagtcagggcctaagactccagttcaaatatgagttctaccactcagtagctctgtgaccttgggaagttacttaaccttacgtgcctcagtttcttcatctataaaatggggaccacagtagtacccacgttcttgggatgctgtgaatcaggtgagcttatcctcttaacgtgcttagaacttgcctaacactgctaagcgcttaatactccttagctattgttaataccctcatggtggaggatattgacaacatcctggtaagtgggacactccctgctggccagctggtatcattttcaagggtttgcaggtctagatctggatgaggcagttactcacagaaaagctcccttgcttaccaacaggttgtgttccaaaggtgattaagtttgcagagtgtgcatcaggctttttaaaactaagcttttcccaaaacaaagctgtttcagtagcaggaacattacaggggtgtcacgagcaggtattttctttccaccagacacctgaccactcactgtgatttggaaagattagaaccggccgggaaacgatgtttccatctttgatgacaaagctttcctcattcatggtagccacatttcaggtattcaggagccaccttgttgactgccctgataaataacaagttaatagttgcaaaatgtctactggatagtgctggtctacattcattgggtgtttgctgggtgcagagtacaaggcctatttaggcctaaggagcgttggtctcagtggattaaagcacatcacaatgaaccagtgactttaggacagtgtaagatgcgtgctaactcactgttagaggcagtgagttttatgacttcaagggaagggggcatgtatgtgtcttgtgttggccaggccaagtattgtggaaaagagacatttgaacaatctttcaaggtatggcgagacgtttccaggctaggcctttctcctgagctccagcctcgcacagctagtagcccagccatcacctctttttgggtatcccagagatctccaaccctgtaggccccaaaccactctcagtatctctcctcaaacatcccacatcttctgttgcagagtggcactcccacccatctagtctaagaaagggaaaaaggtcacacccaagtgagtatgaagagggaggcgaggtagacattcagaaagaagagcctcgcagatctcttttctctgtgaagctggaggcagggagggatctgaaattgcacctgtggaaaatgggaacaggacctggggagaagaaagcaaaaaagatctgcagaggcagagactctgagagctcagatgaggcgatcagccgcccatctgctgcgaggttctccagcctctcacaaatgtttgcagtgtgagcaaacaagacggaggcatgaaggcccgtttgtagtgggaaagtggccaggccactgtgtgggaaggagaatggggccggggaggcccctggagctggaatcccatgttaacgttgctgcccacgttaatatataagcctacgtagtcttgtactctcacccagcagacacgcagtaagtataggcctccgctgtgtggaatgtggaagtggattgaagggagggtggccgggacagggacgctgcagcagctcggggcagagcggagagcccctgaacaggctgccgcgggagcatggaaggaggccgtgggtaatggggatggtctgacagatggagactgcaccccttggtggctgacatggcaatgggtgggagggccagggaagtggctactgagccagggaaagtcaagaaaatgtcagcagagaggtctagctgctttcccattcgtgttcttgcactgtgtttcttacatctgcctagggaactgccctttgagagtttgtggggacctttctcagaaaagtacacatctgggtgaacgttaacacactgcatgtatttttaaggcttgatctctggacgaagagctgctgttcttgttaggctgcattgagaactgttttctagagtgaccactgggtcatctgcagaaccaagaaccagtgatagacaggtgacttttgtgcacacacacataggggccccaagtcagtttgctcgattatggttcggatgcagcacacatttcaggtaccagaggagtctgtggtcagagacaaggtaaattttataaagcagctatgggaatagcttccgaaaggatatagaaaacgtgcctaataggaaaattgtgcatagaatggcaaatatgtaaaactgtaatctggatgattttcagcctggaaaactagttttgtggtatttaaaagcattttagacttttgatttcatatacgtttctattccattaatgatgaaatctattcaccactggcctcctgttttcccatgactcaactggagatgtttattaaacatctggaatctggaagtccattgggttaatggatactaaataacagtgattttcatacttaattgcttatcaaaattattctaggataataaaaaaaattcccggttcttattagagtggggccagggaccttttttttttttttaagtacccccgctccgccccgcttttttttttttttttttaaagttttaaggtaatagcattgcaaggcagttttgggatagtggcatgaacagaacagaaaagaataaaggtgggttatgatgtatttggagtagcagtcctgcctcatcattcatcctgaaaaatctacgtagtaggagaattggtggttgaattgcttgaaaccttatgaggaagactggctggagactcccattcttaaatgaacctatgactttctaaagttcaacaaaacataaaaatcagttttgcattggtgcagataatatgtacactgagaggcatggttttttccgtatctagccctccatccaaacgttaaacgtctttctgatttcaggactggcaatggctgacttcagccgtcagggtcccatgagagtctggagagtgatttgaatgtcgcaggcagagcaggaggaagcgtggccgcataggaaggtctcaggccatgcttcctctctcatatagggggtcctgttatctttgctccgaacatactattttcatgccatgaagttcttgtacattttatttctacctcttagcagtcagtacagctcttagggtatgcttctccttgtttccctgtttctacaaaaatgttaaaaatattaggccaggcgcggggctcacgcctgtaatcccaggactttgggaggccaaggcaggcgaatcacatatcctcttctgcattctacttcccacagtgccccctccctctctctgccgtccacatgctcgcacacacctgcacacacactgtcgggaggcagtccagcctagtgcaatgtttttataccccttcaaccccaggaccagtataatataatgtgacattaaatggaagcaaacgtttcataaaacaatgcttacctcactttgttcggggtgctccctcattttccattctatcatattgtaaattaaaattaagttaaaagtgctgatcttaatgcaacaaatgatcccacgaccctctggtgggttgttagcagagacttgcaaaacacaggtctagaggtttctggcatattctttggagtcagacggatgtagatttgaatgtttgctttaccacttaatggctgtaagtggagctttgtaagtagcttcatttcctcatctgtagaatggagagtagctactctgcctcatgtggcttgttggaagattaagtgaaataacgcatgaaaggcatttgggctgagggtcaggctctagttagggctggaatggtattaatgatggggatgatgatgatgatgttcaacttctaactccagctttcaatttacataactttcatggaaattcttacttttgctgaaaaagcacacagaagtcgttgtgaggaacttgcaggaggaacttgcatttgggaaaagactattgtgtgcccaggaaaaattactactaaacactgctgttagattcctatacgcgtgtcatcgtgtgtgtgggtttttttttttttttttgtacgttccaatagccactgtcctgacccagagcagtagttctagctcacctccttccctccatttggctctgtatagagtgctgcatgactcgtgaaactgaagcatggcttttcccaagtcgtgcactcagaagtcattatagcagcctgcgtaaacaagctcagactctagctgggcatctgagaccctcctgaggttcaagtcctgcctcctcatctagaggcgtgggtgacttagacattttcttttctttcttatttcttcttcttattttttgtgggggctgcctttttggctatgcttttcctaatctctaaaatgatgataataggctgggcacggtgacttatgcctctaaccttagcagtttgggaggttgaagtaggaggatcacttgaggccaggagttcaaaccaacccgggcaacataggtagtgaaacccctgtttctacaaaaatattttaaaaaattaggccaggcgcggtggctcatgcctgtaatcccaggactttgggaggccaaagcaggtggatcatcaggtcaagagttcaagaccagcctgaccaacatggtgaaaccccgtctcgactaaaaatacaaaaaaattagctgggcgtggtggcgcatgcctgtaatctcagctactcaggagactgaggcaggagaattgcttgaacccgggaggcagaggttgcagtgagccaagattgcacgactatactctagcctgggtgacagagcgagactccatctcaaaaaacccgaaaaacaaaaaattagctgggtgtagtggatgcacctgtagtcctgggtacttgagaggctgaggtgagaggctctcttgaacccaggaagtcaggactgtagtgagctaggattgcaccactgcactctagtctgggtgacagagtgagacctgtctcaaaaataaaatgaaaaaataaaatggggatactagtatttaactggttagagctgttatgagagttaaagatgattgatgtgaaatacccagtgcttgcttctcacacaccagtgactcttatgaagacacccctgttggtgcataagacagttgctctgctcacatcagcaaacacatcttcagtcctgctttggccgccgataccaaccttttacctcccctggcttgcctgccaccttctccctgcctagacagcacctccccatccattaaggtcttcctttaccataaagctttcctttgccataaagctttctcttatatgcccatttaacaatgatttatgtattccttatgaactacctaacttagttggcaattaataatacactaccttctgatctttattgcatagtcttttattattataattataggattattagttagctttatgtgatttatctctcacatcctcagttaacttatttgttccttgagggtagtgatcatgtcttaccgtctttgaatcccccacagcactcagcacagttccttgtaacaatgtgtgtttaatgaatttttgctgatccattgggtgactgggtaataagaaaaggcgttccatggccgggcgcagtggctcacgcctgtaatcccagcactttgggaggccaaagtgggcggatcacgaggtcaagagattgagatcatcctggccaacatgatgaaaccctgtctctactgagaatacaaaaattagctgggcatggtggcgggcacctgtagtcccagctactccggaggctgaggcaggagaattgcttgaacctgggaggcagaggttgcagtgagtcgagttcgagccactgcactccagcccaacgacagagcgagactctgtctcaaaaaaaaaaaagaaaaaagaaaaagaaaaagaaaaaagaaaagctccagagataatatgaatcctagggtaatgttatgttcctcaagatctgatttctatttacttttggtagttccaggtcattttcattagatcagggattgagatgattcaaagctgggcttcagcctttgatattagtttatttctacttagttgtattacttacaaagcttgtgagggtgtttccaggaaccccttttcctagctgcgtcctgatgttcaatttttgtctcctcagtcacctgagtgtgtcaaaagctctgctttcaaagccccacagcctcctcttcagaaaggagcagctgtccctgcgctaggacgacagcagccctaaatgtcaggttcaccttcctgggtttctttttctcctagatcttgcccccctaatttttaactaccttgttagctctctgatgcatttaaatggattttaaaaatatattttgtccatgtttcttagttattcagcctgggagtcaggtctgaattacctactgtaccattaccagaagcaccacccccctctcagctaaggaatttattaccttaaatccagcaggcacatttagaagtctctggaacagagaattaacatgattaaatggtattttaggaagatgactgtcagtggtttgcaagacggagaggagtttggaaagtctcagtaagtagaacaattaagaggtcttcataactcagtgctttctaaagtacgatgaaggcagaggttagagtggataagcctgggtgtttcacgttagataggcctgaatttaaatgagagtcttggctctccacttactagcaggtaataaaggataataaagtccctatgtcctagggttgtaagggttaaatggcaaaacttgtagaaaaccctaggttttttattttctatttttagagaggggctgtctttctgccacccaggctagaatgcagtggtgtgatcatggctcactgcagcctcgaactcctggcttcaagtgattgtcccacctcagcctcccaaggagctgaaaagacaggtgtgtcccaccacacctagcaagaaaaccctagttttaatgcccagcacatagtaggtgctctgtaaatggtaaccgttgctcttactattccaagaaccaaaattcagttatttgggtgaaaattcaacctcactgttaatagcactaatcatggatagtactgtcaacttcatgggggatcattcgtgacttacgaatcacaatgaatagcttgcatgccttatatagcaggcttggcaccagtgatattctcagtacccaccatgggctgaattgacttatggccagatgccacagttttgaagccagtcccagcctcaaatctcaaaggtgtaaaggtagatgattttacaacgtgcctttcgtcaggctccagggtagatgcttcaactcttttacttactttgaagtacaggttgctcatatattaggtttgcagaaccataaaattttagcattttacttctaaaaacaacctgatgtgcaagaagagaagcttacagaaaaaaaaacatcagattatgattcatcgtatcatggataaccccaggaatcatctgtttaaaacgtcccatttttctagatgatcaaagtgtgggccgggaagatggagggattagcccaaggacacacaccagcaatggcagagtcaaggtcgcgacacaatgtcctgatttctgtgcattttggttcttagacaaacatagccgctctgtgtcatctccactgagctacctgccttctctaactctgttcgaggttcacgtggcctgactgttagcgcctgtgggaggcttgccttacagaaagaccagcgtgtcaccttgactttcgataatggaagctagacgatacataccgagtaagcatctttctttccagtcctcagtcctctgaccctctgtgcctgtcatctcagtcttttaatctccggaaacataattaatctgtttttagtgtccaactaaatgatccgtttctggtgctaggcttgaggtagattctgcctttgctgtttttcacagaagtaaagatgtacgctcaccctcggctagtcgtgagaaacctgtgtcaaatggcaaactttgtaccgtgtcgcgaggcaagcgcactggtaatgcactacctgcccagggcgtgggagatgggtcaggggagaaaaatcaagtcacaaaggagaagggccttcatgtgactgggttagcttttcattgagtctcattggagatgtcctagctacaaacaaaccaaccaaccaaccaacccaagcaaacaaaacctgaaataagtgtagccctttttaagtttattttttactctgatgaaatacttgttcgattttttgctttttctaaaagttacctataattagtaacagtcctgattgaagattgtgaacttttctaataagtttgcggtttggctgagctgcatccttactagacaggcatgttgcgtaagtgaggaatgcacccagccggtggatgacaagcccggcacgccgaccagtggaggagtctatcagaatggccaaaatgaccacacggcaggagcatgggagagccaggccattgagcatgaacaataaggggactctagagctttgcttctcagagtgtgacccaaggacctaggggcttgtcagagatgcagaccacagcggtcgcctggaatccactgacttgggattcctgtgcacgttcaagttggcgaagcgctggatttcaggatttcacactcagctcttccctttacgttggccaaactgaccctatcattcttttgctaaaatccttcggtttcctcttcagtcttagatcgtggtcatgaccaaaatcctaggcatggtcttctgggtgagccgggtctctgggccctccctgtcactgactgctgtccacaggggccaccttgcctcagggcctttgcagctctcccttctctgttagttgctcagggctgccgtaacagatggctctcacacaacagaaatgtattccatcacaattctggaggtcagaagtctcagatcaaggcatcagtagggccctgctctgcctcaagggtcttggggagaatccttccttgcctcttccagcttctggtggctccaggcatggttagctgcagcagcctcactgcagtctctgcctttggcttcacgtgcccatcctccctctgtgtctgtgtcttcacgcggcattcttctctgtgtctgtgtccacacttccctcttcttataaggacatcgggttcctgcgagctactggtcacaatattttgtcagctgatcattgtataaccttgtcttatgtgtttctgtttgaagacaccctctgtaatatttattgttgattgatgagcattgaactcacagcactataatgcatgcctgagcaaagcttatctaatatacgtattttccctgtaaggcgcatcatagccttctggttcttaggaacccgggaaggcacttcagcacaatgcctgggggccattttaaacagcaaagtcaccaaaaaaagcacaacgatgtgacaaatgtcgcactctgtagcctgtgaaaagaacacttgtctgccataggagagcaagagcgggaaggcagagtgtggccttgtccagcctcagctgggaacacgtgcatcagatgacttgaattcagcacacgtccccgagtgaccaccaacgcatctgagtattgatttgggggttgtggatatgtttcagtgagtaggcaaattcacagatacagaatctgcgaacagtgtggatcgaatgtgtcttcacacacaggctttagttttaaagacagaaagttgggttttttgtcttggtgctttgctttacctgacaattgactttttcaactactgtttccgtttaaaactgatcttcgctgtctttcagagagatgcctgtctgtgagaactttaaaagccatcactaatataagaacgggaaccactgtgggctggagggggtcacctgaataggaaccataccatatggctttttgaactatttcagatgtgaccattgtttttttttttttttcccccaactggttatttgtgagaaacataatggaggaaatattatattctgagtactagctggaggcagggccacttccacacgcctctcgtgtttccatattgccaggctcaggctcagctgcagcgccagggaccacgcacagcacttctgcacgtcaggctgtcaggagaactggcgtctgttgctctctactcgtgaccactatacctacccctatcctgtaactactcttccctcgctcttccctctattttcttgaccgctctggatttagtggtctccaatctgtgtcttgaggtcttttccagagggaagatcaggctgggctggtggtcaccaccctggcgggcagagctcttgcagggtgagcctttgaggggtcaccagtgcactcctctgtgcacagcttttcccagcactccctagtcttttctgaaactctttatcatcttcatggggcatggtacctcccttctttccagtgtcctgttaggttgggagttcctagatggcagggaatgtcatctttccctgttcctggagcatcattctcaatacatgacctttgaatgggtggatgaacaaatgaatgaatggaacaaatgaatgaatgagaccaagagcagcagtatctgcaactccttgtggccattccgtgttcttgtgaaatatctctaaggttcccgtttgtgtctcaaagaatggtggctggagcctccatatgagtggaggaggccaacctctgacggcaccccacctaggccctcagagccgtcttcagagctggcctgggcctggcagtgagtgtttcctatgtggaaggcaacatttgcgctttgtaggactagcaaaagacctagaagagggcggagcatgggagctcatgtctgtaatctcagcactttgggaggtcaaggtgggaggactgcttgagcccaggaatttgagaccagcctgggtagcatagggagaccccagctctacaaaaaataaaaaaaaatagctgggcgtggtggctcacacctgtggtcccagctactgggaggctgaggtgggaaaatcgcttgagcccaggaggttgaggctgcagtgagctgtgatcatgtcactgcactcccgtctgggtgacagagtgagaccctgcctccagaaaaaaaaggtgatgctcttcctgcggtagaacttaaatttggttaggaaaagagagtggactatacacagctgagaggtgtataggtaaggcaagggataagatgaaagactttacttaaaacaactgccctaaagcaatgtttggtttttcaaaggagcagtgtaagatcagtgagtaacataggagctggaggcagagggactactttaggcgggagtggtctgggaagcccttgtggaggaggaggctaggtcttagagggcggataaggacctgcaaggccagggaatgaagagcagagggcacgggatgagcacggagcaggaggtgtctgcagcagtcagtgggccagactgcaggaggcatacaaggaaaaggctgggccagactgcaggaggcatacaaggaaaaggctgggccagacagcaggaggcatacaggcccagggtgaggcccaggggctgggggtcacggaaggatgcttgtaactctggcatgttctgggcgcagggaatagaggagagaggaagtccatggcaagctgggaaggagagttattgagacatcagcccaaatgccaaggaatagaattttcagagctcaattttggaggaaatgaacaaaagaaggaagggaccaatcaggattgagaagaggattacagtgtcacactgtctgtgaggtcctatagaatggaggcttgcacctgacccatctttgcttttggagcccagattagatgtgaatgcaggcatagatagggtgaagatgagtgggggacagtgtggaaggtactttgttagtgattcccctctggatctattccgatggaccaggagaagtctatcttagaaaggaatctggaagcagcagggaggcattgtgtggactggcggaggaagggtggtcagactatgaaaatgatttccaaagggaaagtaagttaaaggaaaagggggtgatgtcaggtcagcggggaggctggcattgaagaaagacacttgggtgagagactgcattcgggtaaaagcaaaagcaaaggagatacctgtgcagggttccaggggctctggaagtaaagtcaggagggacgggtagttggtggaaaactttgggaaagccaaattaactgattcctttcgagctttaaatgttaatattgggggttgaaagcgtttgtataacccagattctcaaaaggaatggcttggctatcataattttttcccacaactgctttgctctgcccaccccttggctcttggaaggatcatccccaaaggcgttggggcctctgagcaacggaagcctcaaaacacggccagtgcagtggggataaagcctccctctaggcaaattcctggggaggagtgtgggtcctggtctccaatgtccataggaccctcccagcggagggcaggcctggaccatcctgtgtccccagatagccccctggccggtgcgagggctgggcttgcacaggtggcacagcccctgagtacaccgaccccccagccccctggtccccagccccaggaaaggagagaaggaaagagtcaggcggggtgtagaactctgcagtgcagacaccacactgagtggcaccaacgcctgacgctgtgtttctctccctcaagggcaccatgccggtggaaaggatgcgcatgcgcccgtggctggaggagcagataaactccaacacgatcccggggctcaagtggcttaacaaggtgagtgggtcagggtgggtgtatgtgtgagagaggtcctggctgaaacacgcccatgcggactgctgaaagtaaaatcgtgtgtattcaaaatcttaggcttattcatgacaaaaaccagccaacccaaaatgatcataaaacatcaagttatcatctcaaaggctttttttcttttagagacagggtctcactatatggcccacgctggagtgcagtggtgcagtcataactcactgcagcctcgacctcttgggttcaagtgatcctcccacctcagcctccagagtagctggaactacaggtaaacgtcaccacacctggccaatttttgtatttttttgtagagctgggatctcgccatgttgcccaggctggtcttgaactcctgggctgaagtgatcctcccacctcagcctcccaaagtgtggggattacaggcatgagccactgaacccggtcacaaaaggatttgtatcctgtacgactgtagcctcagcctggagtctccaatgtctgctcacctttggtgttttggctgactgcctctcgaaagctccttgctttttttggaaagctccttgcttctttgaggattcttaccctcttccttctccaaattccttttttttgcttctcctggccttttaggactagaggacatggaaactccagggttttatattaggaatggagcatttccttttccatgttctctgtttaaagaaagcttgtttttgtctttaaaaaaagccttctttttacctctgtaatgaagccctatctgtgtgtccacctttcctaagaaagcagccagtcatttacaacctgccccttccaggcacaaacactcccttactttgttaacctaaaaactcttaatttaattgatcctagctgttaggggtgaatcagaaagagataatgtcggcaaaaatgaaaaacttctagaactatataatctagaaaagcaactaaatatatatcatgccttctttaaggaggcccaggagagaagttcctctcctaccagaacagttctgagtcaatgcctttttcctcttctccactccctccccttttcttttttaatcttaaggacacaatgaataatttagctggccaggctttatctttgtatcaggtacaagagcttagagccagattgcagattgtagcctgcttccaacaagggaacaggatattgcagtataattttttttaactaatatcattcctggccttattgggtcttttcagatatctttcaaatcttatttctttttactattttccttttatccacttattttgattttttttttgttttctttagacaaggtctccctctgtcacccaggctggagtgcagtggcacgatctcagctcactgtaacctctgcctctgtgctgaagcgatcctcccacctttgtctcccaagtagctgggaccacaggtgcgctcctggataatttttatattttttgtagagatggggtttcactatgttgcccagactggtctggaacttcaggactcaagtgctgcccgccttggccttccaaagtgctgggattacaggcatgagccgcagtgcccagcctgattttgaatttaatgttactgtgttgaatatgtctgtctgagcctttctgaaacaaggtgaggcactaagtaaatagaaatgaagaaaccatctgcttatttcctgtgacctgtcccatatctcaaggtcttaccacaatgtatttttctagggttgctctatctatagtgttttagatttacatatgtaatcagcttcttccaaagaaacaaacaagaaatggagttgctccttggtcagctcagttagcaggggtgccgtggaggtataaggaaggggggaccagagtaaaggggagctggagagccagggtagcaaatgacactgaatgaaagctgacttgtactcagcacttactgtgtgccaggcacccttctaagcaaggtacatgcattagctcacgttccgccaccatggggtaggtacagttaatattttccattttacagacaaggaaaccaaggcacagagaggttaagtaagattctgttttgaggaacaaggtagcattactgtttgatgtggagtgggagaggaaagcaaatgctcctgtgttctaaagagaagcaagtggtctgcttctgcttttcctttttcaaaaatacctccactagttttggttggcaggatgcagtggagaagagacagtgtctcacacctctcctgttgagcaggtgcctgatatgttgaccgctgtggttggtttagactaaccattagtcccttcttggtgctgtagtagatggaactgtggctcccggagaagatatgtccacatcctaacctccagaacctgtggatgtcacctcatttggaaaaagggtttttgcagatatagtgaaggaccttgagatgaaatcatcctggattttctgggtgggccctgatgccaatgaggagtgtctttataagagacagaagaggagaaggcacacacagaggagaggggcatgtgaggactgaggcagagactggaaataggcagccgcagccgagggactccaagaagaggcgaggaaggatccttcccagagccttggaaaggagtgagccctggctgggcgcagtggctcacgcctgtaatccccgcactttgggaggctgagttgggcagatcacctgaggtcaggagtttgagaccagcctggccaacatggtgaaactccatctccactaaaaacacaaaaattagctgggtgtggtggcaggtgcctgtaatcccagctacttgggaggctgaggcaagagaatcacttgaacctgggaggttgaggttgcagtggtggaggttgcgtgagctgagattgcaccactgcactccagcctgggtgacagagcaagactccatctcaaaaacaaacaaacaaacaaacaaacaaacaaaaaaaaaccggagtgagccctgcagagaccttgattttggacttctggccttcaggactgtgatggaatacatttctgttgctgtgagccacccagtttgtgtaatttttcatgacagtcttaggagattgatgcaccctctaagggtcacttcctttctgggactctcagttgagatgccttttcttccatctattttgtccatgtttttctgatacaggaccagaaggcaaatggatttccctttgtgcaaatgaacacttggcccctttcaggcagtccttacctgctgagcgtcactcatctggctcttggctcgagagttctcttcccgaggcatggaaggaaaggagacctctgtgtcatctcacagggctcctccgctacagctggacctgagccaggctgatgaaggagagcgtgcccgtggctgccggcccgtgccgcctctcagcaccgccctggaacagaggccgaggcctgcactgtggccccgaggccctgtcaagctgcatcctgctgaggcctagccagagtgggcacgtggcattgctcgtgcacatgggcactgccatcactgtcactgcaggcctcggctggggtcaggatctcttctctccatacctacactcccacagggcatttttttataggtttccgttaacttaggcttgttggcattcatctgtccatataaatacttaactgagagcctaatgttcttccctcccattcacaagcattctgcctgggaatccttgtttatattttgagtggtttgaggtcattccaagatctcttttgccactgaagattgttgtaactcttagaatacactgtccatggggctgtgggactcacttctgcttcagtcggcattcaggatgtgttcatgtttattgtgaagtgctccaggctgggagccccatgcaccggtgccttggctatcttcttcatgtctgcatgctcagggccaggcctagtgcctggtaagtgggaggccctctgtcaaaattgttctgggaatacacagatgaatgtcatggacttgaaggggagcaacattggtggtgtttttgttctgttaagataatcagatttatggacactggcttggcagttgtcacatggctctcagaaagtccattcaacctactccattcttagtaagagagaaagagttggttaattaatgccttaaatttgtttccatcctctattgtcttagtctgttccctgttgcttctaacagaatacctgactctggataatttgtaaagaagaggaatttatttcttatagttatggaggctgagaagtccaaggttgaggggctgcatctggtgagggccttcttgctggtggggaccctctgcaaagtcctgaggcagtgcaggatatcacccggtgcggggaaagagcatgctcacgtgctagcacaggtctctcttcctcttaaaaagccacaatcctacccctcatgacaactcattaatccattaatccctgaatggattaatccattcatgagggcagggccctcatgactcaatcacctcttaaaggcctcacctctcagtactgccacattggggattaaatgtcaatataagtgtcatagggggcaaatattcaaaccatagcacctacttttaataagtttgaaggagggtgggaatggaatgggtcccttggattcctctgaaggaacagcgaggaagtttggaaaagtgcattataaccagctcatgaatgagaccttggctggggcaatttacctttggttatgggtatttgcaaatgtgcatagcatgtttgagtagcccaatgacaaaaagaaataggatagcaaattttcatatgcctgtatctagatgtatgaatattttgccttatctttgtgtgtgtgtgtgtgtgtatctgtgtgtatctggtatattaaagcagctccctgacagcatacattgtaagacataagggcattttcttatatatccacaatataccattgttaattggacaaaattagtactgtttaatatcatcactgctccattcatattaagaatgccttgagtattcccaaataatctttttacagttgatttgttcaaatcagaattcaaagactgtccacaggttgtgtttggtgtttatgactctaagtctctgctgactgtgggcctctgtttttttccttctcgccattgacttgttgagaccaggttagttttgggtttgtccacatgcttgcttgtggttccctgggccatttcttgaggaaggaaggaggcagtcacatccggggtcctggtttctctcgtggctccatgtgacccccaactctggtggggttattgatgttcttagttcttcctggatccatgcactaaggcaggggaatcatcagatctttccctttttttcactttgagagtagacttgtgtttgtgtaaacatcaggctatctctgaccacggtaaggagtccagacaaaaatagcacactaattggaacgtcttgcaaatgttggggggaagaagaggcagaggagataacagaactagtttccatgtggggccaaggaacattgttctacattgctcaaaataatgtcagatgcttttctgaagtcaagcagcgctcatctctcctgccttccttcagatgggcagagttgtgcacacacgtacaaatggtgggccctggcatggcgcgtctgtctatacacagcatgtaccaccaccacgtgtgcaggactggtcactcggggatgagacacctggcacatactgacgtcacggggtctacacacacatagcaacaccgtcatgtcccatggaacacacaacttgtgaccagaatgtttactggtcagaatctctttcagttttaaaatgaatcttgctttctcttaccttttcatatggtcttcttcaaaaaaagaatctgtgatacaattttaaagatatttctgataagtttattagtcttttcttttttttcctgaagtatgaaaaactaggtaaaggtgacatgtagtttaaaaaatatttaccattttaaagtgacattcacgatgtcatgcagccatcaccactgtccagttccagaactttttatccctccaaaaggaaatgctgtacccattaatcagtcacttcccatttccctcccccctagcttgtggcaaccagtaatctgctctctgtctctatggatctctgctctctgtctgctctctgctctctgtcttttctggaatatttcatgtaaatggaatcattcaatttttggccttttgtgtctggcttctttcatccagcataatgttttcaaggttcgtccacatggtagcatgtgtcaatactctattcctttttgtggctgaataatattccattgtatggatataccacattttgtttacccattcatcagctgatggacactcgggttgtttccatcttttggcttttgaaagtagtgctgctatgaacatttatgttttggtttgaatgttggcttagaattctttgggtatatatccaggtgtaaaattcctggatcatcaggtaattctgtgtttcactttcttgaggaatggccaaactttttctccagagtggctgtaccattttgcatttccacagcgatgtgtgaggattccagtttctccacatcctcaccaacgtttgttatttgtgtatctttttttggagacatgtctgtgggttagtctgtttcatgttgctacaaaggactacctggggctgggtaatttataaaaaaacgaggcttctttgggtcagggttctaggctgtacaagaagcatgaccttggcatctgcctctgttaaggcctcaggatgggaggcaaagggcattacatggcaagagagggaggaagagagaatggtgcaggcgacaggctgttttgaataatcagctctcaccggagctaatggagtgagagcttactcattaccacgagaacgacaccaagccattcttgagggatcctgccccatgacccaaacaccgtccaccagaccccacctgcaacactagcgatcaaattttaacacgagattttgaggggacaaacacctgaactattccagtctactcaggcctgttgcacatttcaagagggtccatagtgtatgttgctgggtttggtcagcgcttttgtagttgcatggcttttgcggtttctgtgggactaggtttggttgtgtgtgtgtgtatgtgtatgcatgcatgcgtgcagatgcttaaaaagatctactttatctgtatcaattttgtgtcttgcaagttagatttcagattgtgtcaccctagaactcctttgatctagaaaaaagtgcaacagcaaattcttaagaatctcggtgtttaagcataaagctttagattctgggcatgcacttcaggaaaagctctttcacgaaatgaattttcacttgtattcattttcatgtgaacatcaataaatggcattaagtgattttgctgtcgattttcatctacattaaagcataaaatgtcactcagcccctttctgatcactgtccttttgaaattggctaacccgaagccctctctgtggatgatacagaatgaacaccgaggaatttatgaaaaagtctctcactttcagttctcctttaataactgactttttagaagatggtagaattttccttttaacaggttttgggaaactctccaatgttctgaaatagtctttgttctggctttgtgattggttctgtggagaggcgctgaatctctttggggacagctgggaccctttctgtgtttcactatgtgagactgaagtggtggaaactccctgctgacatttcctctccttcctcagcatctagtgcagggatccgcatacctagcaattaccagaactgccttgagagctttgaaagagtacaacctcctgggctttaatctccacagaatccaggtctcaactggtctgtcataggacagggactcttccaaatctaaaagctgggagacaatgagtgggtgattaagtaatagcatatggagtcgcatgacctgggttttgaacttagacacttattatcctgcaagttccttgactaaatagttaaaatctgcttcttggtttcctcagctataaaatggaaatcgtaacatatacctcactcagtaggctgtgggaggaagacaaaactgaggtccctgtggatgtgggtagtcagatgcacagtgccaatgggaccttagtacctgccggtaccgccacaagagctgcttgggccaggttcctcatctgtagctttactaagagtacggctttgttactaaaccatgggtttccaatcatgtgtttttcagggttgcttgaggcggttttgagttacagacctcaacactgagagagatgtagagatagtctgatataaggattgtattgagggatgtttctccagaaaaatgtgtcatttcataacctctacctctttgtttgcacttcttgctatttcttgcaggcagtagacccacagggattcgaacattactttctatttctgttggatgcacaagcaaatggagatatttggtttctgtgacagtggcctcagatgtacccgacttttctttagtagcatcaagggttttggaaacttgtctaatttttaatttacctaagatagctggagttactatttaccaaacgacgagaataaattataagagtaagcattagaagtttcggtaggtggccatttttctgtggttttataaaaaaaagaggcacagggccgggtgtggtggctcacacctgtaatctcagcagtttggaagcctgaggtgggcagatcacttgaggtcaggagttcgagaccagcctggccagcatggcaaaaccccatctctaccaaaaatacaaaacttggccaggcgtggtggcacatgccagtaatcctagctactcaggaggctgaggtgggagaatctcttgaacccaggaggtggaggttgtagtgagccgatatcgcgccactacactgcagcctgggcaacagagcgagactctgtctccaaaaaaatatattgaaaactagaaaagaggcacaaataatggaacacacaaggtcaaatcatcacctttgaccttggaaaacattcctgctctgcaagacttcacgagactgactgtcactcggggtagtctatcaagatttgggatccagcgggggaagtgggtttggtttacagtagattttcttgtcagcagtcaacacattcagcgatgcttgctggggaatcttgctggctagaccttcacaaccttttgcaatggtgggccaaaacccatgactccagttctttaccttttttttttttttttttttcaggaaaagaagatttttcagatcccctggatgcatgcggctagacatgggtgggatgtggaaaaagatgcaccactctttagaaactgggcaatccatacaggtactaaaactccctgcggcgtttatagaggaaggcactcttgcttagttttgtttttattacacataaaatagcctggcttatgacctcatgaagatggctctgaaaaacctgtgacttgtccctaggcacatccaggacacatggggtacaaactgcagccctcagaagtaatgctcccctcatcccatacactcttagtccttcaatttcctataaatgtggtattctaagaagttccctaggtgttaccggggaatagaaactcagttgttctgatgctataaactttggtcaaatttatctcccccccaaaaaggtagtcagaaatacctgtatttattacaacctttacgtagggagctgtttacaggaatggactttgttggagcgtcagatgaaaaagaggcactcagcttccctctgcctgttgactttgcagcctctcagtcttctgtatttttcttacgctgatgctccattcttccagcatttatagtttcctcaagctgttcagtagaaccagggtgaccaacttgtcccagtttgactggaactgttcaggttttaaaaacaaaattcccacatcccaagaactttctcacccccaggtacaccaggacgattggtcactggaggtatagcatggagtgaaaaggtttccttatactgcctgaccagcaatactgtgtttccagaaattccttcctctgtatctaatgttttctctctttttcttaatctttgtctcttttgttaggaaagcatcaaccaggagtagataaacctgatcccaaaacatggaaggcgaatttcagatgcgccatgaattccttgcctgatattgaagaagtcaaggataaaagcataaagaaaggaaataatgccttcagggtctaccgaatgctgcccctatcagaacggccttctaagaaaggtaaaggcatttacagactaaaataaggtaaatcaatttgtgtcatcgtgccttcgtgatctcttcatttctacatctgcagtcagtttgcaggtagaatagcctgttcatgctgtaggggatcattccgcccctacctggcttggaaacaagactttcgattcaccaaaggcagtgaaagatacatgtggaattttgaccatgtacagattaaagcaacaggttcattgagagtttcagaaagaatttaatttgagggaaatgtttctctggaggcccttcgtgaattaatccaaaactacatttttgttgccacaggaaagaaaccaaagacagaaaaagaagacaaagttaagcacatcaaggtaatcttgggtgattcagagagaaagccaaagttgggatcctattaatgactcatattctgccttgtaaagatgagtcacaggacctcagtgtgtcctctttcttcctttgcttgtgtcttctgtgctttacatgtttgctcttcagcatgtatccacttgcagacatggaggtacacagggccctgcctcatcccgtttctctgggaaatttatgaatgaagtcacagattctcactgtgctcggcaggctgaggcctccatctggccaccacagccgttgccagtggtcattttgtgccagctaaactccacaacagcttatgtctcatactattaagtatattttcaggctattaagtatactttaatatgtattaaatgttatagacctctatacgatgtatgaactctatgttacagacattccgtcacaggcccttcggtgggggacagagtggtcaatgtcagcactctatcagcacagctctcaatggctgccttctgtccactgtagaatcatctctcacaccccacaagggttttccatgggatgtgcatgtgtgtgtcagcttctcactaggctgtgtcgtctgaactcccctacagtctgaggatctttatgcatagattaggtggcccttgttaaatagtaagagaagagccgaatatgccctgcaaaactggggacgagcttcagtggctgagcagagagcatacactgcggtcacagacccagggatctcagagagattgtcgagctccctggcctccctttgcagatgaagaaatttaggcggagggtgtttttgcagtgatgctttcagtttcacttttactagtttttatttttaactaaatttaaatattgtactgtattaaaggcctaattttgttttaacttttcattgtggaaagattttatgcacataggaaggagacagttgagtaaaatttaccccataggccatcattcagattaattttaaccttaatcagctcctggccagttttgcttcatcaatagcccctcccatttcctgacttctaacatgaaattgcagcccttcaaccatttttgacttacagaagtaatttatttatttaattttttttaaactgagatggagttttgctctattggcacaggctggagtgcaatggcgcgatcttggctcattgcaacctccgcctcctgggttcaagcgattctcctgcctcaacctcccgagtagctgagactacaaacacgtgccaccatgcccagctaatttttgtatttttagtagagatggggtttcaccatgttggacaggctggtcttgaactcctgaccttaagtgattcgcccacctcagtctcccaaagtgctgggaatacaggcgtgagccacggcactcggccccaaaacaattttttatagttcagctttttttttgaactattttttggaatttgaagcaaattccaaacctcatagcatttcttccataatagttcagtatatatatttaaaagataagtgctctgtaaaaataccatgatgtcattactgtacctgaaaaagttcacagtaatttctcaatatcagtgaatatccagccagtggtcagagtttcagttgtttcatacatgttataacattcgtgtagtttgttacttaaattaagacccatataaaatccacatgtgatttttgaatgtcttttaagtattttttaaggatatatgtttctcctatattacctcttaaaacatttttttttttttacaattgaacaaacctagttgttagccatatcgtttctcacagttttttttttcgttttttttttttttgttttttttttgagacaaggtcttactctgtcacccaggctggagtgaagtgacgcgatcatagctcactgcagccccaacctcccgggctcaggtgatcctcccacctcagcctccctctagtagttgggtctacaggtgtgtgccaccaagcatggataatttaaaaaaattttcttttatagaggtgaggtttcattctgttgcccaggctggtctcaaactcctggcctcaagtaatcctcttgcctcggcttcccaaaatgttggaattacaagtgtgagcctggctgagtttgtatttttaaggcctacgttttgattcatgttatttagtcagaaaagcacagctttctcacacatgtgtgagaatttgctacaatttcaagtgtgactgaatcgtatttactactcttttcccattatctagctcagtgcctggcccagaacagatcactaatacgtatttgataactgaatagatgcatccgcatttgttgactaaatagatgtataaataagtaggatatgtggggtgggagtgaggggttttccattaggatgcagatttaatttcataatcgcagttaatggagaaataagaacggagtaacagatgttgccttttcagcacactttgctcacatgtacccactgtattccatcgaacgccagatgccaatgatgctaagatgcactgttattttatgtatctcttagaaaaactgcttgcaatgaaaccatgacacgtaatggattgaaaggcatgtcctctttcagggatgtggcaatgcgaggaaatgtacatcttagtagttcatgccatgtggtggtcccgtttgtctgggatctctacagccacatgggcactggtggtgtcttcacatggccctgaaatgagcaagttgtggaaggcacggtcctgggtgggcttgaccatcctggcccagggaagtaagtgagagatcccgttaggtgcagccgtgtgggtcaagagccacctcagccaagtgtgttttatgaaatccttgtgccgtgaagatatgattcatacctgaaacttttttcttgaaaggacctgattccttcagcggaaggcaggtgattcattaggcctaaacacagccttacttttgaatttagatctacttgcattgtgctttccagtgtagcagggaagctcagaagaggccagtgggcttcccgagttctgtgcttcctggctgttcaagctattgtgtggactcagtgtctctgtagagtgtttgaaaagtgaactccctagggcgtctggaattggaaagtcagaggacaattactagctattaatatattactttttaattgtgtatcaaaacacccaagcactgagttaatatatcctgtgcaaatatactaaacctacttagtctatccaaatatgtaactggatacactacgtaggtttcttctactgaggaaatttgtctttcatatggtaactaggtatgaatatttgctgttgaagcaagcttttcccaatcttcaagttgaagttttaattagcaaacaatgtttacaacatgtaggccaagtattagaattttcttggggtcactcatgatttatctccatgctatatgtcccccaacaaatagtctccccaagactggaacacccaaggcccattggccatgtggcaggtgcagaaacggcctcagcatcctctgacatttcgctttgtgagcatatccctacaaactcagtcagccatgttttccttgagctaagccccacctgtgcggcggtaactggttatctaaggaaataagaacaagaaaaacagctgggtacagtggtacatgcctgtcccagctactcaggaggctgaggtgtaggaggatggcttgagcccaggagtttgaggctgcagtgagccgtgattgcaccactgcgctccagcctgggcaacagagcaggaccccttccccacctcaaaaaagaaagaaaaacaataatgagaaatcctggattctacatcatcagtgcatgtatatgtttcagaaaatatcatggaacggtttgctctgagacttcagacaaggccaagaacagtaagaatagaagtagttaaaacagaggggtgctagttgatatttttgagctgattccaagttcccagctatgatttttgtctcactgagttctccctgtgatgggcaggtcatttcccttttatacatttaggaaatgggtgcacagagaagctgattcattttcccaaggctgcattgctttacagagctgagatttgaatccaagtttgtccaccgggtgcctcgtagcctttggggcctaagccaggccttgaggggtggacagggtcaaactggtccttccgcagcactaggggcatcaggaatgaaggcctggagattacagttggtttgtctttcctggatgagacaggaaactggcttaattagagcaggagtttgtgtgagagggcaatgggaaatacaggcatgtaggtggggcgaatagaaatgggtacttcctgcttcggagggttgtttgcagctgaaacatacatgcttgaaactgtaaagtgcttccggatcaaagtgttagtgttatgaaggagacagaattgggaagggctgccaaagtcgcttggaaaagattaggcctggtctgtattcgttctgagcacagacctatgggtagaagttacagaaaagcagataggggttcggctgctctttctcatagagctgttggctctaacagtgacctgagctggattaaaacacagcacactccctggcagggctgctactggagtgatcccttcactagttggaagaggtcttcagtttttaaactttaatcaaatgaaagcacacaccagcaactcacttgaaaaacagataagatgagagatgccctgggtgaagcaggttatcaggcttattctgcctgcccgggatcctcccttcccatgtggtagctcagaacgggagctccgaacccagttggaagagcttgagggacagttttacggaatgagacacagttgaactccttgtagcacacttagagcaggcgggaattgatatgtaagggaggcctttctcaccgggatgggaaggagtgggaggcaggagagactgctgtggaaaggcagtagctggtgccactggcatggagggaggagacatttctccagaaagtggaagagggtacggaggatgcagataagagcggcctaaagaggaggccccggcgttttgcaccttcagaagcgagtgttgggaatgcaggtcgttttgtggagagggtgtttcgctttggacatgctgcctttgaagtgacagagagccctgaaggtaaatgccagctagaaagttggagggtacagcacttgagtgagtgcccaacgggcagatgtgtggtcatttacttgagaatggcgttggtagctttggaaactgatgccttctctaagagatgcagacaaaggcccgcagagaagatgcagagaaaagtgagctaagggaaaaagtcaagagggaagctgcagtgagagaagggaggaagagaatgacgatggcctcattccaagcaaggagcagaaggaaggtggttctgggaccgggcaggaggccccagcctgtcttacgagagcttctgttgtcagtggcattgcgcctctgtgctgggtgtgtgcactcgccaaggtccagttccctgacctgctagtgaagtccagctgtcagcctacacgttctgttagcagagacttagagatgtccttaaatttgatgtccttaaatctggcttcaaagagactggctttgcacagatgagttagagcattttggaaggtgggaggtgggctggaggcccattaaatgggacttcagggacaaggggcattagcacagggttgagacagcatgggctcggagcagaggggagtccctctgctgtcctctaactctggtctgtccccaagcccattcagcaagtgtagcttcaagaccagctaaaggtgtattattttacaggtctaaagaagtgtgctcctgcccctgaactctctcttgtgccagtttgcttttgcttaaaatcccttaaaccagagaccaaaccttggattctgtaattatagcaaaggttcttgagcgtcaatgtttggcggagttcatgcacccacgtagatcaatccttggattctacaattagagcaaagatttttgaacataaatgtttgctggagttcatgcaccgtggagaagtctggacccaagcagagtcttttttttttttttttttttttttaatctttggagcaaggggagaaaattaaaagccaagaaagctatgggttacttgatttacagaagagcctctatctaaagtgagaaagggagcagacagaggggatgtgaatcctgaccaggattaaccgggccaggttatggtgcagcaaagcaggagttgagccagggcaggagtggggcatcgggggtccaggagaggcttcgggcgaagagtgttcagggcctgcaggatctctgtgtttattttacatagagaactccacaccccttttcttcatttgagatccttggatttttaatataccttagatttagatattcctacttctaatcatttcaaaaattgtgacccagtttagtgaagatccttctctcctgggcctgttctgcaccctggatggaggtgtttcgggaggtgctggctccgttttactgtgccattgactgtactgtctgtccagagtgacggtgtcagtgagatgattggcactgatggctctgaaatgacagggtttcttttgaagtggggtgaggggagtaacacagtgtttggaatagtctctcctagcctccatcggtggaatatatgatgccattatagaagtggtcagtgcaggatacagggtaagaatggagagagtagaaggctgggcatggtggctcatgcctgtaatcccagcactttgggaggccgaggtgggcagatcacctgaggtcaggggttcgagaccagcctggccaacatggtgaaaccccatctctactaaaaatacaaaaaattagcccggcatggtggcaggcacctgtaatcccagctacttgggaggctgaggcaggagaatctcttgaacccgggaggtggaggttgcagtgagccaagatcacgccattgcactctagcctgggtgatagtgtgacaccccatgtcaaaaaaaaaaaaaaaagtgtggagagagagtagaacagtgttcaaaagagtgtctcagtctccgctggaattagggcaggatacaagggcttcttaagacagaaagctcctggaattgaaccatatttcgtgaccaaagacagagttcagttccggtgtctctgcaggctaaaagtagcgtgatcttggaaaattaatttagtctctgagtcatcgttttctcaagtgataaaagtatcacttgtcactaattaaactgtagatcatgtgtaacacttagaggtcttcaatggagaaatcagaattaatttagctttttaaatatatgcaagcctgactgcctcattacttttataagaaacctagaaacagaatgactaaaaaaataaggtcagacagcaaaggaagcccatacaaatgagcagttctcttgtaacttcttcagaggcctgtgcttagttctttttgagggagttgaagagatggaggtggactagtgaaaggtggggcatgactcggggtggggaaactgaccaggggtcattgaggacgccattgagaaaggaggctgctgttggagaggtggagaattgcagcagtgtcagacagttcaggccgccatggagggacagcatggtccatcagaggtcagcatatggggctgggggaagggatttgagaaaaggccattggatttgggagagcacagttttgttggtgacctttggtaatggtgagtgcttatttactagtaagtgccatgtacgtagttagctcatttaatcttcaccttatccctatgacgtgggtcctattattgtcctcagtttacaactgtccgcagtgccctagggtggcttacagaggttaaataaggagctgcagccagtgaggagtggaggtgccaggctttgctccaggcccttctgattccaaagcccgagctctcaagacccttctgggagcttgattctgcaggtggagaggaagcgagaccacaggaactaatgggggcccaggtggagaggcgaagtccggaaaggcagacagcgggtcggaagtttggttgtgaaggaagggaaaacctgctgactcacccaggtcacaggcaagtgggttttttttgttttttgttttttgttttcagaaggggcagactttttttttttttgtctttaagaatcaggctctcgctctgtcacccaggctggagtgcagtgacatgatcatagctcattgcatccttgaactcccgggctcaggagagcctcccaacaccgcagcctcccaagtatccaggacaagaggcgtgcaccaccacacccggctaatgctttcattttttgtagagacagggtcttgctatgttgcccaggctggtctcgaactcctgggctgaaacgatcctgcagcctcagcctcccaaagtgctgagattccagggtgagccaccgtgcttggcccaagaaaaggcagacttcttatttagaacttgtaagagagaagagtgcaagatgctgggggagaaaggagtaaaaatcgtgcctggtagggatggatattctgggcctgcccttacgctggaccttcgggacatctggtaaaccaggcagtgtatggtttgtttaaaaaccgagctatacagtggagtgatgcctttgaagtcatgttattaaggtgggagtttgccaggtgggattatgaaggaggaggttatttcccctccttccgttagtgactttttgaggattttggggggattgattccaagtagtgtataaataagctgatgagaacacccaccatgtttcagagccgaccactgttgacttttccaagcacagtcacgtctacttgcatgatcctctgcttccagtcctgtgttccttctgctctctaccctcttccgctttggattccttgggtgttgtcctgtgtggcttttgtctgacttgattgctatcgtagcagcagatgcaaacttaccttgagagctgaacgtccacaggcacctcagggctggcttttgcagagctgtttagtacaagggagtggagggttctggtgcacttgaaaaaaaagcacacatttagagctccaataagggaaaggaatttgttctcattatttcattagtgtgcacgtgcagaattcttgggctggatgagatattcagccacctgaagggcatttatgtaaagcccatggtgtggggttgcccggctggactcaggccagggtgatcagccagccatccaatgcagggcctcaggtggccagaggccatggcaaaacttatctgcagagaattcatctacaatgtcctctgggctcctgttcttgggccagtcactgaggcagagcttttcctaagaaataattatgaaagaggtagcatgattcctccctggtgaaagccaggcattgattcttttgagcaccccctcagaggaggagagtgtagaatccacgcagtgcagcattttacagagacaatgatgcagctctgcgtagccccaaagctattgtctgcaggtggaagcatttcctaaaggcaagccagatgggccggtaccgtttccttgaaggaaaatggaaggagctgaatacccagcagtgcaccctgggcagaaatgtgctttaaaacaggccagtttaaagaagcaggggatgaatgtattcggcagctgaacatgaatgaccctagcattaaagaaagtaggcagagggtagaatttcagctaagagaagggaggggaaaggaagtgttctcaattcttttttcttttcttcttcctagcaagaaccagttgagtcatctctggggcttagtaatggagtaagtgatctttctcctgagtatgcggtcctgacttcaactataaaaaatgaagtggatagtacggtgaacatcataggtaaactgttttgacgtctcattttttatacataccagcagccccctggggcctaaaatttgtaaaacagagaacttcaaataacatagtcagtgggaggaggtcttggaatcatctcagaatgcaagttccagcccccagatttcaaggctgagaaacgaaggcttttgaggatcagataaaggaacttagacgggtcagcctccgtggaagaaggctggggtgacctcccaggaaaaatgtttgtttcccggcggcttgtggctagcgatcccagtctttcactatttggttcacgtgggcaaaagagtatttatttaactcgggaaccaaggagagggaagatggtcctcgcgagtcctctcagcaactgcttcctggcagacagagaaactgaggcacagagacatgttgccaaagggcccactctgattcagcagatatttttgagcaccttctgtatatcagactcagtactaggagcaggaaatagacggaggaggcccaatttcttttctcatggagggacagagatagtaaacaaagacacccccagataactgcagtgttaccatgtgtggtaaatactgcaaaagaaaagaaaggcgagagaaaaatcaaggcaccaaatttagattggaggtctcagaggagcagtgttttccctccttcgtaacagttgaacaacttccagatgtagctagctgcaccccctgtaaagatgcaggctctttacaatgaagacacatcttctgatgttccttctctcctgtatggccagatgcacaggaatagtgcccaaaagacctcagcctgctttccctttaaggggaaggagaagaaaaaactcctttttatttttactttctttcagcattgaatttttgttgtgtgtatggtgacttctgtttttgggaaacggaagaagccagcagcatgctgaattgtcctgacaggcctccgctggcctcttgccgaggttagcagtgctttttttgtatttaaaccatctcccgggcagtgtaaaaagtttgcaggtgcggacattctgtctgactggtctcggcagtgctctataaccctgttgtgtttcttgataaaacacagccccaccctttaataaagcaaagattgctatgaaaccagagagtctattcattactgtggagtaactagagcagtctgtagtgactagacatacggcaattaggaagtcatggagttgggatttttgtcttaattttggctgctcaaagtgccccctgtaggatattcttttttcgggaattgtttccaaacttgcctgtctttatctatggtgaaactcaagccgctttttaaggcaagcctgcaaacccaagtatcaacatgggctcctgaaggcacaggagagcagattcacagcttactgaccagtgttagggtccccacgagggccacccatttgaactcaaggttggcagactctggccccagcacttgccgtggtttcaggatggccagcggtgacacagggctatggaaccctgggtcttcatctcttcccatatcctttgtttcaccttctttttgccatattttattgtgcttcagatagaaattttatttataagataaaaagtagctctgaggctgggcacggtggctcatgcctgtaatcccagcactttgggaggccgaggtgggtggttcacgagctcagcagatcaagaccatcctggccaatatggtgaaaccctgtctctactaaaaatacaaaaattagctgggcgtggtggcaggtgcctgtagtcccagctactcaggaggctgaggcaggagaatcgattgaacccaggaggcggaggttgcagtgagcctagatggcaccactgcgctccagcctgggtgacagagggagactgcctcaaaaaaaaaaaaaaaaagataaaaagtagctctgggtgagtctttagatggaaggcaccacctcttaggagatcacccatgctgtcagctgtgcccatgccttcttcctggaagctgagttgttcaccccttaggagaaggggcctgagacaaggcattcgattttatccacacccctagaatgctcttagcaagatgaaactccatatgagatgtgaacccttacatcgcaatatgcccagacacagaacccacaacaacatactttattcttggctgtattggacctggagcacctgggcactgaggtgagactgtggggccactcctcagtcaccaggtgccaaccgagagacctgggcagtggagttgggctgctgtgttttcagccttaagaagtttttatttactcaagaaagctgtcatctttttgtgaggctatatattattttctccttccctctctccctggctgccgctgcctcgtttataattagctgtcagctcctcctatcttccctcaccgtacttctcaagtccatccccttgtttctgacactgtgtgtgggcctgccttggctgtcacctgggctctgcttccattctgctccccatttcttcttctcacaaaataaagaatgccagtgtcatcatgtcaccactgcccctaagagaaggagctgagttcccccaggtccccggggtctggcatgatctaggccctgcccactgctttcatacctgtctttgaacttgaattactctgaacgagttaagctccctgtggctgctcatagagacagtgaggttggtggtgggtctccttatggtggagcagctgcaaaggctttgtccacagggcacagtgaggggtggacacgtggcagttccagcaggaggtatagctccagcccaacacgtctcatccacacttccgctcccagatcattgacccttgagacactggttacctctactgagttttgttttgttttgttttgtttttgagaccgagtttcactctgttgcccaggctggagtgcagtggcacaatctcggctcactgcaacctccgcctcctgggttcaagcgattctcctgcctcagcctcccaagtagctgggattacagggatgcgccaccatgcctgggtaattttttttgtatttagtagagatggagtttcaccatgttggtcaggctggtcttgaactgctgacctcaaatgatccacctacctcggtctcccaaagtgctgggattacaggtgtgagccaccgcgcctggcctctactgagtttttactgggatacatcctgtgcttcccttcgtgtagtagcctgagatgctgttttctcacggggtgcaaggtgcacgctgccctgtcccactcttgcctcctcctgcactctgtcaccctggtgaggtgtatgcagcctgtagtcagggacagcctggcccaggcacctacagatccctgtctcggagtcaccggccccgcggtgaccttctctcccaccatggctctcgagtgcctaaaccaaatcatggctgtattttataccgaaagagcacgagattagaagtcaaaaggcgtgggttctagacctgcttctgaagttttttatttaccatgtgattttgggcaaactccttaatcttttgaaattcaatttctatatagattggaaacaatatataattatttataaaatggaaatatttaaaattatatagaaaatggaaataatcgtactgatcctgcccatctcgcagagttattgtgaggatgaagtgaaatgtacagataaatcactctggggctagaagggggtaaaatgatatgattatcatattaccaaaatcatattaaaatatatttgattaagaaaagtagcctccatctgtgccatgtcatcaaggctggtgtgaagtttaactcctgaaactttcagaggggtcaggggaaatttccctgcatgatgctctgctgatggcctgattttttatgcctgctagtaagtttcattcttgactctgcagctacatgggtgaccttagcaatttacctgagctctgggtttcagcttttttcaactgtaaaatggtaggaccaaaccacctccaaggacccctctgtttctaataatctgcttttaagcactttctctgaggcatgggagcaagttgctttctcaggtggagacctacattaagtcaacaattgctaataaagtgagaatgaccttttaaagaagcaaaccggttcatcagtaaccagccataaataatattgttataattctcagcaactagattcagataaaattgcattcctgtgggtgactcttttcagatgtgctgactttaataaactggagaaacttagtggatttctagttcttctgtttgagaatttccctggcacacaatagataactgttgaaaagaaatgtcactattagttctgagcctggagactcactaaggtgagattcaaaagtttttatcctgagaggggctaagaaagccctcagtaactcagtttggacttcattaactctctctgttagggagagcatattataaagagttgaaatttggagttgggtaaggctaacattgaatcccggttctgctgctgattgtctgtctgaccttgaattagtcatgtagttctgtcttgtatggttgtttcagcatgtctagaatggggatcactattgtgccttcctcatgggttgtgaggtcttgggaggtggtagggagaggcaaagatcagtgctcagaaagtcaggttttgtcattattcagtcaggacactctttggtacccagaggagtgccacttctgactgtttactgtagcaggtaagtttgttattcctgtcttttcacctgtcaggagtcagtgttgctgtctgttttgccgcttggtggtccagggaaatcagttcacatgtcgagagagagagagagaaacagatagagactggttagtgagagtgttgatgctcatctgagagcatttcgatattgggatttccctgcttctctcatgggctttcactcgagagctggaaagtttctaaagtacccacgatgtctggatggagagaagccattgtcccttaccagggcataaagcaacacactcctatgggggaatttggcctgagagataacgtaattatattaacttggtatccagatcatagcccagaaaacagactgacttttctctcctggtcagccgcattcaggatacacctaaaatctgcatggacgtgcttatctacttttttccccaagtcatgtatattaagtgaaatacggtaaaattcaccccttttaaggcacacggtcctataaatgttgacagacgcactcagtgatgtaactaccaccatagtcaagacagaacattttcatcaccccaacacgtttcctccctggccccagccctcgcacccacagccggctgtctttatcacttcccaaaggtttcaagagtccacttgtcagaagtcttgacatttttctagaaaacattaattgtcacgtcccgtatttgcagattgtcacaatcccctgcaggactccactctggctccagtcagtgagcctcggccccatcacatgtccatttattcaggggagagtccctgagcgcctctccggtgggagttgtgagcatgtgtcatgactggacacaaaaagttcatactttggttgaggagagatgccattgaccaactcaaagctccatacgggtatatagcgttaaccagcaacttgaggtcagaagtgtcacaaggtcgcggcccatcgtagtttcggccgagtgacggggacagtgagtgagaggcacccaggggagagaggccagtctgtgctggcgggtcaggaaggggctccagaagtcaggggcatggtgaatgctgcctgttgctcaacccccactcctgtgccactacctcattgaagcctttgattcctcaaactggaaaaaacaccccacttctctagcttccattgtatggcccccttctttttcttttctttcttttcagtgctcacggccttaaactgactctctagatggttagtcgctggcctatagccatgtatatgaacttcttacaaaccggatccttgactgcatcgatcttccgctgctccttctagccctgggaggctgggaggtgcaagcaggtgttccataaatctctgttagttgaataaccgactaggacgtcatggggagaagcagtgagagaaagaattcctggttggaacaaagggatctgactagggggatacttgagctgctgccattgtttgtagtcccagctggcttgccctctttctgttaggagcaacgtgcaaaggagagatgagttttgaaatattggaagttaaaatggcttcgacttaagtcacatttatctaagaccttcactgccttagtatgcaaggtatcgctgcgccctccctcctcaaactctcacaccccatttggtttctacctccacccaccagctgcttcttaggacttaggatagggcaggccattatcttgttttcctgccattttattttacttggctggaagaggcagaggaaactagagagaggttggtgtaggtcagcgtcagtctgtgtctagtgacctgcataattgatgtcctcaccctcacgtaggataatccaaaggatgaaataaatgggcttgggagtctgcctgccatatatagcctgcctgccttttctttaattttatccccaccaggaaaacctaaacaggatccggtttcccttccattctgtatgctgtggcttttggactcttgtatcacagccccaaatcccctttctgagcctcttttgtgcctttcctttctttattaaagaacctatgaattgccactgccctctaaaaccttccctgcgtagaaatcagataatgtgcttgtcactccacagacagcaattaaaacaggaacctgtttataaacaaaaatacttcagaaaataaaatacttggagtgattaaaacgagcctctccatgacgcctggcgtctcaaggagactggaatgcgttctaacctgaatactttgccgattggtgagaaaatgactgcaacatagagcaccacatatactccaagctgtgcgagtctggacaagtcactctccctctctgtgcctgagtttcttcatctataacaggataacgatgctttctctgtcatccttatgggttaaaatgttaaaataacagatacaggtatgagtaaaacgttgatgatggtggcaaagtgctttgaggaccttgggaattatttcttcacctttatttattgaagctaattttcagggacatttcatccaactaacagtggtatgaggtcagtttcattcaaaatgagggcaggaccttagggaccttcaaattaaaatggccatgaaacatcatgacttacctatgagaatggccaaaataaataaacagtgatgacacgaaatgctgccgaggctgtggagaaatttgatcactcagacactgctggtgggaatgtaaaatggcacggtcactccgggaagcagtttggcaattttcttgtaaaattaaacatgaaattaccatatgactcagcaattgcattcttgggcatttatcccagagaaatggaaacttatattcatacaaaacctgaacacaaacatccatagcagcattatttgtaatagtcaaaggcttgtagcaactcagacatccttcagaggggagaataaacacactggtacacctataccgtggaatactactcggcaattgaaaaggaaccgatgactgatacacacaacaacttgggtgactctgcggtgaattatgctgagtaaaaaaaaagccagccccaaaagtctactgtatgagtccattaatataacatccttgaaatgaacaaattaatgaaatggggaacagattaatagttgcccaggggtcatggacaaagagatggatggggaggtactgaaggaaggtggctatggttacaaagagtaacgtgagagagattggtcgtgatggaactgtttggtgttttgacagtggtggtaggtacatgaacctttatgtgtgataaaattgcacttagtcctggtgcaggtacacactcacacaaaagagtgcaagtaaaactgaggaaatcggaacaagatgggtggattgttatttatgtcaatactctggttgcgatattgtattctagctttgtagcctataaccattggaagaagttgagtaaaaggcacacaggatctctctgtattatttcttacaactgtatgtgagtttacaatgatctcaaaataaacaatataagaaaaatatttgaggcagttttcagagccagggtggtcagaatccatcttatcagtgttccggggagctgatgctactaatgtttgccagaattggagatctgactctattccattgtgctgatatttcagccagttggacatgttgcctgtagagcaggaagagagctgggagcgtaagcagagcgccacccagctagatggggaccttgggcatttatcccagagaaatggaaacttatgttcatacaaaacctgaacacaaacattcacacagctagatgtgacacaattgggtagattttcatggcccttcctctttagtaaggtttgataatgtctccctggattgtagaacccagaaaataagcacagcgccttcttttggagcaagagcagggagcagaaatcggtcaggttcaaagtactgtcatgtctggccctggggctggggctggatgccgcctctggtcctgtggcctcggctgtgacggggttgactgtggaattctgctgagctggaaaggacatggccaccgtgcgtgccattggcaggcatgctggagatagacctggggagccaagtgctggccggctgctccctgggagacatcacaccagagctacagagctcaggcgtgttcttcagccccatggcaggggacagatggtgatgggagcctggcgacctggctcttttggggaagactctttcttgagaaagtgtgctagaattgtgaggtcagcagactttgcatgatggctgtcttttctttgaagttgtaggacagtcccatctggacagcaacattgagaatcaagagattgtcaccaatccgccagacatttgccaagttgtagaggtgaccactgagagcgacgagcagccggtcagcatgagcgagctctaccctctgcagatctcccccgtgtcttcctatgcaggtaagcgtcagcgggaggctccgggaggcgtgggaaccggccgcgcagtcctttggtctagggtcacccatctcaccaccccacggagcatccctcctctgtcctaggagttattctccctggagtttttcatactttaattatcttgatcaacatcttcttggacacttttgttctcaggtagaggacaggatcacagcatttctttactcagttggccatgacattttttatttatttatttatttattttttttttgagacagagtctcgctctgtctcccaggctggagtgcagtgggatgatctcggctcactgtaacctccgcctcccaggttcaagagattcttctgcctcagcctcctgagtagctgggattacaggcgcacaccaccatgccagctaatttttgtatttttagtagagacggggattcaccatgttggccaggctggtctcgagctcctgacgtcaggtgatccgcccaccttggcctcccaaagtgctggaattacaggtgtgacccacagtgcctggcctcccataacatttttatatatggttacagataagatttctttagggcagtagttcatcagagtctaatttattagcccaagttattagaaatttggcagagtgttttaatggattctcagtttgagcaggctggataggaccttagagatgatctcttcctgttccttcatttctgaaagggaaggggcttgcgcagggtcgtacagtcagcaagtgtttgggccaggacttgacctcagccttcagaccccaagctcattgctagatccattccatccaccaagcgtacttgtcctttccacatattttctctttctttttatatctagtacaggttctaattaggccagatgactgagccatttccaattctccagggacttggctacataatgacaggagttggcccaggcagagtcacagggggaggaacagatccagttggttcttccattcttccagagtaaaaggatggctcctctcgttcgccaacattacttcatcttctcctctcttcctgatgatctccattgaattttgtggaaatcaattgtaattaggaaatataaattctgagtcagtgttactgcttgcagatattaaaaataaaaagcagagtccccatcctgggaaactgcagttcagctctagcaaatagttcagggattcttccctgtgctctttacacgctgccaaatgggatgtcctccagtaggtgccacccccaacactggctccgaccagcgttggaattagagttgactcaaaggactgttgtttgtgaattatcagccactaagtctaatctcattttccctgaatgccaactttcttttttttttcacttttaaaaattgtggtaaaatacattaacataaaatttaccattttagccatttttaggtgcacagtttagtagcattcagtgcattaatgttgtcgcagccatcaccagcatccacctccagaacgtttttcatcttgcgaaactgaaactctgtctgcattaaacactaagtcctcttttccctcctccaccccagcccctggcaacctcctgcctattttctatctcagtgaatttggctattctaggtacctcctatgagtggaatcatagtgcttgttgttttgtgactggcttatttcacttagcataggtcctagtgtgcatttatgctaggagcgtaagtggaatgtgagaatagaccttggccacaggaagattataatctgtcaaacaggataagcttgtcatcggtgctttattcagcaaatgcgttttggactcttacacgtgccagtccctgtttggtccttgccagagtgcagtcacaagaactactatgttttgcaaatttattgtgccctgggaaccatgctcagtgcttgggtacagttgactgttgttgttgttgtttgttgttgttgttaatagaaatagggttctgccttgctgcccaggttggtctagaactcctgggctcaagtgatctgctcgcctcagcctcccaaagtgctgggattacgggcatgagctgccatgcctggtatgatacagttgacttgtttaattataattagagtaaccctgtcagcctgggtatcgtcatcatcccgtttttaaaagtgaggaatctggctgggtgtggtggctcacgtctgtaatccctgcactggaaggctgaagtgggaggatcacttgagcccggaaattggagaccagcctgggcaacatagtgagaccacacttctacaaaaaataaaaaaagttaaccgggtgtggtggcatgtgcccgtagtcccagccacttggaaggctgaggcaggagcatccccttgagcccaggagttcaaggcttcattgagccctggttgcaccattgcactccagcctgggtgacagagcgagatcctgtcttaaaaaaaaaaaaaaagaaaaaaaaatatatatatatggatctgcggctggcgtgggtagagcagcgtgtctgagggaggaacgattgggagcacagctagaacccatgagccgttgatgccaaaggccggtccttaacgcccgccctgtgtcgctgccctggacagcgcacgggctctgccgttcagaacacagccacatcccgtgatctcatttgattttcacaaggacccaccaaaggaggcagagcagaatgtttatgcctaaattttacagtagagctaaccgaagcgtgaaacactcagccactttgcttatatttacatagttatggctaaaaacccatgactttcttctatagcctgctgctgcaggcatcgttacactccatgtggttttctttctctcttctttttttagggggttggagctttagaatagacttctatgtttatctgttgagtaagacttttctgaggtcttcttggggattctggaaagacctcttcttgctgttctgccagcagtggcatttgctcaagcaaaagattccggagaacagcagatccatgcagagagaaatgaacatttcattactctcttcaggacatttgcataggtttgaaaggaaggatttcagtgccaggatggcagtcaacaggaggttttgctggagcctggcttttcagcctggcctttggttctttccgttgttttcattgtctggattctccagaacctcgtggagggaggcttactggttggaggcaaaatgttccatcgctgctgatgttctagagctcacagtgatgtaaaacatttccctgctactgactgtagctaattttagttcctccgtcagaaattgtataacatgctgtcaggaaaggcagctttctgcgtgtattcacctttcttgctttatgttctccagtagagtcggccatttgcctgtttttcatgatggagttcctttgtttgggctgttcatctgaatttcaatctcctctgaccacctttttttttttttttttttttttgagacggagtctcgctctgtcgcccaggctggagtgcagtggtgcgatctcggctcactgcaagctccacctcccgggttcacgccattctcctgcctcagcctcccgagtagctgggactacaggcacccacaaccaagcccggctaattttttttgtatttttagtagagacggggtttcaccgtgttagccaggatggtctcgatctcctgacctcgtgatccacccgcttcggcctcccaaagtgctgggattccaggcgtgagccaccgcgcccggcatgctctgaccacctttattcatctgtttgggaaactggtatttggaggctgctgtttgctagtttttccccctactgatcgttgaatcataatcccagtagtatattacaaaaccacattcagttttgcaagtctgtcttctcctctgtggtctaaatattatgatgagaaagagaagagatagtacttgcgttggatgttttaagacaacataaaattctagtgtgatttgtgaaactttcatactagggagggacatttcaaagtgccactttgggaagctctggcggagagacatgtcatgtttaaaggtgcattacaaagtgaccccttgcctgatctgtggcatcagaattttattaggtggttgatggtttagtagaagaaaaccacagtagaataatggggtgggggaggatgggtaagaggggctggagagtagactcgagaagaaaacatcatctgaaggactcactggctataatgagagagtggagatcgcctgctgaccagcagccatcagtaaaggctttgaatccttcgggaaaccacaccaggcttgcattttgttgggcagagcaaagacacaatcgctttgagattaagaggattccgatttgaaaataatttactcctggtgaaagtaattgagaatatgatcaatagaaagaaattcaaatcaaacttgctgaacaagagccttccagaaagtgtagcagaatgtcagagtgcaaaaagcctttcaggtgaaaatgcatcctctcccttcccgcagtgttcctgcttagacaatatgtatatcctcagcgaggcgttaaaaactggactggatagagagtgaacctacaaccagtgtcaccctagaactggaagagcttttgagatcatctaatccaaatcctccccttccctcccaccctagatgctttcaggaaaactgagaccagaaaggttaagtgaattactcatgtgcctgttggtactgtacgaacaccttcagcttcttcatttgtttggagttgctggagaagcaactccagacttctttattccattgtattcgaagtaagtaataaacaaaaagcaaaaacaaattcaaactaatcaaaagggaaaatgaaatgacaacgtatgttgatagttcgatagtaacactgatctggaggcccagctgcagtcagctcccttgtgtaagaagtcagcgtggaagtggcaatggtggtcaaaccaaggaaacagaggacacggggcgcagtgcatccaacaaagcacttggagccaccgattctggggtcacagagagaactgctcccctcagggggaggttcagggttctctgctcctaagctaaggtactgaaggcccctttttgaaactgtcagtgtcctaatagggcgcatcttcctgacgacttcagatgctgtggaacttaatctagacacgacgctctttaactcgcatttgtgtcagctgaaaacataagttcggagcatgtgtatcttttcttatctgcagctatttccccgaagctgaaaactgggtacttaaaggaagttagcatcccggtcacattcatgggcggtgcaaggtcttacccgggagccttaccccaggatctgacttccagcccctcctgcacctgcgactggggctgtgctggaatcccagcccccaaagcatgcttggttgcgtatctttgtttgtatttggaggggaaaggaaaagaagacagtgatatttatggagagtcattaggagtgaagagcatctgaacccgtatgaaaggaagagaaagcttggctttggagcacaaagaaagctaagcataaaatggaaagcggatcttgaaatgttgtcagagaccagaacaccagggaagcagggctgctgtgtgcagtgcacaggccctggaatcagaagtacagttttgttttctctcctctgtgctgtctcagttggcaactttggcaagtttctcaacatctctgttcctcatttttcttcttgggagtggctgttccgattcctgcctcctcaggatactgagccagcacgagggttctctgaggaggggaattttctttttctgttggttttcatgtgtttctgcgtggaaacaattcttgtgctcggcaacgtcagctcatcttcatagctgggatcgtcgtcagctgaggctgagggcttctctgggtctctgtggctcccagcacggggtgttttggggaaacatgcccagtccgaggagtggagagatctgtcttctgcatgctcatggccagcccaccgcgatcactcaggtttgtgtgaagttactggagaacagtggctgagaaacaggcccagagactccaggctgggaccagtggagtccacattcttactttccttgtttaaggaatgcacctgtggcacagtttgtccatttgttcttttgcctttaattgatagagagcctggtctggggctaatgctctcagtggaagaaagggctctgtctgggctggagccatctcatcccagctctgccaccaggaagatgtgagacagaggccagcccctcagcagggaccgggtggaaagctggaaggcactggagcataagagctcttctgcgtaacgggggatgagagcagctgcttgctgacgtgggacccctgtgagacctgcatgcaaagcctctgacatggcactgacccatagggctccctaaatgtttgcttcttttagaacacgagcttcacttttggattttcttgtgttgtgaaatatacgtcacctaaaatttaccatacttttgggtatggggttattaaattcagcattggaactaaataggaggaaaggcagttaaaggttgccatcaggaagagaagctattgcagttactctttaggccttgtctgtaaaacgaatggctcaggctaagtgatctctaaatgcctaaatattgcacaggctctgccctctgtgattgcatttctcaatggttatggacactggaataatcgcacaccattgatattttattttacaaaatcaaaatgtttttacgtttaaaaagctttttataagcataggtcatgtgtaatcactagacttcgattccattaatccagcctgttgtgcaaacccagtgttaagcagtgctgatgtatggagtgtgtgctgtgtgccaggcccttgctaggcctttcccatgtaccctctcactcactctccatgtaatcctcttagatggtggcagtgccctcattttacagaggagaaaactgcagctcagtaaaggtgagaaacttgcccagtgtctcacagctggcaggccaaatggggatggcaactgattggctgccatagccatgcagccacaaacttagtggcttgaagcgacacacatttggatcttacagtttctttgagtcaggaatccaggcgtggcttagctgggtcctctgctgcagagtcttgcaaacctgccatggaggtgttggctacagctgctgtctcatctgaggctcaactggggaagggtccatttccaagctcatgtggttttggcaaaattaagtttcttgcaggttgttggactaagggcctcagtctcttgctggctgttggctggaagcagtccttagttctttgccataggagccttcccaacatggttgcttgctttatcaaggccagcaaggcagagtgtttcctctcccagcaggtttctgagttatgtaacatgatcatggacacaggatcacatccatttcatcccctttgctgtatcttatttgttagaagcagacacattccatccacactcaagggaggcaatcccaaagaaagtgaatccaaggaggtgaggatcatggggagcaccccagatctgtccacctacagtaacccacatggcagatgcaactctagaaatccaggatctaagtcctaaaggggtgagaggtaaaggaaggatctgagtgggatggggataatgtaggaagaccttttggaaacggtcaactctgcactgggaattaaatgaattggttggcatggattgaaagacaggacccatgtgggcattgtggacagagctgcagtgaggagggccccagggaccagcgccccttcctgggaggtagtgcccagtgtatacacagcccggccctggccaagggagcctcctcacagctctcaagcctggtttctccgaagattacagagttgaaattcactctagcttctcccatgtagaatgtttcgctttacaaagggagggaggtgatgcgtttagttactcagtctcctttttataaacactgcctgagcctggggacagcttgagggacaggaatgatggccctgtgtttttctctctgtgaacagaaagcgaaacgactgatagtgtgcccagcgatgaagagagtgccgaggtaagccactgcccagcctgcccacgatgctgccaaggaaaagcctcccgaccagctccgggctttccttgctgctggttatgcacctttcctttagatcacaagcttcactttgggattttcttgtgtggtgaaatatgcatcaccagaatttaccatacttttgggtttggggttataaaattcggcgttggaactgaaaggaggaaagggagttaaatgttaccatcaggtagagaagctgtgatagcaggaaaagggaattgaagtggaggctgggaaatgctgatgctcttaccacttaaacatcctacttcaccggcaaaaatagagcagccttcccagccagaagcagtgaccagtacacgtcacaaaatgctaagcaaaagcctcttccacgtgtgcgtgggttccctcccgctgtgacccgtgcccagagctggttgtgtgccccatctcgattccgagtgggtcccgtcccctctccctcccatagatggggcgtgcacaatggcagaaagtggctggaatggagatggaaagcattcctgctggccacctgctgggggtctgcgcttgagtgaatgagagagagagagggagggagcaagagagagggaagctcatggttgtttgaattagtggtttcccatgtactaaacactttgagaaaaagtgcagggattctgaaaagacagatgtacacgctcccatacaccctggcctgatttcttcaaggttgcagctctagccacttctctgaatgaagccagccctgaggccgctgcttgctgtacaccgtggagctctaagccgcccccatttgaaagcaatcaaggggcattcattgcctgtcactaagttcctcgctgccttttctctgaaaatgcaggttggctcaggttgactgggccagcattgagggaccgagtcgctgtgccacactggccatggtgacctgaaacctatcgaataatcgggccgagccgcagagcacaagggaaccagaaaccaagctgctgccttcttttcctgccttcacagagtagtctggaaagtatttctgggaggtagcaaatgggaattgattttttaaaaaaaaagaaaagggaagaaaaaccattacttggcatatgaatagctgggtgcaatagatttcagttgagggatgtagaggtgctaagcctttgttcattctgcagttcttaagaaactcagctaaagcaccaacacatgggaacgacacatttttcattttaaaattttttttgtgggttgttgttttgagacaaggtctcattctgttgccctggctggagtgcagtggcgcaatcatagctgactgaggccttgacttactgcgctccagtgatcctcccgcctcagcctcccgagttgctggggctaaaggtgtgcaccaccatgcctagctaattcttacgttttgtagagatgaggactcgctacattgcccaggctggtctcaaactcctgaggttaagtgatcctccagcctcagcctcccaaagtgctgggattacaggcatgagccaccacacctggccagtgatgcatttttaaaaagccatccaatagaaggagaaggaaatacatatcttaattactttcttgaaagggacggccacactggcggaagaggaatattgaaggcaaacagtacctcagcaacatggggactcgaggctcctacctgctgcccggcatggcgtccttcgtcacttccaacaaaccggacctccaggtcaccatcaaagaggagagcaatccggtgccttacaacagctcctggcccccttttcaagacctccccctttcttcctccatgaccccagcatccagcagcagtcggccagaccgggagacccgggccagcgtcatcaagaaaacatcggatatcacccaggcccgcgtcaagagctgttaagcctctgactctccgcggtggttgttggggcttcttggctttgttttgttgtttgtttgtattttatttttttctctctgacacctattttagacaaatctaagggaaaaagccttgacaatagaacattgattgctgtgtccaactccagtactggagcttctctttaactcaggactccagcccattggtagacgtgtgtttctagagcctgctggatctcccagggctactcactcaagttcaaggaccaacaagggcagtggaggtgctgcattgcctgcggtcaaggccagcaaggtggagtggatgcctcagaacggacgagataatgtgaactagctggaattttttattcttgtgaatatgtacataggcagcactagcgacattgcagtctgcttctgcaccttatcttaaagcacttacagataggccttcttgtgatcttgctctatctcacagcacactcagcacccccttctctgcccattccccagcctctcttcctatcccatcccatcccatcccatcccatcccatcccgctcttttcctacttttccttccctcaaagcttccattccacatccggaggagaagaaggaaatgaatttctctacagatgtcccattttcagactgctttaaaaaaaatccttctaatctgctatgcttgaatgccacgcggtacaaaggaaaaagtatcatggaaatattatgcaaattcccagatttgaagacaaaaatactctaattctaaccagagcaagcttttttattttttatacaggggaatattttattcaagg

SEQ ID NO: 1298 - DNA, 2223 bp, Homo sapiens
tctccttgttttgctttcgatctggactgttctcaggcaagccggggagtaacttttagttttgctcctgcgattattcaactgacgggctttcatttccatttcacacaccctagcaacacttataccttgcggaattgtattggtagcgtgaaaaaagcacactgagagggcaccatgccggtggaaaggatgcgcatgcgcccgtggctggaggagcagataaactccaacacgatcccggggctcaagtggcttaacaaggaaaagaagatttttcagatcccctggatgcatgcggctagacatgggtgggatgtggaaaaagatgcaccactctttagaaaccgggcaatccatacaggaaagcatcaaccaggagtagataaacctgatcccaaaacatggaaggcgaatttcagatgcgccatgaattccttgcctgatattgaagaagtcaaggataaaagcataaagaaaggaaataatgccttcagggtctaccgaatgctgcccctatcagaacggccttctaagaaaggaaagaaaccaaagacagaaaaagaagacaaagttaagcacatcaagcaagaaccagttgagtcatctctggggcttagtaatggagtaagtgatctttctcctgagtatgcggtcctgacttcaactataaaaaatgaagtggatagtacggtgaacatcatagttgtaggacagtcccatctggacagcaacattgagaatcaagagattgtcaccaatccgccagacatttgccaagttgtagaggtgaccactgagagcgacgagcagccggtcagcatgagcgagctctaccctctgcagatctcccccgtgtcttcctatgcagaaagcgaaacgactgatagtgtgcccagcgatgaagagagtgccgaggggcggccacactggcggaagaggaatattgaaggcaaacagtacctcagcaacatggggactcgaggctcctacctgctgcccggcatggcgtccttcgtcacttccaacaaaccggacctccaggtcaccatcaaagaggagagcaatccggtgccttacaacagctcctggcccccttttcaagacctccccctttcttcctccatgaccccagcatccagcagcagtcggccagaccgggagacccgggccagcgtcatcaagaaaacatcggatatcacccaggcccgcgtcaagagctgttaagcctctgactctccgcggtggttgttggggcttcttggctttgttttgttgtttgtttgtattttatttttttctctctgacacctattttagacaaatctaagggaaaaagccttgacaatagaacattgattgctgtgtccaactccagtacctggagcttctctttaactcaggactccagcccattggtagacgtgtgtttctagagcctgctggatctcccagggctactcactcaagttcaaggaccaacaagggcagtggaggtgctgcattgcctgcggtcaaggccagcaaggtggagtggatgcctcagaacggacgagataatgtgaactagctggaattttttattcttgtgaatatgtacataggcagcactagcgacattgcagtctgcttctgcaccttatcttaaagcacttacagataggccttcttgtgatcttgctctatctcacagcacactcagcacccccttctctgcccattccccagcctctcttcctatcccatcccatcccatcccatcccatcccatcccatcccgctcttttcctacttttccttccctcaaagcttccattccacatccggaggagaagaaggaaatgaatttctctacagatgtcccattttcagactgctttaaaaaaaatccttctaatctgctatgcttgaatgccacgcggtacaaaggaaaaagtatcatggaaatattatgcaaattcccagatttgaagacaaaaatactctaattctaaccagagcaagcttttttattttttatacaggggaatattttattcaaggtaaaattctaaataaaatataattgttttttatcttttctacagcaaatttataattttaagattccttttcttgtttatcagcagttgttattacatccttgtggcacatttttttttaattttgtaaaggtgaaaaaagcttttatgagctcatctagcaatcagattttcctgtgga

SEQ ID NO: 1299 - DNA, 1050 bp, Homo sapiens
atgccggtggaaaggatgcgcatgcgcccgtggctggaggagcagataaactccaacacgatcccggggctcaagtggcttaacaaggaaaagaagatttttcagatcccctggatgcatgcggctagacatgggtgggatgtggaaaaagatgcaccactctttagaaaccgggcaatccatacaggaaagcatcaaccaggagtagataaacctgatcccaaaacatggaaggcgaatttcagatgcgccatgaattccttgcctgatattgaagaagtcaaggataaaagcataaagaaaggaaataatgccttcagggtctaccgaatgctgcccctatcagaacggccttctaagaaaggaaagaaaccaaagacagaaaaagaagacaaagttaagcacatcaagcaagaaccagttgagtcatctctggggcttagtaatggagtaagtgatctttctcctgagtatgcggtcctgacttcaactataaaaaatgaagtggatagtacggtgaacatcatagttgtaggacagtcccatctggacagcaacattgagaatcaagagattgtcaccaatccgccagacatttgccaagttgtagaggtgaccactgagagcgacgagcagccggtcagcatgagcgagctctaccctctgcagatctcccccgtgtcttcctatgcagaaagcgaaacgactgatagtgtgcccagcgatgaagagagtgccgaggggcggccacactggcggaagaggaatattgaaggcaaacagtacctcagcaacatggggactcgaggctcctacctgctgcccggcatggcgtccttcgtcacttccaacaaaccggacctccaggtcaccatcaaagaggagagcaatccggtgccttacaacagctcctggcccccttttcaagacctccccctttcttcctccatgaccccagcatccagcagcagtcggccagaccgggagacccgggccagcgtcatcaagaaaacatcggatatcacccaggcccgcgtcaagagctgttaa

SEQ ID NO: 1300 - DNA, 54355 bp, Mus musculus
  misc_feature (8835)..(10000): n = a, g, c, or t.
  misc_feature (15149)..(15262): n = a, g, c, or t.
  misc_feature (21932)..(21951): n = a, g, c, or t.
  misc_feature (24275)..(24638): n = a, g, c, or t.
  misc_feature (48355)..(48374): n = a, g, c, or t.
  misc_feature (51060)..(54355): n = a, g, c, or t.
gggtgcaggcctagctctgaattcaaggccagcctggtctacagatcgaatttcaggacagcaggggctacatagagaaaaaccaaaaaattaatagtaatggcagaaagatggctttgtgggtaaaggcatttgctttgcaaacctgacagccgagttcaaaacacaggtatggtggaaagagccagctcccaaaagttgttctctgaagctcagcacagcgcagaggtccacacaagcatgcattctctcaaacacagaataaagaataagataaagcttctaaaacggtttctaataatttttgtccacatttggaaaatagcaatttcaaattgtaaccaaaaagcacatcccttctcagtttaccagtggtcctgacgcagatggcttgccatatgaaaatgtgtccatttttagctttctggcattgatgagcgcactgtcgtcttttataatcaattgaagtcatcttcatttttactgtctagtaatttctctaaatggttccgcttaccatgtcaggtccacttgggttactctcagcagacgtgaagaagtaaggctataggcgtctcaaaggcatacagtaatcacactgtcttaccatcagtagacagtaagtggtgtgtggccagcggtccccctccgtccctttcagtcaccctgtctgcctgggtttctagctttgtttttagcagcacccagtcatgctgaagacttgtggtaccattgatctgaagaaatagtatggattatggattgtcattccttattctgcccttgacagacactttgtgtttgttctcctgcagctatagcaaatgtcagatttctctctttaacatttttctttgtgtatggagtgaggatattcatatagaaaagtaagggacaatagtcactatctggatgataatgcaaccctaaagccctttataacataacaaagcttatttttaaaaattgcattaatctctttgtcaggggagatggggcctgcattaccagtgccttggtacaggcatggaggtcagaggacagtttacaggaatgaattctctttctttcatctgggttctagagagcaggttatccatcttggcagcaaacacctcacctaagccatcttgccagctccaaagctaggggttgtattcaagatgtatgtccttttatatctgccagacagtatggtagacactgaggctgccaccgtgactgcacagcctcatctcatgtagcttgcttcatggcagaaggagaagtaacagggcttctccactcgtgatcactcgcaggagctgacatacagcttcctgtcggagcagggaccggcaagggatggagcagcagctgcgccatctcctacttgcagtcggatgcattgcagtttgttgttatacccaggtctatagactttggaatttacttgcatcacacacttataacccatttgtcatatttgttggatattattttcgtgcatacagattttgtacaaaggtgcttaatgttatctgtcttaacaatataaaaattaactaattaagatcaatggcatgtttgggtagcttcaaatgaaaaagaagaaaccatgtaaatgaaatactctcttttcttggaatttgtattttatcatgatttgttgttgttgttgttgttgttgtttatcagaaaatagagtgtgaaagtggagtggaagactgtggtcggtacccctcagtaatagagttcgggaaatacgagatccaaacctggtactcctcgccttacccacaggaatatgcaaggtaggggcggagcctggcggctgtgtgggaaggcctggggagctctgttctacagcagaagtgaaatgctttgaggagagaggagaagtacacttgggtacagggatgctgctcagctgggagagtgcttgctgagtatgcctggcttccatcaccatgccccacggaaaacaggtcatggtgtgagcacctattcgtgagcgccttggagttgaggcggaaggtcagaggttgaaggccattttgtcagtatatattctgttgatagccatgaacttgtctccaaaaagtagtgagtgagtgagtgaataaacaaacataaattttggtagtcaggcagaagtctttgccattagcgtacttttgtagtgtgtttgtactgtttgtgtatattccttaactcgtaagaaccacgggtactgtaaatttctctttgagccaggaggtagtggcactcacctttaatcccagcactcaaggaggcagaggcaggcagatctctgagttcaaggctagccaggtctacagatctagttccagaacagccaggactacacaaaaaaacgcttgtctccagaaaaaacaaacaaaaaacagagataaataaacttttctttgacttttgaggccatcctgtttttgttcggttagtaggacaattgctggttttatatagaacaaatcagagaaaacaacggtcggttagaggtgcttgatatattcactacactggctgtcttttagttaaggatataggttttatcaataatttctcatcccttgtttttttcgtggttcttctcccagaaattaagcaaaatagaaaaagtaggaggaagtagtaggtggcaggtaactttcagagacccttcccaagtcactcaaagccatttacagccaacattctaaaaataacagaaattgttgtcagtttcctgcttttcttgaactaagattagagtgtcttagcaaccaactatatcacccaacatttcttttcttctgatgcccacatcaagtcacatggtattagtagaatcttggggctttaccctcccaaccaaaactacaaagtgagattacatctcaaaaatggttttgttaaagaagaaggagaaggagaaggagaaggagaaggagaaggcgaaggaagaagaagaagaagaagaagaagaagaagaagaagaagaagaagaagaagaagaagaagaagaagaagaagatgattattctaagtctcagtggaagaccagcttagctgagatttcatgaataaaaatgaggtcgataggagagtaaggactgtgtctacctcacaaatatacctattacctaacacttgataccacgtatgtacataaacgtatgtgtgtgtgcatagtttacatatctgtgtaatatgtgcatatagcttaaagtgtctggaaagatttaatggccggatcactgaagtggatgtctataaaatgggtgttagcatgcctcagccctttgttggtgctatgtaaacagttctgttactttctgaagattaaagagcgtgtgcttagtgattctgtagcactgagtgcagataactgagttaagaatataacactgcagacaaaaacccaaaacacttcttaatttaagaattaaagcagcagtggaattggtaggaaacaaatgtgagcttttgactgtcggacttgcgtccactactttagactattacattatatagcttcctcatccagaggcagaaataaaagccaccttttaggacctctgcctcatagatatccatatcattttaaagataataaattcacttataaataaaatattactctaggtacagcagtctgcattaagaatatttaaaaatacagcattaaatctgaatttttaaaaatatacttggtcacactaaagaatagcattctgaattgttgatttttcaggcctgaaaaacctgatggtaggtcatagagtaaaataagaacacattattataagctttatttaaaatattttaaggtctttatatttctttattactggattctccacaccccgccccctgccgttttgttttgttttgttgtgttgtattgtgttgtgttgagacaggctcttactgtgtagctctggctggtcaggaattagctgtgtagaccaagctggcctaaagctcacagagacccttccctcctgcctctgagaccgactgttggggttgaggctatatgccactatacctggcttctttttccctttttgaaaatgttttcaaaagattttatagccattttatgtctagaaaacattgaacaatgtttagcttttctctcttgaacagtatagtcactctaatagactttctgatttttaaactttgacagattaccaaagctttacctgtgtgaattctgtcttaaatatatgaagagtaaaaatattttgctaagacactcaaagaagtgtggatggtttcatcctccggccaatgagatttaccgaaggaaagacctttcagtattcgaggtaagcaagtataaacaaaaacatggtctttttgaaccctaatattcctaactgttgactgtgtgcttggatggtttgtgtatagatagcacagtgtgtattcaatcttagcatcggaattcacactgctctttaagatagcgccatggtttagcatatttatctgactacattaagcaaccatttagactgatgaagaattcttacttcatcacatcaacttttttggggctttttaaaatccctttctacagcacagtatgcaccagtgaattagtggtctccttggctctttgtaaattccacattctttggcaggaggaattagctttgtttagcagctccagccagtgtctggcaggtactccctcttccagggaattgagcagctgtacgtatctgcttagcacacaaacacctgtgcttctgtccagttcttgccagggtggataaatcctctgggcgagatcccagcagatgttgggactcttccccagtctctgtggacagctaccctagagaaccttgccgttcccaggaagccctgtgttcctgggtctcattgtaggtttcttgaagatattttgtgttttcagagcagacgtagtagcagaaagtctctgctttattttcattgtttagccaggcttctgctgccaggctcggggatctagcttagctgatcagctgtatactgaggactccaggctctcctttggtggtcctgtctgttcagagggtcactgtccgttctcggcattaatcctcctcactgtagctgcacatttctgtgctttgctgtattggcctctttgttaccatcctggtgtgttgtttactcttcagggtctcagatcaagccttcctcctacggcagacatgatgtcttctttttctgaaaaccagtgtcctttctctttccaatgctcatgttgctgtgtatcattctgctgcacagctgccgtttgctctggcctccagtgtccctccattataataagggagggtcatcagtttcccatgtgtctaagaggcttctcaggcagggctttccctctctagactggtcaggtacctactgctgtggtgttttttaagcaccttcctgctctttctagtgagcttgaagggcaagtggaattctttgtgaggctgcgctattacttcttattaaaggccaagcacaggctgctcagcctgagtactactggcatttcaagctgaataatatattgcataggaactgtagtatactttttaaggtgtttagcagcatcctgccgtctacctcctggctgctgctgctggtgcctcctgtccattcgtgacaaccaaaaatgcctcagcagccacatatctgagcagaaagagggtgggaggtgaaggataccaagtacaggttaccccacttgatgtactgtcgggctgccactcaggcagccccaagaaggcaggggagagagttggtctcagggagcctttgcgttgtgccagctttactgtttggtcctttcctcgtgccctggatgcttttcctccaaccgaaagaaaattgaaacgactgttcatcttttcccagacagcaaaacacattgtttgccttaagtaattattgaataaatcatcatgagtaaggctgtgtgtggacgctctaatctatcaggaagtcatctgggcaggataatcagtcttgttagacatgtgtttgaaagcacagagatgaaagtcgcccaggagtgtagttcattcctacactgagggtgtggaggaaaccctaaggccctattctagcatcttgattgaaggtatcagctttggaaaggaaactttcggatcttttctgtgatttagaaagaagtaaaccgtatctgtgattttggttttgtgagtctcttctgtacctgtctcttttcctagacttctgattgatcggagattgtttcagtgttttcatttctgtttctgatgcacagatgtacatcgccattagttcttgtgtacggcactgtttccaaaaggaccatactcccaaatacatcaaaacgtcctttaattaaagagagaattgtatcctcagtgccagttgcctgtatttgattatgttgctatgtgtgggactaaggttctgtccaagggaaatagttatatgaaatctaaaaataatttgtgcagtataagaaccagtatggtccacaggagacctgggaatggtcaagttcattgtcaaagagctcgggttagcaaaacctgactcccctaagaagagtgtggggtctgtttggctctctgtttcagcaagtcactacatttgatcaaagacattggtttctgtgccttagctcctgtggaggcctcggtgtcccagcttgagtcttttattttgaagagaagtagactataatcattacacttactgtaggtttaaattcacctgactctctctgtaattattcccaacacagagattgtatattctccagttatattaaaatgatacttgggataaaactaaaatggatgcctctgctgtttaatccacacttttgaagaatcagaataactcaggcggttcatttatattatttttatttgaagtccttttgaaaataacaaaagtttggcatgcatgatgaaatttttatttgtttttttaattttcagatttacttggctccaatttaaaagtaagagggcatgcctgataaattttaactcataataaattgcaagtgaaagtgactttgctaacgttgctgtttcttgaacgagcttaaggaggagacgttagctgtcttgaatttaccttaacaagaggaaagatgggattctggctctgcaagtaacagctgttccctggttaacactgtctttgtttaatggagtattttaatcttagagtgtaggatttagaaataaaattatatactttttaaaatgatatacagaagaagcaagtttatattctgatgatacttttatgttaaataatgttgtctgtttctctttttctaggttgatgggaatatgagtaaaatttattgccaaaacctttgcttgttagccaagctcttcctggaccacaaaacattgtattatgatgttgagccattccttttttatgtccttacaaaaaatgatgaaaaaggctgtcatctggttggatacttctccaaggtaaaccacgagccagcatggccttctctcgcttgcttgcaaatgtttttagtggagctcaggtctttgaacagggtttttttgttttgttttctcttgtttttgtatttttatgacaataatttgagtaagtggctcatgtttctgaaaacctcagctttttgtttaaagctcatttgaaaggacacaaacaagaaacaaaacaaataacaacaaaaggtgcctaggaagtgtgtaaaggaccccagaaccctgtgctgtgctgacagtgaccatgcgacatttcattaccaccttgtagactgcctcgcagctttgatttccaaatgttgagcttctttcttcttttaagtggtgtgcacatgaagctttctgtgatggagcacttaagacctcagcctctctggctcatttcctacctcgtggtcagcagtatccagtgttagagcattggtgtgggctgctgagatggctcctgagaaacgtccaggacctgcttggtaggagagaactgactcccagaagttgtccgcatgcaccctaccctgccctgcctcccaccccacacacaccaaggaatacatgtaattaaaacaaaaacaaaaacaccactggcaattgatggcctagttgataggtggctggttttccaccgctgcctctcatgatctgtgctgtggtttttaagttctaagggagtcttgcctgtaggaaacctacctgtctctagcagtcaacatggggaagaacttgcatactaaggcacagtggctcgtcttttcactggttcagagctcttctccagaagaaactgctcagaaactgctgttgctaagtcatgcaccttgaaagagagctggtttggaatgtgtttgccaggtgttgaactttccctgggtatgcacccaagaatggttacagaaacagagatggtaattatccagacgctcagcagatgagtgactttattggatctgcttttctttaatgttcatgatgaaacactccatagaagtgctgttttcacaggaaataagaagctagactatcttcccggtgtgttggcatatgctgctaatataaatactcagagggctaagacaagggatcaccagtttgtggtcagccaagacggcatggcaagactgtccatgtccctcagtgttctctccctccagacacatgaaccatccagaggtcctcctgtctcatccctgtgtgcagctattttgactgactctctttccttctttctttctttctttctttctttctctctctctctctctctctctctctctcttttctccctctctctctctctttctttctttctttcttnnnnnnnnnnnnnnnnnnnnnnnnnnnnnnnnnnnnnnnnnnnnnnnnnnnnnnnnnnnnnnnnnnnnnnnnnnnnnnnnnnnnnnnnnnnnnnnnnnnnnnnnnnnnnnnnnnnnnnnnnnnnnnnnnnnnnnnnnnnnnnnnnnnnnnnnnnnnnnnnnnnnnnnnnnnnnnnnnnnnnnnnnnnnnnnnnnnnnnnnnnnnnnnnnnnnnnnnnnnnnnnnnnnnnnnnnnnnnnnnnnnnnnnnnnnnnnnnnnnnnnnnnnnnnnnnnnnnnnnnnnnnnnnnnnnnnnnnnnnnnnnnnnnnnnnnnnnnnnnnnnnnnnnnnnnnnnnnnnnnnnnnnnnnnnnnnnnnnnnnnnnnnnnnnnnnnnnnnnnnnnnnnnnnnnnnnnnnnnnnnnnnnnnnnnnnnnnnnnnnnnnnnnnnnnnnnnnnnnnnnnnnnnnnnnnnnnnnnnnnnnnnnnnnnnnnnnnnnnnnnnnnnnnnnnnnnnnnnnnnnnnnnnnnnnnnnnnnnnnnnnnnnnnnnnnnnnnnnnnnnnnnnnnnnnnnnnnnnnnnnnnnnnnnnnnnnnnnnnnnnnnnnnnnnnnnnnnnnnnnnnnnnnnnnnnnnnnnnnnnnnnnnnnnnnnnnnnnnnnnnnnnnnnnnnnnnnnnnnnnnnnnnnnnnnnnnnnnnnnnnnnnnnnnnnnnnnnnnnnnnnnnnnnnnnnnnnnnnnnnnnnnnnnnnnnnnnnnnnnnnnnnnnnnnnnnnnnnnnnnnnnnnnnnnnnnnnnnnnnnnnnnnnnnnnnnnnnnnnnnnnnnnnnnnnnnnnnnnnnnnnnnnnnnnnnnnnnnnnnnnnnnnnnnnnnnnnnnnnnnnnnnnnnnnnnnnnnnnnnnnnnnnnnnnnnnnnnnnnnnnnnnnnnnnnnnnnnnnnnnnnnnnnnnnnnnnnnnnnnnnnnnnnnnnnnnnnnnnnnnnnnnnnnnnnnnnnnnnnnnnnnnnnnnnnnnnnnnnnnnnnnnnnnnnnnnnnnnnnnnnnnnnnnnnnnnnnnnnnnnnnnnnnnnnnnnnnnnnnnnnnnnnnnnnnnnnnnnnnnnnnnnnnnnnnnnnnnnnnnnnnnnnnnnnnnnnnnnnnnnnnnnnnnnnnnnnnnnnnnnnnnnnnnnnnnnnnnnnnnnnnnnnngatttggacgcttttctcattgatttcagtaagtgaaaatacattaccttccttccagagtagctgccggctgtttcaggaaactgtacccgcataaagctttatttaacctgctgtgctgttttctttttgtaatcgtacatagtgggtcttctgtttataaccacctgagttagaagatcttccctcacgtgacagtttccctgacacccacttacactccagggaaaatgagactagatctcaccacagtgcccttgcctcagaaagccattacctgcaatgagctggtagagttctgtggcactgtgctcactataccattaggtaattattgggaataagcacaagcgattgttagttacaaggagttttcgctttctcagattttgcccagtagtctttgtggagcagaggagagcaggggtaaagagagcctgttcacctgaggaggctctagttacttccctctcactgttgcagaagctgttggtaacgaggtttctcaggagctgctggcttcatatgcacttgtagccctgagcctctctggttaaagctggatgcttgcaacagtgcagcggctggatgcttgcaacaatgcagcggctggatgcttgcaacaatgcagcggctggatgcttgcaacaatgcagcggctgtgcttctttcttagccgctgtctctcttcttgcttatttcatactaaggctcaagctgcatttagagagatagtagcctgtgagccccttaccctgtgatgataggactctctagctatatgacagtctgtcacttagtgcacgtgaattcgtaggttgttagctggataaaggaaatttgaatatatgtgcaggaaatgcaaggccttgcatgtaggtatgctgtgagggtccataaggaagtatgttgactctataagtctctatcattagattctgaaatgttgaagtctgcagataaattttagactgattttgtataatttcctgaccaaaaaaatataaaattaaaaaggattttgggttgattatttttataccttcagatagtatttccaattattaatttgttttcctagtcttactgttttggcctagttatccaggagactaattgtccaaggagggctatatactagctcactgtcgttcctttccacatcctcgctgtaatcagactctttttcttctttagttttccatgttttaaatcactgttccctgagccttccatacttgtacctaatgcactgattgctcctctcctgccctccctcttccctccctcatccctcacccccttgtttgctacttaatctctttcttgtattcatgtctttttatctatgtccctctgggtttgaccaagtccatgtatgtggctttagttcctggtggtgtaggagtgggtacacatgtgaagaccatcattacatgaggttttttttaaggggggggggttcttcttgtttatattggataagtaaatgtacagttacattcgagttaaatccctgctacagctatttggaaaggcagaattagctgactctttatggaatattttacagtcatcatgtatgaggcgctcatctataactacactttctgggatacatcacaaccatgcaggtctaagcttgctgacagtgttctcgtgtctctagactaaaaggacgttccaggagacagctccaggctaccttttaagctttttgactcaacagtttgcttctctgagttctttttctgtgcatggcctttcctgacatggccccttcctcttgcctgttcaaaaccatgctcatttggtaacaactcaagaacctcttatctctaatgctgtctttgtaagttctatcttataccgtcccagctatgttctatacgagcatgcttagaccgtgtttgtccttttgtgctaaacatcagtatatcgtgcttctgagttaccgtgatctccttggaaacttttttggatcagcatagttcctataacaatttgtattagatgtcgttttgctgatatgaagtgataatgaagctatctaaagtgatgcctagattataaaggaactggtaccaccaggtaaaaaagtcaagctctaaatacagtgatataattacaggggacatacatgaatgtacatgtatggataacccagggttccctttaagtgctaaaactattttaaaacttcagacatgaaaaaacaaggtggacttgaacttttctttcctttgagaccaggtctcattttatacttctggctgacttggaattcactttgcagaccaggctggtcttcatcttccagagatctgcctgtctctgcctcccatgtactaagatctgaggtgtgcagcaccattcctaaccaccaccctgtaatttcagacatgaaatacaggacacactggaatacttttggggacatttgcggtcattatgaatgccatcctccggatgtgactgggtttagtagtcctgacagtcttgtagaacccttggccttgtctctccactagagtgcttaagcaccatgatgaaagattttagtatagttgaaaggtggggtggggaatagtttgaagggaattggtattgttttacagtactcacaagaaaacgggaccgagtgtaagcccaataaaaattcactttaaaaacagaattattccttgaccaaccattgtaaagaagacagggtatgctgttgaaaaattaatagcatctccttggtagtcacttaaaatattagtaggtaaatatctttccagaaccatttggatccaggcattcacagaggggggtggggggggagcacataacctctcatcagtttttcctcacaggtcagtgctctgggtaagaaagatgagcaggacttgtaagatttctaaaatatgttctgttccattaaaaggacctcttaataatggtttgggttctgttgtgtaaggctgggacctgttgattaaggttgtattttcagttagtcagagcaactgtaaagtagggaagtccttgtcaataatgattgtaatttagcaaaggaaaacagcatactgcacctggacttttatatatgttccaatagagtgtgtgtgtgtgtgtgtgtgtgtgtgtgtgtgtgtgtgtgtgtgtgtgtgtatacgctcttgagtgcgtgtgtctgtttgtctgtctgtctgaaaaatgcatgcacaagattttggcactgttgtccggtacagtaagagaactgatggggttgtccacaggcccaaatgctacccttccaagaagctgtctcttgcttctgggacagcttatctggcacttgtcagagtgaggtctctcaggaggctgtttgcacatcttggccagagtgagtaaaaggtgccagcatctcagagacagcctgctcatagacagactcagggttcatgactgctcaagaagcgatggacacaggctgcaggggtctcttctcctggattctgagatttcctctcccttagtcaaaaactttaaagccctcctacacacacacagacaactctccaccctcactagacatgtcaagacttcaaagaagcccacttcccacaaaacttctgctactttttgcctcccacggacaaggaaaatagctgctcttcccacggggaacagctaggcactggggagctagaatgttccttcctgagccctggcctgctcctgctgttagagctgcccagcaatgccttatatatttcactgtttctttattttgaaagaaaattcagacttgagagaaaagttacaatattgtgcctagaatttccatgaattctttacctggatcccctgggcgttggcatgtatagtgtctgttcttttattctccttcttctctctcatacgtctctttcctgaattgtgatgaggatgaaccgcgtgtgttagtccatctttaaagatcctctgctgtgtatcccacaaactctcagaaccaaaatatccctatcagcaggcactctgtatgagtgagtgtgctagattcaggtttcgtcttgccagtgcttcctgctgtccttttgggggaaatacctctcagtgtgggtttatttctcaccacattcagtcactgggtctcttaaatttcccaagatcaggggtattggtgggtttgtcttgattttagttccttggacattgtaaagtgtgcggggacctattctgtacagtacctgccttcccattggggcttctctgatattagatttgggtggtaagctttggggagaagtactagagaaactaaggttcctcctccttggcatacaaaatgtgctgaccatgttatgcggtggtacctgccaagtcattgtaatagtgtctggtaagaagataccttgaggttatgtaaataccatttctcccatcttttcctcctagtttcattgatgggattttttttttttaatttggtgtttggaggcagagcctcacataacctaggctgtcctttgacttctgacactccttccctcacctcctgagtttaggatgacaggtgtgtatctgcccaacctaaagaatgattttcacgagggctggagagatgggttagcagttaaaagcactggctgctgttgaccaaagatccgttcagttcccagaactcacgtagtacctcacatctgtgtgtgactctagttccacggggatctgggctctcttctggcttctgtgggcaccagtgcttccatggtacacagacaaatgttcctgcaggcacaagagccatccacataaaaatgatggatggatggatggatggatggatggatggatggatggatggatggatggatggatggatggatagatagatagatagatagatagatagatagatagatagatagatagatagatagatagatagcagagctgtgctcctcccttttccgtaggtcaccggctacactcatctttaggtgctccctcctctccgttttgtactgatgagcatgtaggtgtgccctttcttactactactactactactactactactacttctactactactactacttctactacttctacttctactactactactactactactactactacttcttcttcttcttctccttcctcctcnnnnnnnnnnnnnnnnnnnnnnnnnnnnnnnnnnnnnnnnnnnnnnnnnnnnnnnnnnnnnnnnnnnnnnnnnnnnnnnnnnnnnnnnnnnnnnnnnnnnnnnnnnnnnnnnnncataagtatcacatacccagaacacatggaggccagagaccttaagatttattttattttatttttaattacgtgtgtgtgtgtgtgtgtgtgtgtgtgtgtgtgtgtatgtaagtaagtatgggttccctcagagatatttcaccaccaccacccccagctggagttacaggagattgtgagatgccccacataggtgctggacggtccttgggaagtaaaatatgcattcttaaaacctgggccaggggctggtgagatggctcagtgggtaagagcacccgactgctcttccgaaggtccagagttcaaatcccagcaaccacatggtggctcacaaccatccgtaatgagatctgactccctcttctggagtgtctgaagacagctacagtgtacttacatataatcaataaataaatcttttaaaaaaaaaaaaaaaaaaaaaaaaaaaaaaccctgggccatgcttggctcactgtctcaagccttagtgattgggatgcctgaggtacactccagtgaatacttgaataccagtgactaggttaaatgctcttgctgatgtctctgttgacttgtcagccaacagtggctgtatgcagcagcattatctgtgtagcgtatgcagcatatctgtgtagcgtgtattcagagctaacaagccaggctgaaggttgaactccaagctcagggaactgacatgccccagaacatgccttcatgagcatgcatgttagatgtttcacatactacaggcagattaaagactcaaggagtcttgtgctcagcaaagggtctgcattaaaaaaagctagtagaagttagtgggcatgctagataacagctggagtaagaacagccaaggggtccatgaggctggggaacgtggctttgagattccagaaaacaaaggagatgagtgtttcagcactgactgatcctagcacagctgggatttgtgaaattctttctgtgtgtcacctgaattgcacatgtgagcccaattctcacagataactatggggaaagtgacacaaaaaaacagtcatagatcctcagtgtcccaaaggaaaaggtgtaagcagtatacctggaggactgtggcctaagtggaattttaaaaacatgaatctggggctgggattaaaagcacttgctgtatgagcctgacaacatgagtttgatttctggaatgcagtccatggggggagtggagatctgagtccagaagggtttccactaactttcatgtacaaacacagcccacacacaacaaggggaatgttataaagaagtggatttacccaagaatgatggcccacgtctgttattctcggttatggcagaggattgccatgggttctaggcctgcttggactacaaaatgagaccctgtctcaacaaaacacagagcagggagaagggtggttcagaaagcttgactttccagagctgggggcaacatggtggggttgtttttatactgtaaagactaggacactggattcgagagtgtgtgggtgtctgtgtgtctgtgtgtgtgtgtgtgtgtgtgtgtgtgtatgtgtgtgcgtgcacgcgcgcgcgtatgtacaaatgtgttagggaacactgatgagaaagattgaagtaaaaacaaaagtaatgcccaggtgcagttttcattacaaagtcataaacgaaaggcatttagtgaaattagttgcactttcctagctaaaagactaaaaactcactaactagaactatagattctagagtcagcaagataaccagctcagtgggtatacgtgcttgctgtgtgactctggtgacctgagttcagtcccaggaacccagagggtaaagaggggaaccaagtcctgaaagttaccttctgacctctatatatagtctggcatctacatgaagatggtgatagagaacatttttaattaaaaatattttgtttacacatgggctgcttcagggctgctgagatagacctgtggttataaccatattcttctcttccagaggccccaggctcagttctcagcgtccacatggcctcttaacaaccttctgtaactccagttccaggacaccaaccccctcttctggccgctgtggcactaggcatctacatggtgaatagtcatgcatgcaggccaaacactcatacatataaaataataatacaggaggggaaagaaaaagaagagtctgcttgctgagtctggtgataaccggtctttaatcccagtactcagaaggcagaagcagtaaggtcgttgaggggttgagtggtggtattgcacagttcacctatgctacctactcactgcagtttttctttcttacctttttaaagtggtcctgaccattaaaaaaaaaagaacaaacaaacaaagccactgtcccagcccctagctgtgtgtggcacccagtgttgctggtcttcctcccgtctgaggttgtcattggaatgaaggctgtttcttgagttcacttacttaagttgcaacaggaaggatcgttgttctcaactgccaatcttgggcagagagaagagactaagttggttgaagagatgtttctctttcccttcctcttgacaggtagttcatttcttggcacatttattttagaaggaaggttccagtgttagacctcagaaacagtcagctctgtccgctccctttctctgccactcttctcccagtcagtgcaaccaaggcaatcattaaagagaaacaagatgtccttgtgaagtggcgttgaggtccttccagctctcggatagagacctctcccttgacacttggaagagctcgggccagccactgtcactggaaggcttgttttgatctgtgcaattaagtttgatgatgacatattttaatagagtctagtctataatagaataaggaaagtgaacatctttccttatttcctcattgtaataagtttctccaaaagcctttgccactactgttttagtacacggagctgatctgtgatacattttaatatgctaaagataatatggaggtggaaaattgagtctgtggtgatttattcagaggttgactgctactgaatacatagacatgcattgcatgaggcagtgcagccaatgtttttatgtatcttttttttcaaataaactaggtttatcataaataagaacaaataaatagtttgtatagactagtgtgtatcattgcttcagtgaaaacatgactatgaaacatggggtctgccatctcattcttttctgaacaccacttacttgctttacatacctcaggcttttccagggtttggcacacaggtggatgttgttgccgtgtaacctttgttcagattgctacccagtgggcatatgcagcgagtagtgttggaacccactactgggcaaattccattccgataaccaataagcatcagttggcagtggcatcctgaagacagggacttttgccgggttgaatgcccagccataagcacagtgcttgtcagtcacataatgggcatgcagtgcttgtcacataatgggcatgcaataaacaaccgttaagggaagaaatgagtgtctgactctgctctttgtactactgggagtacctccaagtacacacagccagcttctgacagaattagctcttgatctgagattttctcatggccttctgtcttgtcacatgtacacctttattcttccttctgcagacatgctttggacggactttggccagcgtggcctcggtgacgcagccaagagggtacatgatccaggccttgttgtggggtgtcagacacagggttcataactcatctctgcggtcttaggtgtgagggtatactgaggcttcgcagtgggaagtgcttccaactcgctttcactggccccgttatggtatttgtaaggcagagcaagatcacacaagctttgttcttagtgcttgaaactagtgctttcctgattttggttccaaggagactattacctttaaatctgttttccagctgataaaagaagcaatgggcttaatgttttaagtgaaaaacaatctactataaaagtttgcttgcagggcaatggtggcgcacgcctttaatcccagcacttgggaggcagaggcaggtggatttctgagttcgaagccagcctggtctacagtgtgagtttcaggacagccagagctacacagagaaaccctgtctccagtttgcttacctcttcaggataattttgataatgcagatgactgggtcagaaaatggttacattttcttgtttgctcctttaattttgctttgggagaaaatatgtttttctttatttgcttagagttatattagagaaatacagttttacactatatcatactacactgttgtgtttaataacataaaaacttaagttttataattatttatgttgcatcttgctttggattaacattaaagaagaccttttcttcaacaaaattgttttaattaatatttttaaagtacataaaagtaattgagtgaattaaataattttattatttatatagcaatatgttgtccatattgaaacaaatgcgcaacatagttatactgtagcaggaaccaaagataaggttgctaaaattgtgatgcccatgtacctgggaactaagtagggttccttatgtgaaaatggattgttctggaatagggggaatgatactaaaaactaatctgaacaatgaaaagaaccagttcattgtcttaaagctggtgaatgaagcatttatcctgtttcccctgtctgagctgtaccactaggtgaccaagtggtgcttgagaaaagcaatctcttcccatgaattaatggatccgtacattgaacatcaaatagctgcaaattgcacaaagaggagcaaacagacatgatcaaacttctattctgtcttgctggaaaagacatagaagaacatggtgaacgataatacaagcacaccacgagaaagccccaagatcaggaaccgataggaaagaaagaatatggggtagaaggagaaatccacacattaaaagaaagttaagtctttgtcttaaatggacacaactgcattggcaccttgatattgtggtggtaaaggcataacaatagcaatagagcctgagagatgtgtcagtcagtggttaatagcactgaccactcttccagaggacacaggttcaattcccagcatctgcatgatagcctacaaacatttgtaactccagttccaaaggatccagtgccctccttagcctctgagcaccaggcatgcacataatacaccaatacttgcaggcaaccattcataaaataaacaaagctaacccaggaggtggtggcacacacctttaatcccagtgtttgggaggcagaggcaggctgatctctgtaaatttggagcccatctggtctacagatccagctccaggacagccagagctacacagagaaaacaaaagcaataaatctaaaaatagtaagaataataaaaacctatccctgattgctaggaaaaggctttcagtagttattgatgagagaaggggaaggaggtattgcctgggccaaacagaagattgcttggtggtgatcagcaaaatcctaagtgatagtcccaagggcagttgccttttggtaatccactaagctatacattgtatgtggttgtctgtgttcgttggaggcgtgttttgttttaaagtgggaggtcatataccctatggcatttgttttatggctgtaacccttaaaactctcaaaacagcctttttttatttattggtggtattacatcagtggtgttgtaaagagagagagagttcttcacctttactgctctacataagaaacattaagtgcataagtgcttggtgcttggcaccagcttcctgtcagcctttgcaaagctgtttttatgtgaagcaattgcaccaaacatcactgagactgaggccctcaagtgttgaatctcttagagaacggccttcctgtaacttctgcttccactgttaaacatgattgaagactgaagggtgatgaaatggaagattcaggtaagaaatacttgtctgggacttgagaggtggcttagcagttaaaagtactggcttctctcacaggacccaggtttaattcccagaacccacatgcatctcgcgacagtctgactccagtttccggggatccagttttctcttttggcctccatagatagacaccaggcacccccacgaggtgcacagacattgcatgtgggcaaaatattcatactcataagaaatataaaatagccttaaaatttttaaatactaagaaagaaatgtttctgccgtgaggtggaaagtcagaggtgaagccgagacgagacattccagcctgggcactcatgctttgttctcctactgttgattacactccagagtgaacgaatatagttctgtcagacactgcaagtgggagtgggatgccctctccttccagggctaatgcacttgtgaaatttggatatttaaaaaacagtgcttacagaagagaaaatgggaacgaaaaggcttaggttgccagaatgaagctgtgctaggtgagattaaggaagacacctagagttatctgtggcttctccctctctgtcccctctctctccccatnnnnnnnnnnnnnnnnnnnnctctctcccccccccactttctccctcttcctctctctaacacacacatacatacacaccacagtggggggtgggggggtgtgtgtgccaaccacaagatggctttctgttcttcctgccctttgctttgtccaatacaggatctttcctcttgaattcaaggaagttaattttattttctgtaccacagtagaaggtacatcagaggactctgtgccagcctgccttgcaccctgcagattttcatttgcttccagttaaaaacttacagaccatagcaagtacttttagagaagagataaaatgaatggtgcttgtgaactgttttaaacaccatttagaatacagtttagaaaactcttccctgaagaaaagtcactagctttcatcactactgggaacttttcagagaattttctctgaaataccttcctgccacatctccataaattaactttctttgacctcatcacacataatgctaaagggttaaaaccaaggaaaaagtaattgtgtgtctcagcctctttctctgcagattgcacaggaagtttgttcctgtctgcagcagggtaattacaagagatggttccataatttacagttgagtgtacttgtccataatcacacacctccaccttggcgtgcagaccctcctgtgtgtgccctgtccttttatttgtaaatgattaccatatgatctcttgcagtgcagcattgaattgagttatcagtaatgaacttcagctattactgtgtatgtgtgaattcctgttatttatgtgattagtggctcttagatttaagttgcctggtaatgaacaaattaaactccctgcgatttgtctctagctaaatagtcctgggcaccctaaccagaatagtgactagtgtgcccgcagtagagattcaaccactgaaaccttccttccctgtacattcaagaaccttcaaagttggtgatttggtgattaacaatgtccacacaatagaaagactcgtgggaatgataactgtgatattatggataatgccgtgctcatattaatatattgttactgatggctcaactctagctgcatccagtgttagagtcagtctgaacagcagcagaattgtaccttgtgcaaggaactcagagaaatgtactgtctgcaagctcaaaaggcaatgatgtcttttaatactgtttgtaataagttgggcacaaaggcacacatctgtaatgccagtgcactggaggctaaggctggtagatcattagttcaaggccacgccatagcaagattctgtctttaaaaaataattccaaggggctggagagatggctcagtggttaagagcactgactgctcttccagaggtcctgagttcaattcccagcaaccacatggtggctcacaaccatctgtaatagaatctgatgccctcttctagtgtttctgaagagagcaatggtgaactcatatacataaataaattaaatcttttaaaaaaaaatccaagatgtgtgtggtggtgcttgcccgtaaggagatcgagtcaggagaattgtgagctggaggccagcctggtctacagcacaagttccaggccagccaggactacaaagtgataccttgtctcaaaagcaatgataattataataaacccttgttattgcttctgaaaaccctgcttgtatgatacagcatatattcttgtttctctcacagaaacatctaacatagccagactaaatgtttgagttctatgaccaaagctactggcaagtcagccaaccactgaagtacgtgtcccacccacccctagttcccacacccagcacacactgtcctattggcagtggctgagccactgccctgacacagctatctatttccagaagctttgtgcctcagagtgtgttcaaaagcatgtagcatgtgcatgcgggaggggtgcgagcatttgtctcgctaacttggggatactaaagatgcttctgagccttgagcagatcagaggacgggctgggctttgattttagaaagttgtctcaaagactgacaactcccgcttgagatgtactttgtttgaaaacaaagggaaaatggaaagagatttgttcttccacttttcctgatgccatgctttacacagtctgtgtctgctaggtgagcgctcagtttctagccctgggtgctggtgtgtgtgtgtgtgtgtgtgtgtgtgtgtgtgtgtgtgtgtgtgtgtacaccagacagagagacgggcaggcagacaatatttgtagagctgtaaaaggtaagagaatggcctgggatggggagagggaaacagannnnnnnnnnnnnnnnnnnnnnnnnnnnnnnnnnnnnnnnnnnnnnnnnnnnnnnnnnnnnnnnnnnnnnnnnnnnnnnnnnnnnnnnnnnnnnnnnnnnnnnnnnnnnnnnnnnnnnnnnnnnnnnnnnnnnnnnnnnnnnnnnnnnnnnnnnnnnnnnnnnnnnnnnnnnnnnnnnnnnnnnnnnnnnnnnnnnnnnnnnnnnnnnnnnnnnnnnnnnnnnnnnnnnnnnnnnnnnnnnnnnnnnnnnnnnnnnnnnnnnnnnnnnnnnnnnnnnnnnnnnnnnnnnnnnnnnnnnnnnnnnnnnnnnnnnnnnnnnnnnnnnnnnnnnnnnnnnnnnnnnnnnnnnnnnnnnnnnnnnnnnactcgctcgcacacgcagactctctctcacacgcacgcacacacacacacagctttgttgggctagctgagctgtgcatttactgggctcagctaactgggctgcccctccagtggctagaagtgaagcccttccagttcactcggttgtgggatcttggcgccagggcagtttcatgccatttgatgaaagtgtgcttggtctatgagttttgtgagaattttgaaatcatgtagcttttcaataggaaagtcttgtgaggattttgtacttgtatgtagaattttattcaaggtttcaacttggatagcaatttagggtgcctttttgctgataggtgttattttttagaatattttttcaagcagtctttagtgtgaagaaaattttttctaaaagaagaaattagttttaaataccaaattacttcttaagttttctcttttgtaaacctgtgctcttcctaaaatatcctagaatttaaaatactgctattgcatttaaatgtgtgtgtgtgtgccacagtgcacatgtggggaccagaggacaacttgtggaagtgagttcgcctgctgtgtggtgctcagggattcagctcatcagcaacagcctttacctgctaaggctatcagaagttaacagcatcctgtctccatttctgtctcatcaaaaacagtggctcctagtactctaccatctcccagtgaagttgcctctgggaacaaaccggcttgactgatatttgggaatagtagttggctttgtgaacaatgtgattccttctgaaatatatttatgaaaacatttttaaaaaatcatttaatttaaaaaatttttaaatgcttttagcttggttatatgtgtcattggtagagtattcctctctcattctacaacatcttctcctataccccaggaccttatttccctaacaaggaagttatggattgaattcaacagttgatcatctactcaggaaaagaattcagcactcaggaggcagaggcaggcagatctctgtgagtttgaggccagccaggactattacacagaaaaactgtcttgaaaaaccaaaacaaaaaggctgagtgtagtttgcattgacataccttaccctagcagactgcacctgttggcttcagccatcacttgacatagctaaagccatcccaggaagtcttcattgagggattactcagatccgattggcctatggctaggtctctgagagattgtcttaattatccatgtgggagggcccagtgtgggcagggctgcccctctgcaggctttctaagaaagctaaactaacagcctggcatggtggcacatacctttaagcccagcactagagagacaggcaggaggatctctctgtgagttcaaaaccagcctggtctacatagtgacctctatggcagccaggactacattgggagactacatagaaaggaaggctagctgaacaggaatcagcaaacagtacttcagcagtgatttcagcttcaggtcctgtcctgacttacctcaaatgaacctcttcttagtctgtaagccaaataagctcctcccccaagcagcttttgatcagagtggtttcttcccagccacagaagaggaaactggagcacactcagtccccggttctgtttgactgagagaaacctctgtgcagtgcatgccacaccctctttactaaaactttaccttctgcccaggctcttcctacacgtcaggcccaccctttaaagttctgggttaaaggcactcctcaagacttttgcttaatactgtatctgaaaccaaactctcgtgggggaaagagttgagatttaatgagacggacatgaaggtcaggaagtgattctaacgtgcagctatggatgagaaccgtagctagacccaagcacagggaaggaagctggggagagctcccactaaagcgggtggtcggttataaagacaccatggactcagtagtgtcttggggatgtgtgtctggccctcagactgctcccatggagcagatgctgccccggtcaccaagctcagcagcatgtcacagatgtgcagcaccctctgtgacaggcatagcaggaggaggaggaaagtcctaacttcgagtctacatctcaacaccctacatctcatctccccttggtatctgatgcagatcaactactagagcatccacagccaccagggagccatcaaaattgtttggcaaacccccacgtgctctgtaggcttgggcacatgtgccagtacagggccatgtctctagtgcaggcctccctttgggaggaacatgcagaccattcttctctggagtaggcgtcgggtagtggggatattcagtaaggaacactagtgactttgttccacataactgagggagagcttagcagtggagtgctcttcaggaagctagtgcatcttcaagatgtctacggctgagatgtgactcagccaacagaactttcccaaagacagcatgtccctgggttttcaggccggttttcccaggacacacttgagtcttctagaatctgcgagtctttgttatatttctctgggagcttgtgggtctgctgaagcctcgggcagccactgtgtttgtgggttgatgggctagttgttcattcagggtagtcattgaaataaatacttgacagccaaaaggaatttgggagccaattatgtttgctgggaattttcagtagttaatttcttgactattcctgaggccaaaggagaaggggcttttcctttaattaaatttatatttgggtggtaggaaacttctgaggcagtagaatggtcttgaggtagctcaagcaaacgtaggaataggaaggaggctcatctcagtccgacgccaaagagctctttgacttcttcctctccacattctcttaatttcccctacattaggagtttttagtcatctaaatgaacgcctatagatataacccttaatagctaatctttaagccaagcattattctgtgtttttattaacccatgtaatgcttccagtaacttgaaaagataagtgtgattattaactgtgtggtctaaatgaggattcagacatacacagagattaaagaagtgccttgggttacatagctgttacatggtaggtcctgaattctgccacacagcttgtggctccacagcctgtgctcctagcctcctgtgagctgtcgcaatatatgacagttctgaggttcttatggtctcattgccctgcttctcaacgtttgtattattcatatatacagatagtctgagtacagttcaggcagtctgaggtattccataagtattccaaagtaatgctactttcctctttaactctttttcattcgtgacagtaaagtggaattttccagaaatgtcatgacacaacagatgagggaccaaagtagatattgactggagtgtaaaatgtaaagcaagctttctcctctctagtttgtttatatttttaaaaatgcagggaaggctttttttaaattatcgaaaattagagtaacactaggttcgttgctgttttaaaattaatcaatgtcacttctctgtaaaaatcaacagatacagcctttataaacaaaagctctttggagtcttaaataagtgtttaaactacaaagttctgaagccaagatgtcttagaaccccaccagtgtatctcagcaggtatagtgacatgagccctggttagagatgcatgctctcaggcctctctctaccttctaagttgtaattcatgttgtagccagaattcttttgtagtgacatccaggcatagaacagagcaatcagccactcattgactctagctaacccacatagcctgatagggctttaggaaatccatctattctattctctcccagtaaggaactgatgggacctgacttatcccattgtacattcagtgtctctcccacacaagcctgtttgcctagcagctccagagcaggtcctcaagggccctgaccttgagtcacctttagggtctgtgagagtgcaggttgctcggcgattagtctagttgctatgtaattacactgggcccaaagaattatggtaaagagtgtctcaaacttccagtttcaaatccagtctgtttcaaaatgtctactttgagagacattctcaatcttttggtaaggtcatctttcagacacatcacaggtcatttggaacagggctctcttaaagatactaacttcaggatcagcactgaatttaaacaaaagacggcccctcaaatccactctggtaatgaaactgctaaccgtctacatggtcacagtgctgctagcccaggaaacgaataacagaccacatggcccagtgaactgccacctccaaggaactccatggctaaaggcattggcttacctcctaagttaacatgagcccatggctggtgtcaatccccaggcctgcaaagcccaggctgtgttctgttgtgggtcttccattggcgtctgctgagctcagcaggtgttggtgaaaggtatataatccttggagattatctcccctaaagcaactgaaagctttgaattcacataatccagacagatgggagctggaactgagtagcaagccaaagtttatgctgtgtgtctgaggaggttcagatggtttggaagcagacaatgacagatggaagtgtacacggatgaggggggacacttgtgaagatctctgtcacacccttgcctctttttactcttgctccactatatcatcctgcatagcacttgttcaaaacgagggaagttccaaataaatgagagttgggatcaaattgattttgatttattcatgactgccaaaacaaactttgacctcatcaaatagttacctccataaagtgggtctaccctgctttcctagaggcagttagccattcagtctctggtcaggaccaggcagcgagaactgatactttaggccgtcctcaatggaggccaggtggcctgtatgctctgcttggaaatgcttttttccctgcaagaggatcatctctgagtcaagcatgagagacttccgctgccccttcgacctcacctttcccctggtatgcagttccagtgacgcagaggaggaagtggatcatgctagtttggggtggttaatgcaggggatggtgtgtgggctactccgtttccattacgaggttctcactcatgactgagtgctcgttgcctgaatctttggctcaccgacaagttcaagggaatattcgcaccagcagttaattatcctgaagctcctgggacttgtcttccacacgtcacttttcgtctgaaacagtaggtttccccaggggtagttgaagttttctgattgaaagtgtcctgcgttaaggagaggtgtgagcacgccgtggggatctattcaccaggggtgtattgtacttgtttcagatgcttcaggacaatacaccggcttccaagataagtgctttttatttccctgcatcttagatcaattatttggaatctttttggtaagttaaacttaagagcttaaaccatcacatctctgtaattaataagtcaaatgttcttaccaaaatttactgtgtctgctttatattgtaactgtgctttgaggagctgagagaaagtaggaagggacagaaggtggcaagaagcccctcacttaacacccatgtcgcgaaggacagcataggtcagcatcagcagctcagctccttccaggcaagcgcctgccgcagatgacatttatagccagccgctcttctgtcgtcagtgcacaaccaggaggcacagcacctttccaaacagcacagattgtcattctgcatgccatttcagtcaactagtaagaaataagacatgtgttcatggtcatttttactgttcctggtggattctgtttaacatcagagcatcctccgtcatggggagattccaaatagttctcggcaaaagtgccattttcttcctggctgcaacttctttgagggtctctggattcccagaggaggaggagacacactacaagcagggccaggcacctcagggcattggctttgggtggtgtttggtgctcatcatccctgggatgtgtgcaggaggttctgactaaacattgggtttccagtcatattctcggcaccctgaaaagtatccctcccaacaagtgcttgcagagtccctgcctcttcacagcctctgagtgcacacacaacaggagggtgctttgctgggagagaccagtgggctcaatgtccatgacacatagagcgtgttaccttccacctatggggcagcagtcctgcgctgcagtcaaaaggccaaggaattgtcaggagtcagccttttgacactgcaggagtggagggtactgaaaggtttgtactccagtgctccccaggggctcagcttgctggctcgcctaaattaccgcatgctttttagactcggggtacaagaacagctaggtaaaattgaaagggagggtgggaatgcttccctcttaggtcaaagtgtgggaacatagagacataataaaaaccgtgcctccagggtaaggtagttctgtgtagtggtgagcgtaggtgggagggggaactgcttgtaggccaaatttctgccttcaacagtgggattcacatgaatcagtgagggcctggggacttccatagttagtcactgcagggaacttttaattgtgggatcttgtggacaaagggaacagttatcatccatggttctatacctgcgcctcacccccccacccccggcagaagtacagagctggggctcccagctgactaagtaaatttctcaggctatgccaagcacttagggagcaggtgacgggatacgccagttttctgtgctgaggtttgggcttcctccactgctctggcaacgcagcactctccatgttgacaggacacgatatgggctggctgcagcacagcagctgtccacgttagcattcctgacaccgctgttgaaaacctcagtgtggcagagcggcacgcgccgacagtggcttggctgttaaagtctggtgtttgtttgcattcaatacttaaacaggacgagaggagttaaaccaaaaatcttaggcaaaacacgatgcttattttatttctattctgtatgatgacattcaaataaaagctgtcaagatgcagcatgctgttgaggtagagtgtctttttctagatttctgcattatttgcaagtggttttgagaaacaggaagaaaatggatccaaggcattgatttctctttgtaacaacaacagaaaaactaaaacagaaaattcttgcaagtgcagccattttggaactgtagatgaaggggaggaacgctgatgtctgggttggtgtagagtggcctggtttggtgagtgctgccacctactgtctgtgctgatgtttgtttacacgcaggaggttcacggaggtgaacctcagggaggtgaggctgttgaaacaattagagcaaagaagccatcactacttgacagtcaattcttctctcctccattactgcctcttaattaccgagacagccaccagcttccgttcatttcctctaagtgggcttaaagtcttctcatttcagagtttctttgccagaaaagctgtgcggttcgagcttcatgtgctcgtgtattttatttgtaattgtaggagccacattctcaggttggcttagtttttatgagaagggtaaaaatagagctagcatcgtagatttgcgtttgccaccataggcgtgaaagccagtgttttattaatactaaaacagcttcaaatcagccgctggttaaacggaacaggcagtgcaggctgtgtcagccgaagccccttcactaagccccagctgtcaaagggtcatcgggtcctctgtggaaaacaacctgcccattaatgtcggggtggtccctccccaggatccgagagatcctgacattgagtatccgagagaatttcaggcttgcaggggatttatgtgtggagattccccagaagtctctttagtcttagctttcaacctccgtgacacacaacaccatgtatgttagctgccaccagctgtgtgaattcgcttacagtgtcaccacaaaagttgacaagcagaaatttgacgaggtgacatcactgtaattgagagaggtgacgagcttgacaggacacacttgacctgtgtgatgcttttaccttgtggctgatgacattgttcctagtcctggccctagctctgacaaccaagctgagtgcagttttgcttttcctgcctaggctatttgctttctcgaagagaaggccaagcagggtctcccgaaaagccgctctctgacctgggccggctctcctacctggcctactggaaaagtgtcatcttggaatacctctaccgccaccacgagaggcacatcagcatcaaggccattagcagagccacaggcatgtgcccacatgacatcgccaccactctgcagcacctccacatgattgacaggagggatggcaggtgagtgccctgctttctgctttcttgatccacagcaggatcaagcctgttgttgttgcttttgctggttttccattttcataacctgggtcaaaggaatctggattggccagggactttgttcttttaaaacagtagcccaggtaaccttcaaactcatgcgatcctcctgcctcagttctggattacaggtatgcaccagcatgtccaccatttaatcttgagttggtttggtttggtttggtttggtttggtttggttttctagacagggcctcactgtatagccctggcatccctccatctcagtttgttagaccaggctggccttgaactcacagagagtctcctgcctctgcctcccccaagtgctaaggttaaaggtgtatgcaaccacaccccactagctctcagtttttttaatctcactttgtcttgtctccctatattacaggtttgtcatcattagaagggaaaagttgatattgggccacatggaaaagctgaagaactgttcccgacccaatgaacttgatccggagagtctaagatggaccccaatgttaatttctaatgctgtggtttctgaggaagagcgagaagctgagaaggaggtgatgacgagctgcgtcatcctgagtggtgacttttgtcttgtagttgcttaagctaagagagtcatttgcgtcattgtgaaagctcagttataacgcttatgaaacgatacagcgctaatttatcctaaccgattaagacatgataattttattgaattaagtatgaaaaatgagacatttatcattgatcacaccgaggcactcagcactgacagtatgtaatcagatcagacttggtgctgggctgcagtgctgccatgttaatcgattctttgtgtttataaacttgcgtagagtgctccatgccagtgagcatgtaatgtagtgataaagagcttgaatcaattcactgcatcgttaacaccacttactatcccatgaaacccagccgtaacaccacttactatcccatgaaacccagccgtcttaggtctgctctcctaactgatacagctggaatgtgcttgaccagctggtcagaactcacttagagagagatcctttttcattgatcctggaggctccagccgtgtaactgacctcaccgatgaccattttgctccccaccccaggctgaacgactaatggaacaagccagctgctgggagaaggaggagcaagagatcctgtcgtccagagttagcagtaggcaatcgtctgcaaaagtacaatcaaagaataagtacctgcactccccagagaggcggccagtggccggggagcgaggacagttgttagagctgtccaaagagagcagtgaggaagaggaggaggaggaggaggaagatgatgaggaagaggaggaggaggaagaggaggagagcattcagacatctccccctcggttgactaagccacagtcagtttccattaaaagaaaggtgtgtatgcagataagctgttttctggtctgtctggcttctcttcacagtttttgtttcactctctgtagtttccctgtagtttacatctcagtggtccagtgtcacaatcgtttatcttacacttgtggttctgcttactgctaacgtgtgcagcatgctaaccaccctagtctggtgttcactgccacctgctggtctgcaggacacctcagaggcctgggggggtcagaccagaccaggtcacatgactcactagagggccagccacacctcagagctccaagtccagcgttcctgcattagtgtcccttattctcacatagggttcttaggtattccgcaccctttagtttgctgctggtgttctgcttgtgtggccagtgacacggaagtaaaactcttcatatcctgggtaccaggtagtctcctcagacagcgccagttcctgcccagtgggatagaaagcgcaacattggtttgtgtgggggtgggggtaaatgttcttccacatctgctatctttgtctgcagtttctatctgtgacatacagcagggcagatattattaatacagccttgacaaggagggataacacggtagaaatgaaagctcttcccaggggctgtcctaagaagtattttccaggcagtttgctagtctaactcccaactaggttctttcttctgacctcacagttggagttagcagagggagcaccccgtgaagtgcacttgtggctactcagcattttaacttcttatacagagaagtcagtcttgtgttatgggtagaatgagaggaaggagatctataaacagagtcattccagtcatggtgtgggccacagctctccgtatggattcacctgaaggaaaccagctctttatattggctgcacttgcgtttgggggaaaggtgtgggggcttagggagcagataacagcaagtgttaaatgactaatacggttagattttagaatgttaataggcctgtatgtgctctttaagaacattgaaagcattaaaagtgtaagatgcaggaattcttcagtactgtttatctggaaatagtgccccccccacccccaccatgctgggaggggagcccagtgccttttgcatgagaggtaagtgctctgctagtgagctacaccctggccctggcccgaagctgacattcacgtagacatactgagccctcacagagcagcattctgccaatttcatggttcattgacacatatcttaacattgaatctacctgttcctttatttaaattttgtatattagatgggtgtccccccccccttgggaaaatagcttattgttgcaaccacgggaagtcatttgtgccattatcttattcagagactgcgttactttttaaggtatcttccatatcaaaatagtctataaaatttttaactgcccacatcccagtagccaagactctctaactctgcagttttctagccagtaattattcaagcaccttttcattttggggacaaggaagttcaccttcagccccaccatgtttctcatagtgcctatcatgccgtgggcatctccagagcagttacaaggtaataaatgactgacctgatagccgattgttgcaacatttataaaagcgtttctagaatcatctgtgatatgccagatactgaagctggtgagtgccacttaaaaaataggtgctggaaaagcaatgctcagcttttaaaatctgcagttgagttgctaggatgttctctctcaaagcatctgcttgagtaaacaagtgttttatttggaaaacatatgcctgtgttcttggcacccaagagggatgttcaacatcaaatggaaggttaagtacaaaggcattgaagaagtcctgacatgtaagagtctcgggcgcacgtcagtacacgtttactgcgtatcacctcagctgtttaattcctcaggagcacttatgtattatgttttgaattaatttcagaggccttttgtagtaaagaagaaaaggggtcgtaaacgcaggaggatcaacagcagtgtcaccaccgagaccatttccgagacgacagaagtgctcaatgagcccttcgacaactcggatgaggagaggccaatgccgcagctggagcctacctgtgagatcccagtggaggagggcggcaggaagccagttctgaggaaagcattcccacatcagccagggaagaaaaggcagacagaggaagaggaaggggaagacaatcatttcttcaagaccgctgccctttgtagaagtaagtggagggttagttcgccgcagggtgtgccagtgcacctgagacacatgccagcccatcctttctcattcccagcgtctcgcccctttttccttgcaatggggtactttgtttctaaatcagaataatcctgtaggtggtttcttcttactctgtagaaattgcctcaccctaaactctgaaggctagtaagaaacacagcacacgttccctgatactgctctgtgatctacctagttagcatttttggacatcagggtatttgttaccagtgtgcacttctgttttccttgaaaacaacttctcagtgcatcagggtgtatcctaatattcctctgtgtgatccagaagcacctgaacttcaaacaccctcaatatcagcgttggtaatatgggatgatacagaaatcccaaagacagactttcttttgaagttgacagggataccctcttctacaaacataccagactcaagtgaattgtctctgatgccctgttttaaagcacgtatcccttactctgctagcacaggtactccaagatggacggtgaggagctgtaggacagctcctggtagctggaaggctgaaatgactctgtctaaaacttgctgcagcctagggaacaactcgcctcctttctctgggaaccacaggaattgctgtctatgtctctttttcaaagcataagccagcacttccctgactccttagtgaatatttgctatctcctgtttcattttttaaaattttatcctttccttttttaaagacaggctctcactatgtagccccagctggcctggaactcactatatagacacactggcctcaagctctgaggtcagcctttccctgcccttcaggtgctgggattgaccagcatacctgacccattctccctctccttctctcctcttttcatctcactctctatccctctcttcttgtctgtctctgtctctgtctctctctgtctctgtctctctctgtctctgtgtgtctctctctgtctctatctctctctctctctctctctctctctctccctctccccctccccctccctccctccctctccagttttacttagaattcaacctgtttgtgccggtcttgtacctggtgagcccccaagacctgtcagttttcctctgccccctcagtactggttccgggcataagacagcccacattgcccgtatgtgtgtatgaggaatctgaatgcaagccttcagcactgtgtggcaagctcttacactgcacccactgcgccttctccccagactcctgtgtacatgtgaggctcatggagagctccctctgcagatgtggacgctgagcctgactctcacttggaggtgtcggctcggaagcctgcagatgagctgctgctgctgcctctcaccttggctttgttctctttacctttgatggtcacattccaccatatttctttcacgatcctctccttaaaggagattattagaaaactcatcttctcatctagggatgtattcctatagaaactgtatggccagtgactcatagaataaacgtgggtaaaggcacttgctaccaagcctgacagcctgattttgatcccaaaaactcacatggtagcaagaggaaaccagttccttcaagttggtgatgctcgtcttcaatcccaatactcaggcagagacagaggcaagcagatctctgagttcaaggccagcctggtctacagtgctgtttctaggacagccacagctacacaaagaaactgtcaccaaaaggggtgaggaggggcgctaagagacattgagatggctgattcctgccattgtgaatgaaaggaagtggtgtgagtatccttggggaagtggccaagctctggagcttgtacagagtcctctctaaatcaagtacatgctgtcagctagtggtgagctcgatgtctgtagggaagtttatgtgccctcactttattatataaatgagctgatcttgctggactccagccattctggcatcaactttgtgactttgcttttattatcctctaaaatactgtttgtttgtttgtttgtttgtttgtttgcttgcttgcttgcttgcttgcttgcttgcttgcttgcttgcttgcttgcttgcagacagaagctgtcctagaactcactgtatagaccaggcaccaccacccagcaaaaatagtgttttaataagaaatgtcttaaggccccagtgttttatgtctacatacttattcatgaatatgtctatttgtttgctgtatttttagtagcaaacattcgttttgttttgttttgttttgttttgtttattcctctcagaattttataaggtggagtttgggtgagagaaaaccctgaagcagttgtctgcctgtacagggcaactggtatagagagcctttgaaacaaacattcttatttctgtgtacatagaggtccagaagaataggttttagacttgtaagaaaatgttcacttccatctggttgctgattgtcattctaaatcagatcttatatttgaacagcagactgatccctaatataccatgaacagaatccctgatttaaaacaacaatgggggctggagagctagctcagcgggtaagagtactgactgctcttccagaggtcctgagttcatgtcctggcaaccacatggtggctcacaaccatctgtaatgggttctgatgcccttttctggtgtgtctgaagacagcgatggtatactcacatgcatcaaataaatatttaaaaacaacaacaacaaaaacccctgtgttttaaatattcagtaatattatggtaattgtattttagcttgtgtcattgataaattgtgatgctaacaatgacagtgattacaactgcgctgttctgtgtagtcactcatgcagttcagaggtacacagtaagtaatgtctgggctggagagatgctttggtggtaagagcagtggctgctcttccagaggacccaagctccatccccagcacgcacatagtggtagacagccatctataactccagttccaggggatctgatgccctcttctggccttcatatcaggcatgtgtatggtacatagacatgcatacatgcaagcaaaacacccacacacataaaataaaatgaacaataaataataagaacaaagttatgtcagctgggatcatctaaatctagcaaatgttcacagagaggaggtcctttcctccggatggtaccagattaaccctttgagtgcagtgatggtttgggtatgacctaacattaatcctgtcctgtggtattttcagatttgttgatgttgaaattgattgttttacttttttagtattgtggagctcccagtttttgcatcttagaatgtctttgacttcctaggcctaggttactcgggttggcttattccacaatattcctagttacctctctcatcaactcttaaagtgctaaagtaaagcagtgcttgcttatttaaaagggtgtgttaagttgtctctggttttccttcctaaaatgtgtgtttttctgtctttttgtctcctcattaagaagatgtagatgatgatgcagaacacttgaaagaaggcagcaaagacaatcctgagcctctaaagtgcagacaagtgtggccaaaaggagcgaagcgagggctctccaagtggaagcaaagcaaggagaggaagacgggcttcaagctgaacctgtacaccccaccagagacacccatggagccagaggaccaggtgacgatcgaagagcagaaggagctttcagaggacaagggcagccccgtggggatggaacgggaggtgacagagaccgtggatgccttgctgcctcaggaggggagcagaagggaagagacaggcatacccgtgagtccacataaatcaccaggtggaaaggtagatgaggaggacctcatcagaggtgaggaggagggagaggaagagggagaggaggagggagaacgagaagaacaggaagaggaagaagaagtaactacagaaaaagacctagatggtgctaaaagtaaagagaacccggagcctgagatctccatggaaaaggaagaccctgtgcatctgggtgaccatgaagaggacgaggatgaggaggaagagccatctcacaatgaggaccatgatgcagatgatgaagatgatggccacatggaggctgccaacatggagaggggagacctcccaagagaaaccttcaaagacgcactagagggccaggaggcttttttagacctgagcattcagccgagtcactcgaaccctgaagtcttgatgaactgcggtgttgatctcacaatgtcctgtaacagtgagccaaaggagcttgctggggacactggaactgcacctgagtctgacgcggagcccccggaagaacagacacagaagcaggaccaaaagaacagcgatggtgtggatgctgagctcgaagagggaggcccagccgctgtggaaattgactccgagaccgcccaggctgttcagtctttgacccaagaaaacagggagcacgatgacacctttccagattgtgctgagactcaagaggcctgtagaagcctgcagaactatacacacacagaccaaagtcctcaaattgccaccacgctggacgagtgccaacagtcagaccacagtagcccagtttcatctgtccattcccatcctggccagtcagttcgttctgtcaatagccccagtgtccctgccctagagaatagctatgcccaaatcagccccgatcagactgccatcacagtgccacctctgcagaacatggagaccagtccaatgatggacgtcccgtcagtgtcagatcactcacagcaggtcgttgacagcggattcagtgacctgggcagtattgagagcacaacagagaactatgagaacccaagcagctatgactcaaccatgggaggcagtatctgtggaaacggctcttcccagaacagctgctcctacagcagtctcacctctagcaatctgacacagaacagctgtgctgtcacccagcagatgtccaacatcagtgggagctgcagcatgctgcagcagaccagcatcagctcccctccaacctgcagcgtcaagtctccccaaggctgtgtggtggagaggcctcccagtagcagccagcagctggctcagtgcagcatggccgccaatttcaccccacccatgcagctggctgacatccccgagaccagcaatgccaacattggcttatatgagcgaatgggtcaaagtgattttggggctgggcactacccacagccatctgccaccttcagccttgccaaactgcagcagttaactaatacacttattgatcattcattgccttacagccattccgctgctgtgacctcctatgcaaacagtgcctctttgtccacaccattaagtaacacagggcttgttcagctttcgcagtctccacactctgtccctggagggccccaagcacaagctaccatgaccccaccccctaacctgactcctcctcccatgaatctgccaccacctctcctgcagcggaacatggctgcatcaaatattggcatctcccacagccaaagactgcaaactcagattgccagcaagggccacgtctccatgagaaccaaggcggcatctctgtcaccagctgccgccacccatcagtcacaaatctatgggcgttcccagactgtagccatgcagggtcctgcacggactttaacgatgcaaagaggcatgaacatgagtgtgaacttgatgccagcgccagcctacaatgtcaactcggtgaacatgaacatgaacactctgaatgccatgaatgggtatagcatgtcccagccgatgatgaacagtggttaccacagcaaccacggctatatgaatcaaaccccccagtaccctatgcagatgcagatgggcatgatgggaagccagccatacgcccagcagccaatgcagaccccaccccacgctaacatgatgtacacggcccccggacaccacggctacatgaacacaggcatgtccaaacagtctctcaatgggtcctacatgagaaggtagacagcctggcagcccacccagcccactgggccccactattggattgatctgcacaaatacctttgaagagtacgatttcaaaaccagcattggtgtgaatgcaaaaacatttgttggcaccatttatttaaaaaaaaaaaagctgtatgcagcagaaagaaagccttatacaagttgtttttcttttttcctttttttcttttttggtacctttatttctgttacttttatataaaattctctgcaaaggaaggcctctcttaggactctagttggcagcggccacacgtcgtgcctgcttccattaaacagtgtggatacaagcccctccccaaatcacctgttttaatactgaacctccagcttttctccttcctgtctactccatggaaatgcctttagcatttcaattactgtatattttgtttaaggtgacccttcagcatgccgctaatgtctttgttagtgacagtgcattttgtagtactgtacaagtgttgtgctaacggtaagccatttcttaagttttttgccttgattagggtaccctaatttgagggttaaaaaaaacaaaacaaaacaaagctctatttttgttaattataaaactgtaaagagctacagagctatccccgtctggttagtgaagggggtttatcgctaaatgtttggtgtaaagttgagaagacctttttccattttggtggcaggctcctttggggggaggcagctttctgttttataaatgcacacttctgtttattgaatgaagcatatctcagtgtttatctgtcaggttttgaagcatttcatatatgtccaaatacttggcaggatttaaaaaaaaatagtgaatttggtgtaaagttgctattttatggaaatgcctctaactttacattttcattccatctgtagatttttctatctttataaaatattggagttattttttaaggaaaaatagaaaagtagcttgtgaatagctcaaactaagcttacaaatcgcatgtaaaaaagcagaaaagttatttgtgtctgtttctattgcgtccttttttagcctttgtacctggacaggtgacagtaagggccaagcaggagaggcgggcgcggccttgtataaaataggagccagcgggactcttgtatctacctgttctctttttagtcagttacttcaaaaaaaagaaaaagcaaaaacaaaaaaacaaaagctgtacattttaacataaaataaattatgatgagccatttctagcctctcgtgtcctgtcatgttatgattgatggagaatgaccagctgagctgtgtcatgtgtcacatttcagaacacatacacgatgggggaaataaattatttagtgtaaattgaagttatgagattttttttttctgatttgttttgactttgggggaggggttggcaataagtatgaatgagtactatctaataaaaccatcacctataccaaatacctatttaataaattaatttataatggattttaatgcttttccatgaaagttgactttatgctggtgcataccttctgtatgccaatcattgtctttaaataaagtgagtttggttttttctttttgactttgatcttcattttgcccagagctcccacatagataatccatttgcttcctttgtgccaagcacgtgtaaagccccagaggcctggtaccacactagcaagctgcttgcttttttttttttaaagacaagtcacaagcttctgactcatggtggtatgtctcaagattcaagtcttttccaaagtgtggaggttttactctgttgtgaatgattgtatgttttctttagtgtttatagtaacacacacaacatgaatgcttatacacattccatggcattcagagaaagttttgactgtgagttaaaatatttgcttacttgagcaacaaatttagaagtaaattcttggcttgttacctgtatgcgtttggctcactaagtttgcaaggcatctaagcaggcgcttgaaactctgcaggtcaaaccgtccataacttggcctcaagcaggcagagcagtgcatccacaccagcgcaaaaggccaccccggtgctcttgcccttgcttgctttctatgagtgtacggtggggttaacatccacattttacctttgagccatctgctcccaacaagccagtggagtaatctctcaaatggatgagggaggcttcaaagaaggcaaagcgagagcaaaatgtaattttgagagaaagaaagcatgctgtccgtcttctgagcagcagatgatgctgtgccgtttgtctggattgattgctagagcagatgggagtggctgagggtcccagcgctgcacatctggcaggaagctgttgtgtgtctaggaaccctactgaaaccccctcctccactttttatgtgctaatttagtatcttgtgtctttgggggtataggcactcccatttccctttgacagtagcctgtcaatcaatcagacctttgccctcttgcttgtttcacagtccaagggagcttatggatcaagtgctagtagctgttccacacctgccagatcagcacagtggttccttgtgacactgggagatggcttagatctgtcataactggacatgactgcttttagactggaatcctctgatagccctcatctttaaaaccagcaatatgttctctcctttgtaagagtgatcatctgatgccaacggcacttaaatagctcacatggtgcctacccaggtatgcaggccttgcttgccaacatactgttagaaatagtgacccagactgcctttgtcagcactccgcccccataaactacacacactgcccaggagtgggaggaacacaacaaagttaattgcccccaactcacccagctacaaattgtaaagctgcaatctatccagatgaccggaatcagctctcctaaacacgagtctgaaatggcccgaacttgtcacgtctctgccataaaatctgtactgctcagtgaatgcgggatcctttgttggaggactcgaacccagatgcagcctcctgccatctttctggggtggctttcctgtgtcttcctcctttacccactgatacccagaacgttatttccctctggtcttgagcatttcttccgcctcaagattccaagtcaaatttctagaatcttctgccccctcaaggctgtgtgcaccaagtgccagctcccccgtgtgttctcaggttccctctttcctactgaggaagagagctatggattatttcttaaaggttttgtttttatattaagtataggagtgttttgcctgcactgtatgtgtgtccctggtacccatggaagccagaagagactttgggtcccctggaactggagttgcaggcagttgtgagccaccgtgtgtgtgctgggaaccaaacctgggtgttcttcaccactgagtcaactctccagcataggtcaggaattcaaaaccagcctgggctgctcaggcagtgagaggctttctcagaccctcctagcaataaaggtttctcagtgagaaatgagctgcttgggattttttttctatcaaaggtggctaacccaccaagagccaatattccctaggtcacccccaccttgtaaaactttttttcaaatcttttcatctcccctgctctgtaaaactttgaagtaaaggccttggctcttgccggtttcctctttccttcatttccttctctatgctttccaaattagccaggctagggtagactgtgagattttgaacctcagccagtggagcagccaagctcccccttgcgttaaggataaaaggcaggccagcttggccctctgtgtgcttaccagccccatttggcttgagcacgccttattttacagtaagaagtggccttccccggttaacttcgagtttatttgagagcacaagagaaagcaggttccttcccaacaccccactaacttgtctgaggtggcctctccccaccatttcatctcccgtatcccacactgcattttattaccatctgcactttgtaatttgcttaatcggttttagaatgtactataaatctcaataatgctttttaaccaaacgaaaacgttgcttatgaagtctttaaacactaaactttctgttcctccattctcctacttctaaattccaggagtcagcaggaccagacagctaacactaggttctctgcttcaaaaggactccactccagggaaaggggggatgtggtatgaggtacggggacagtggctccagaaaatcctgagtgggactatgtatgttctatcctacatgtgcgttcaccttcagcgagtatgtcatgaaaatagaaatgctgacttgtctggatactgaatagatgagaccaacagagctgaggtcaaaaggagccagcaggatgctctgatgaaacgcctaagtaggaacgactttgaccctgggttcctaccccaggagcccttggctcataggacaccaagtgtgggtcatcatggagtccatctgctggcctctaccactccagtgttctctccctcagaaccatgagagccctgctttgtccagccaagcacctggcccaatgagcactgtctccagtcttgctgcctgacaagagcaggtgactcggtgtgttggcggtacagctttgcctgttgccttcgcaacgttgtggcaatgttttggttttttaaacttattaggaaaccaatattgtaactgttaagtgagtctctggtaatctcccttacctatgttaagagaggacccagccttctcctgaactaagggcacccagagcatcctcagaattcctggaaaccaacctgtccacaaggtcccaagctacaggtggcatgaaagtaaaacagcttccccaggagtcacagtgacctggatgactttacccagctgccctggactccagcaccctacagtaagaacatgtcttggattttttagttcacactgaagacatgggcccttcctatccttctccagcaggcattagacacacacacacacacactttctccaggacgctgtcgttcatgatgctccactgctggtgtcctctctcagcagcctctctctaggttccatcttctcagggctgctggttctggaagcccacatgcggggttgtgctgctgctgctgctgctgctgctttctcaagagtgaagaatgaccatcaggtgccagcttaactcagctcatnnnnnnnnnnnnnnnnnnnnaaccacacatctgcggtgtgagtaaaaaaaaacaaacctccctgctacccttactgaaggcaaaggagtattctggtcccctaaaactaagtgccctgcctctccttttctcccaaattgtgaggttacactcttccctgtctaaatttaccacaacccacttggatgctggcagctctggctatggcgatgcaaggaaaggcatttctgttcagaggctcaggacaccatgcctacccctgccaggtgcctgcgcacatgtacatggactgcactgaataagaaatgtgattctgtccaggcttcctcccaagtcctaaggcctgtcctgtaacacagcttaccaggcaaatttctgtggttgaaaaaaaaaatcaagctctatttttttatctttttataataacatgatttttccctttcagagccaagcatttaatcacaacacagtacccacacattaaaacaaaacaaaaaacagcccaaacaaaggaaacctttttttgcttccaacttaaagacaggagattgtggagagcggtaccttttccttacccagatccccctgcagctgacttggcctaccatgaggcaaagaactagactggaggagacagcgggcatcctccctgctgcgcccagcctttggtttcactgtctcatctccctgcccaccaaagcctccttgcagacgtgcttcagccttctgctctgggtgccagggtctctgatcctctctgaggaggccccctacagccctaggtcactgtcccctggcccggcctgtcgccgctgcttcaccagctgcttgtccagctctcggagttgcttcaagaagccccggttgggcaggacacagcggttcttagccacttgttgaatggcgtccaccaaagtcatgttcttgtggatcatcaggtaggccaggaccagagttgctgaccgacttcggcccatggcacagtgaaccaggatcttacctgcaggtggaggagacaggaaagaaagccagtgctgaacgggatggggttcctcaacccacatttactctgtcacccacagtatgacttgggccacagctccccatcagcaaaatggggacacagtttcttggctctttctttctttttctttttcttttgtttgtttgtttttgtttttgagacagggtttctctgtatagccctggctgtcctggaactcactttgtagaccaggctggcctccaactcagaaatccgcctgcctcccgagtgctgggattaaaggcttgtgccaccacgccagctctcttggctctttcataggcgtgttgggaaggcagtttctgtacaccgcacttgtttgctgatgatcacgtgataggattggtagcaggcagacgctacaactcttgcttggtaagagaaggcattaaaacatctgtgagatggcccaactccatgcctcagagagtggcctcctggaagcgattgactgatggttttaatgtttattcagtcatgtttagcagggttcaaatgtcaaagcataccccaggagactgactgggtgacacacacacatccctcccaccgggttccttgaccctcaagagcaacaggtgtccccaacccttcatctcctcttccagagaagactctgcctagaagagtctcccatttactgtacttcatgccggcctcctaccctcccctgtcctccctctctccccctccctcccttttgcttctactgtggatagaaaccagggtctcacccctgccagacaggcactgaactacactcgcagcctttcaaaacccatttctatatcttgtttatttcattaacagtttacatttgaggtctctacacctcagaatataaatagttctcttttctttctttcttaagcatcctcccaccccatgctgggaataaaacccaagaccttacacatggatggcaaacacatcctcaagatacatccccagcaagaaattattttcaaagcatatgccttccttttatttctttttgatgctggggaaccaaatccaaggccttgtatgtgctcaatacccattatttcactgacctagacccctggcccttgaaagtatatattttgaaactactggtgtgtgtgtgtgtgtgtgtgtgtgtgtgtgtgtgtgtgtgtacatggacagagtttccctgtgtaacccaggatgttctcaaactcatctcaacatcctcctgccttagtccctcaagtgccaggattaaacaatttaaacagaatgcatcaccacaccctgctagtagaacctgtaagcaattgactcttttgacagtgttaggatacaatctgacttagtccttgtcacatacacaaagacaatggtgccttagtatgaacaatgtcacatgcatcaaatatacaaataatcattgcttacactggggagggggcaggcgattgattcccttaaaaatgatgtacaagcaaccaggtccctcaggcctccacttggtggcgctctagagcccacccaggacacccgttggccctgtctcatttcagctttgacttaaaccttgttatcattgtccctgccttgcagatggagagacaggttcaggaggtgcaatttcaatttcttgccagaggtcacccacaatactaatgccagaagtatcttaatgcaaaactgtgttnnnnnnnnnnnnnnnnnnnnnnnnnnnnnnnnnnnnnnnnnnnnnnnnnnnnnnnnnnnnnnnnnnnnnnnnnnnnnnnnnnnnnnnnnnnnnnnnnnnnnnnnnnnnnnnnnnnnnnnnnnnnnnnnnnnnnnnnnnnnnnnnnnnnnnnnnnnnnnnnnnnnnnnnnnnnnnnnnnnnnnnnnnnnnnnnnnnnnnnnnnnnnnnnnnnnnnnnnnnnnnnnnnnnnnnnnnnnnnnnnnnnnnnnnnnnnnnnnnnnnnnnnnnnnnnnnnnnnnnnnnnnnnnnnnnnnnnnnnnnnnnnnnnnnnnnnnnnnnnnnnnnnnnnnnnnnnnnnnnnnnnnnnnnnnnnnnnnnnnnnnnnnnnnnnnnnnnnnnnnnnnnnnnnnnnnnnnnnnnnnnnnnnnnnnnnnnnnnnnnnnnnnnnnnnnnnnnnnnnnnnnnnnnnnnnnnnnnnnnnnnnnnnnnnnnnnnnnnnnnnnnnnnnnnnnnnnnnnnnnnnnnnnnnnnnnnnnnnnnnnnnnnnnnnnnnnnnnnnnnnnnnnnnnnnnnnnnnnnnnnnnnnnnnnnnnnnnnnnnnnnnnnnnnnnnnnnnnnnnnnnnnnnnnnnnnnnnnnnnnnnnnnnnnnnnnnnnnnnnnnnnnnnnnnnnnnnnnnnnnnnnnnnnnnnnnnnnnnnnnnnnnnnnnnnnnnnnnnnnnnnnnnnnnnnnnnnnnnnnnnnnnnnnnnnnnnnnnnnnnnnnnnnnnnnnnnnnnnnnnnnnnnnnnnnnnnnnnnnnnnnnnnnnnnnnnnnnnnnnnnnnnnnnnnnnnnnnnnnnnnnnnnnnnnnnnnnnnnnnnnnnnnnnnnnnnnnnnnnnnnnnnnnnnnnnnnnnnnnnnnnnnnnnnnnnnnnnnnnnnnnnnnnnnnnnnnnnnnnnnnnnnnnnnnnnnnnnnnnnnnnnnnnnnnnnnnnnnnnnnnnnnnnnnnnnnnnnnnnnnnnnnnnnnnnnnnnnnnnnnnnnnnnnnnnnnnnnnnnnnnnnnnnnnnnnnnnnnnnnnnnnnnnnnnnnnnnnnnnnnnnnnnnnnnnnnnnnnnnnnnnnnnnnnnnnnnnnnnnnnnnnnnnnnnnnnnnnnnnnnnnnnnnnnnnnnnnnnnnnnnnnnnnnnnnnnnnnnnnnnnnnnnnnnnnnnnnnnnnnnnnnnnnnnnnnnnnnnnnnnnnnnnnnnnnnnnnnnnnnnnnnnnnnnnnnnnnnnnnnnnnnnnnnnnnnnnnnnnnnnnnnnnnnnnnnnnnnnnnnnnnnnnnnnnnnnnnnnnnnnnnnnnnnnnnnnnnnnnnnnnnnnnnnnnnnnnnnnnnnnnnnnnnnnnnnnnnnnnnnnnnnnnnnnnnnnnnnnnnnnnnnnnnnnnnnnnnnnnnnnnnnnnnnnnnnnnnnnnnnnnnnnnnnnnnnnnnnnnnnnnnnnnnnnnnnnnnnnnnnnnnnnnnnnnnnnnnnnnnnnnnnnnnnnnnnnnnnnnnnnnnnnnnnnnnnnnnnnnnnnnnnnnnnnnnnnnnnnnnnnnnnnnnnnnnnnnnnnnnnnnnnnnnnnnnnnnnnnnnnnnnnnnnnnnnnnnnnnnnnnnnnnnnnnnnnnnnnnnnnnnnnnnnnnnnnnnnnnnnnnnnnnnnnnnnnnnnnnnnnnnnnnnnnnnnnnnnnnnnnnnnnnnnnnnnnnnnnnnnnnnnnnnnnnnnnnnnnnnnnnnnnnnnnnnnnnnnnnnnnnnnnnnnnnnnnnnnnnnnnnnnnnnnnnnnnnnnnnnnnnnnnnnnnnnnnnnnnnnnnnnnnnnnnnnnnnnnnnnnnnnnnnnnnnnnnnnnnnnnnnnnnnnnnnnnnnnnnnnnnnnnnnnnnnnnnnnnnnnnnnnnnnnnnnnnnnnnnnnnnnnnnnnnnnnnnnnnnnnnnnnnnnnnnnnnnnnnnnnnnnnnnnnnnnnnnnnnnnnnnnnnnnnnnnnnnnnnnnnnnnnnnnnnnnnnnnnnnnnnnnnnnnnnnnnnnnnnnnnnnnnnnnnnnnnnnnnnnnnnnnnnnnnnnnnnnnnnnnnnnnnnnnnnnnnnnnnnnnnnnnnnnnnnnnnnnnnnnnnnnnnnnnnnnnnnnnnnnnnnnnnnnnnnnnnnnnnnnnnnnnnnnnnnnnnnnnnnnnnnnnnnnnnnnnnnnnnnnnnnnnnnnnnnnnnnnnnnnnnnnnnnnnnnnnnnnnnnnnnnnnnnnnnnnnnnnnnnnnnnnnnnnnnnnnnnnnnnnnnnnnnnnnnnnnnnnnnnnnnnnnnnnnnnnnnnnnnnnnnnnnnnnnnnnnnnnnnnnnnnnnnnnnnnnnnnnnnnnnnnnnnnnnnnnnnnnnnnnnnnnnnnnnnnnnnnnnnnnnnnnnnnnnnnnnnnnnnnnnnnnnnnnnnnnnnnnnnnnnnnnnnnnnnnnnnnnnnnnnnnnnnnnnnnnnnnnnnnnnnnnnnnnnnnnnnnnnnnnnnnnnnnnnnnnnnnnnnnnnnnnnnnnnnnnnnnnnnnnnnnnnnnnnnnnnnnnnnnnnnnnnnnnnnnnnnnnnnnnnnnnnnnnnnnnnnnnnnnnnnnnnnnnnnnnnnnnnnnnnnnnnnnnnnnnnnnnnnnnnnnnnnnnnnnnnnnnnnnnnnnnnnnnnnnnnnnnnnnnnnnnnnnnnnnnnnnnnnnnnnnnnnnnnnnnnnnnnnnnnnnnnnnnnnnnnnnnnnnnnnnnnnnnnnnnnnnnnnnnnnnnnnnnnnnnnnnnnnnnnnnnnnnnnnnnnnnnnnnnnnnnnnnnnnnnnnnnnnnnnnnnnnnnnnnnnnnnnnnnnnnnnnnnnnnnnnnnnnnnnnnnnnnnnnnnnnnnnnnnnnnnnnnnnnnnnnnnnnnnnnnnnnnnnnnnnnnnnnnnnnnnnnnnnnnnnnnnnnnnnnnnnnnnnnnnnnnnnnnnnnnnnnnnnnnnnnnnnnnnnnnnnnnnnnnnnnnnnnnnnnnnnnnnnnnnnnnnnnnnnnnnnnnnnnnnnnnnnnnnnnnnnnnnnnnnnnnnnnnnnnnnnnnnnnnnnnnnnnnnnnnnnnnnnnnnnnnnnnnnnnnnnnnnnnnnnnnnnnnnnnnnnnnnnnnnnnnnnnnnnnnnnnnnnnnnnnnnnnnnnnnnnnnnnnnnnnnnnnnnnnnnnnnnnnnnnnnnnnnnnnnnnnnnnnnnnnnnnnnnnnnnnnnnnnnnnnnnnnnnnnnnnnnnnnnnnnnnnnnnnnnnnnnnnnnnnnnnnnnnnnnnnnnnnnnnnnnnnnnnnnnnnnnnnnnnnnnnnnnnn

SEQ ID NO: 1301 - DNA, 6909 bp, Mus musculus
ggcaaaggacaggcggaggctgaggaaggcagcggggagacccggtctgcagcaacaaagggcagcaagcgattggccgggctggaggcgaggtcttggtttcctaaagatgtctttcacttgaagagtgcagtccttcccattggtgaactaagacaactctccacgttgcctggcagtcagtcctctctttaaggatggttgtccctatgctgttgcttcacatgggctgggatcctctgcccttgtgttgaattgtgactttggaatgtgcaggttgtgttaagtacaaggcgaatctctatgggtaacgtctgtgttggagaagccatttgtcaaccatggtaaaacttgcaaacccactttacacagagtggattcttgaagcagtgcagaaaatcaagaagcagaagcagcggccctcagaagagagaatctgccatgcggtcagcacatcccatgggttggacaagaaaacagtctcggaacagctggaacttagtgttcaggatggctccgttctcaaagtcaccaacaaaggccttgcttcatataaggacccagacaatcctgggcgtttttcatcggttaaaccgggcactttccccaagccaaccaaggggtccaaaggaccgccgtgtaatgatctacgcaatgtggattggaataaacttttaaagagagcaatcgaaggccttgaggagccaaacggctcctccttgaagaacattgagaagtatctgagaagccagagtgatcttacaggcaccaccaaccatccagcctttcagcagaggttgcggctaggggccaagcgtgctgtgaacaatgggaggttactgaaggaaggaccacagtacagggtcaatagtgggagctcagatggcaaaggggcgccccagtaccccagtgcttttccatcctcactcccgcctgtcagccttctaccccatgagaaagaccagccccgtgccgatcccattccaatatgtagcttctgtttggggactaaagagtcaaatcgtgaaaagaaaccagaagaactcctgtcttgtgcagattgtggcagtagtggacacccatcctgtctgaagttttgtcctgagttaaccgcaaatgtgaaggccttgaggtggcagtgcatcgagtgcaagacgtgcagcgcatgtcgagtccagggcaaaaatgcagataacatgcttttttgtgattcctgtgatagaggattccatatggagtgctgtgacccaccactttccagaatgccaaaagggatgtggatttgccaagtctgcagaccaaagaaaaagggaagaaaactacttcatgagaaagctgcacaaataaaacggcgatatgcaaaacccattggacgaccgaaaaataaattaaagcaacgattgttgtctgtaaccagtgatgaaggatccatgagtgcattcacaggaagggggtcacctgatactgatattaaaataagcatcaaacaagaaagtgcagatgtgagtctggtgggaaacaaggagctcgtgactgaagaggatctggacgtttttaagcaggcccaggaactgtcttgggagaaaatagagtgtgaaagtggagtggaagactgtggtcggtacccctcagtaatagagttcgggaaatacgagatccaaacctggtactcctcgccttacccacaggaatatgcaagattaccaaagctttacctgtgtgaattctgtcttaaatatatgaagagtaaaaatattttgctaagacactcaaagaagtgtggatggtttcatcctccggccaatgagatttaccgaaggaaagacctttcagtattcgaggttgatgggaatatgagtaaaatttattgccaaaacctttgcttgttagccaagctcttcctggaccacaaaacattgtattatgatgttgagccattccttttttatgtccttacaaaaaatgatgaaaaaggctgtcatctggttggatacttctccaaggaaaagctctgccagcagaagtataatgtgtcctgcataatgatcatgccccagcaccaaaggcaaggatttggacgctttctcattgatttcagctatttgctttctcgaagagaaggccaagcagggtctcccgaaaagccgctctctgacctgggccggctctcctacctggcctactggaaaagtgtcatcttggaatacctctaccgccaccacgagaggcacatcagcatcaaggccattagcagagccacaggcatgtgcccacatgacatcgccaccactctgcagcacctccacatgattgacaggagggatggcaggtttgtcatcattagaagggaaaagttgatattgggccacatggaaaagctgaagaactgttcccgacccaatgaacttgatccggagagtctaagatggaccccaatgttaatttctaatgctgtggtttctgaggaagagcgagaagctgagaaggaggctgaacgactaatggaacaagccagctgctgggagaaggaggagcaagagatcctgtcgtccagagttagcagtaggcaatcgtctgcaaaagtacaatcaaagaataagtacctgcactccccagagaggcggccagtggccggggagcgaggacagttgttagagctgtccaaagagagcagtgaggaagaggaggaggaggaggaggaagatgatgaggaagaggaggaggaggaagaggaggagagcattcagacatctccccctcggttgactaagccacagtcagtttccattaaaagaaagaggccttttgtagtaaagaagaaaaggggtcgtaaacgcaggaggatcaacagcagtgtcaccaccgagaccatttccgagacgacagaagtgctcaatgagcccttcgacaactcggatgaggagaggccaatgccgcagctggagcctacctgtgagatcccagtggaggagggcggcaggaagccagttctgaggaaagcattcccacatcagccagggaagaaaaggcagacagaggaagaggaaggggaagacaatcatttcttcaagaccgctgccctttgtagaaaagatgtagatgatgatgcacaacacttgaaagaaggcagcaaagacaatcctgagcctctaaagtgcagacaagtgtggccaaaaggagcgaagcgagggctctccaagtggaagcaaagcaaggagaggaagacgggcttcaagctgaacctgtacaccccaccagagacacccatggagccagaggaccaggtgacgatcgaagagcagaaggagctttcagaggacaagggcagccccgtggggatggaacgggaggtgacagagaccgtggatgccttgctgcctcaggaggggagcagaagggaagagacaggcatacccgtgagtccacataaatcaccaggtggaaaggtagatgaggaggacctcatcagaggtgaggaggagggagaggaagagggagaggaggagggagaacgagaagaacaggaagaggaagaagaagtaactacagaaaaagacctagatggtgctaaaagtaaagagaacccggagcctgagatctccatggaaaaggaagaccctgtgcatctgggtgaccatgaagaggacgaggatgaggaggaagagccatctcacaatgaggaccatgatgcagatgatgaagatgatggccacatggaggctgccaacatggagaggggagacctcccaagagaaaccttcaaagacgcactagagggccaggaggcttttttagacctgagcattcagccgagtcactcgaaccctgaagtcttgatgaactgcggtgttgatctcacaatgtcctgtaacagtgagccaaaggagcttgctggggacactggaactgcacctgagtctgacgcggagcccccggaagaacagacacagaagcaggaccaaaagaacagcgatggtgtggatgctgagctcgaagagggaggcccagccgctgtggaaattgactccgagaccgcccaggctgttcagtctttgacccaagaaaacagggagcacgatgacacctttccagattgtgctgagactcaagaggcctgtagaagcctgcagaactatacacacacagaccaaagtcctcaaattgccaccacgctggacgagtgccaacagtcagaccacagtagcccagtttcatctgtccattcccatcctggccagtcagttcgttctgtcaatagccccagtatccctgccctagagaatagctatgcccaaatcagccccgatcagactgccatcacagtgccacctctgcagaacatggagaccagtccaatgatggacgtcccgtcagtgtcagatcactcacagcaggtcgttgacagcggattcagtgacctgggcagtattgagagcacaacagagaactatgagaacccaagcagctatgactcaaccatgggaggcagtatctgtggaaacggctcttcccagaacagctgctcctacagcagtctcacctctagcaatctgacacagaacagctgtgctgtcacccagcagatgtccaacatcagtgggagctgcagcatgctgcagcagaccagcatcagctcccctccaacctgcagcgtcaagtctccccaaggctgtgtggtggagaggcctcccagtagcagccagcagctggctcagtgcagcatggccgccaatttcaccccacccatgcagctggctgacatccccgagaccagcaatgccaacattggcttatatgagcgaatgggtcaaagtgattttggggctgggcactacccacagccatctgccaccttcagccttgccaaactgcagcagttaactaatacacttattgatcattcattgccttacagccattccgctgctgtgacctcctatgcaaacagtgcctctttgtccacaccattaagtaacacagggcttgttcagctttcgcagtctccacactctgtccctggagggccccaagcacaagctaccatgaccccaccccctaacctgactcctcctcccatgaatctgccaccacctctcctgcagcggaacatggctgcatcaaatattggcatctcccacagccaaagactgcaaactcagattgccagcaagggccacgtctccatgagaaccaaggcggcatctctgtcaccagctgccgccacccatcagtcacaaatctatgggcgttcccagactgtagccatgcagggtcctgcacggactttaacgatgcaaagaggcatgaacatgagtgtgaacttgatgccagcgccagcctacaatgtcaactcggtgaacatgaacatgaacactctgaatgccatgaatgggtatagcatgtcccagccgatgatgaacagtggttaccacagcaaccacggctatatgaatcaaaccccccagtaccctatgcagatgcagatgggcatgatgggaagccagccatacgcccagcagccaatgcagaccccaccccacgctaacatgatgtacacggcccccggacaccacggctacatgaacacaggcatgtccaaacagtctctcaatgggtcctacatgagaaggtagacagcctggcagcccacccagcccactgggccccactattggattgatctgcacaaatacctttgaagagtacgatttcaaaaccagcattggtgtgaatgcaaaaacatttgttggcaccatttatttaaaaaaaaaaaagctgtatgcagcagaaagaaagccttatacaagttgtttttcttttttcctttttttcttttttggtacctttatttctgttacttttatataaaattctctgcaaaggaaggcctctcttaggactctagttggcagcggccacacgtcgtgcctgcttccattaacagtgtggatacaagcccctccccaaatcacctgttttaatactgaacctccagcttttctccttcctgtctactccatggaaatgcctttagcatttcaattactgtatattttgtttaaggtgacccttcagcatgccgctaatgtctttgttagtgacagtgcattttgtagtactgtacaagtgttgtgctaacggtaagccatttcttaagttttttgccttgattagggtaccctaatttgagggttaaaaaaaacaaaacaaaacaaagctctatttttgttaattataaaactgtaaagagctacagagctatccccgtctggttagtgaagggggtttatcgctaaatgtttggtgtaaagttgagaagacctttttccattttggtggcaggctcctttggggggaggcagctttctgttttataaatgcacacttctgtttattgaatgaagcatatctcagtgtttatctgtcaggttttgaagcatttcatatatgtccaaatacttggcaggatttaaaaaaaaatagtgaatttggtgtaaagttgctattttatggaaatgcctctaactttacattttcattccatctgtagatttttctatctttataaaatattggagttattttttaaggaaaaatagaaaagtagcttgtgaatagctcaaactaagcttacaaatcgcatgtaaaaaagcagaaaagttatttgtgtctgtttctattgcgtccttttttagcctttgtacctggacaggtgacagtaagggccaagcaggagaggcgggcgcggccttgtataaaataggagccagcgggactcttgtatctacctgttctctttttagtcagttacttcaaaaaaaagaaaaagcaaaaacaaaaaaacaaaagctgtacattttaacataaaataaattatgatgagccatttctaaaaaaaaaaaaaaaaaa

SEQ ID NO: 1302 - DNA, 5292 bp, Mus musculus
atggtaaaacttgcaaacccactttacacagagtggattcttgaagcagtgcagaaaatcaagaagcagaagcagcggccctcagaagagagaatctgccatgcggtcagcacatcccatgggttggacaagaaaacagtctcggaacagctggaacttagtgttcaggatggctccgttctcaaagtcaccaacaaaggccttgcttcatataaggacccagacaatcctgggcgtttttcatcggttaaaccgggcactttccccaagccaaccaaggggtccaaaggaccgccgtgtaatgatctacgcaatgtggattggaataaacttttaaagagagcaatcgaaggccttgaggagccaaacggctcctccttgaagaacattgagaagtatctgagaagccagagtgatcttacaggcaccaccaaccatccagcctttcagcagaggttgcggctaggggccaagcgtgctgtgaacaatgggaggttactgaaggaaggaccacagtacagggtcaatagtgggagctcagatggcaaaggggcgccccagtaccccagtgcttttccatcctcactcccgcctgtcagccttctaccccatgagaaagaccagccccgtgccgatcccattccaatatgtagcttctgtttggggactaaagagtcaaatcgtgaaaagaaaccagaagaactcctgtcttgtgcagattgtggcagtagtggacacccatcctgtctgaagttttgtcctgagttaaccgcaaatgtgaaggccttgaggtggcagtgcatcgagtgcaagacgtgcagcgcatgtcgagtccagggcaaaaatgcagataacatgcttttttgtgattcctgtgatagaggattccatatggagtgctgtgacccaccactttccagaatgccaaaagggatgtggatttgccaagtctgcagaccaaagaaaaagggaagaaaactacttcatgagaaagctgcacaaataaaacggcgatatgcaaaacccattggacgaccgaaaaataaattaaagcaacgattgttgtctgtaaccagtgatgaaggatccatgagtgcattcacaggaagggggtcacctgatactgatattaaaataagcatcaaacaagaaagtgcagatgtgagtctggtgggaaacaaggagctcgtgactgaagaggatctggacgtttttaagcaggcccaggaactgtcttgggagaaaatagagtgtgaaagtggagtggaagactgtggtcggtacccctcagtaatagagttcgggaaatacgagatccaaacctggtactcctcgccttacccacaggaatatgcaagattaccaaagctttacctgtgtgaattctgtcttaaatatatgaagagtaaaaatattttgctaagacactcaaagaagtgtggatggtttcatcctccggccaatgagatttaccgaaggaaagacctttcagtattcgaggttgatgggaatatgagtaaaatttattgccaaaacctttgcttgttagccaagctcttcctggaccacaaaacattgtattatgatgttgagccattccttttttatgtccttacaaaaaatgatgaaaaaggctgtcatctggttggatacttctccaaggaaaagctctgccagcagaagtataatgtgtcctgcataatgatcatgccccagcaccaaaggcaaggatttggacgctttctcattgatttcagctatttgctttctcgaagagaaggccaagcagggtctcccgaaaagccgctctctgacctgggccggctctcctacctggcctactggaaaagtgtcatcttggaatacctctaccgccaccacgagaggcacatcagcatcaaggccattagcagagccacaggcatgtgcccacatgacatcgccaccactctgcagcacctccacatgattgacaggagggatggcaggtttgtcatcattagaagggaaaagttgatattgggccacatggaaaagctgaagaactgttcccgacccaatgaacttgatccggagagtctaagatggaccccaatgttaatttctaatgctgtggtttctgaggaagagcgagaagctgagaaggaggctgaacgactaatggaacaagccagctgctgggagaaggaggagcaagagatcctgtcgtccagagttagcagtaggcaatcgtctgcaaaagtacaatcaaagaataagtacctgcactccccagagaggcggccagtggccggggagcgaggacagttgttagagctgtccaaagagagcagtgaggaagaggaggaggaggaggaggaagatgatgaggaagaggaggaggaggaagaggaggagagcattcagacatctccccctcggttgactaagccacagtcagtttccattaaaagaaagaggccttttgtagtaaagaagaaaaggggtcgtaaacgcaggaggatcaacagcagtgtcaccaccgagaccatttccgagacgacagaagtgctcaatgagcccttcgacaactcggatgaggagaggccaatgccgcagctggagcctacctgtgagatcccagtggaggagggcggcaggaagccagttctgaggaaagcattcccacatcagccagggaagaaaaggcagacagaggaagaggaaggggaagacaatcatttcttcaagaccgctgccctttgtagaaaagatgtagatgatgatgcacaacacttgaaagaaggcagcaaagacaatcctgagcctctaaagtgcagacaagtgtggccaaaaggagcgaagcgagggctctccaagtggaagcaaagcaaggagaggaagacgggcttcaagctgaacctgtacaccccaccagagacacccatggagccagaggaccaggtgacgatcgaagagcagaaggagctttcagaggacaagggcagccccgtggggatggaacgggaggtgacagagaccgtggatgccttgctgcctcaggaggggagcagaagggaagagacaggcatacccgtgagtccacataaatcaccaggtggaaaggtagatgaggaggacctcatcagaggtgaggaggagggagaggaagagggagaggaggagggagaacgagaagaacaggaagaggaagaagaagtaactacagaaaaagacctagatggtgctaaaagtaaagagaacccggagcctgagatctccatggaaaaggaagaccctgtgcatctgggtgaccatgaagaggacgaggatgaggaggaagagccatctcacaatgaggaccatgatgcagatgatgaagatgatggccacatggaggctgccaacatggagaggggagacctcccaagagaaaccttcaaagacgcactagagggccaggaggcttttttagacctgagcattcagccgagtcactcgaaccctgaagtcttgatgaactgcggtgttgatctcacaatgtcctgtaacagtgagccaaaggagcttgctggggacactggaactgcacctgagtctgacgcggagcccccggaagaacagacacagaagcaggaccaaaagaacagcgatggtgtggatgctgagctcgaagagggaggcccagccgctgtggaaattgactccgagaccgcccaggctgttcagtctttgacccaagaaaacagggagcacgatgacacctttccagattgtgctgagactcaagaggcctgtagaagcctgcagaactatacacacacagaccaaagtcctcaaattgccaccacgctggacgagtgccaacagtcagaccacagtagcccagtttcatctgtccattcccatcctggccagtcagttcgttctgtcaatagccccagtatccctgccctagagaatagctatgcccaaatcagccccgatcagactgccatcacagtgccacctctgcagaacatggagaccagtccaatgatggacgtcccgtcagtgtcagatcactcacagcaggtcgttgacagcggattcagtgacctgggcagtattgagagcacaacagagaactatgagaacccaagcagctatgactcaaccatgggaggcagtatctgtggaaacggctcttcccagaacagctgctcctacagcagtctcacctctagcaatctgacacagaacagctgtgctgtcacccagcagatgtccaacatcagtgggagctgcagcatgctgcagcagaccagcatcagctcccctccaacctgcagcgtcaagtctccccaaggctgtgtggtggagaggcctcccagtagcagccagcagctggctcagtgcagcatggccgccaatttcaccccacccatgcagctggctgacatccccgagaccagcaatgccaacattggcttatatgagcgaatgggtcaaagtgattttggggctgggcactacccacagccatctgccaccttcagccttgccaaactgcagcagttaactaatacacttattgatcattcattgccttacagccattccgctgctgtgacctcctatgcaaacagtgcctctttgtccacaccattaagtaacacagggcttgttcagctttcgcagtctccacactctgtccctggagggccccaagcacaagctaccatgaccccaccccctaacctgactcctcctcccatgaatctgccaccacctctcctgcagcggaacatggctgcatcaaatattggcatctcccacagccaaagactgcaaactcagattgccagcaagggccacgtctccatgagaaccaaggcggcatctctgtcaccagctgccgccacccatcagtcacaaatctatgggcgttcccagactgtagccatgcagggtcctgcacggactttaacgatgcaaagaggcatgaacatgagtgtgaacttgatgccagcgccagcctacaatgtcaactcggtgaacatgaacatgaacactctgaatgccatgaatgggtatagcatgtcccagccgatgatgaacagtggttaccacagcaaccacggctatatgaatcaaaccccccagtaccctatgcagatgcagatgggcatgatgggaagccagccatacgcccagcagccaatgcagaccccaccccacgctaacatgatgtacacggcccccggacaccacggctacatgaacacaggcatgtccaaacagtctctcaatgggtcctacatgagaaggtag

SEQ ID NO: 1303 - DNA, 96594 bp, Homo sapiens
  misc_feature (659)..(1103): n = a, g, c, or t.
  misc_feature (13097)..(13318): n = a, g, c, or t.
  misc_feature (25404)..(26575): n = a, g, c, or t.
  misc_feature (66626)..(66645): n = a, g, c, or t.
atgaaactctcaaaagggaacctgaatttttcagggtatctggatatctggtctgaagacatctgtaatacagttaacaaagaatcctgtaataatctctctttcaaaagaatcataaaaaagttaagatgtcagatttttctcagccaggtgcagtggctcatgcctgtaatcccactactttgggaggctacagtgaaaggatcccttgagccctggagttcaagacatgcctgggcaacatagggagacccccgcctctatttttatttatttatttagattttttggtatcttcattttatcttatttattttgttgagatagagttttgctcttgttgcccaggctggagtgcagcgacggtgctcttgtgtaacgcctgttgagctacagacaggaaaaggcccatcatggtttctgtgtacgcctatgctgtttctaatagaaaggacaaaatagagcccaaacatctgttgaccagttaagtttgttaatgaaaccaaattgcagctggtttatcacagatcaaaagtgaggcaaattatagaaaggatgtatgaacaaagctggtttctaaaaaatagtggctaaagaattctaaacccacttgtcaaattaacaaaaatccttcctggattttgcttaaaccactgatnnnnnnnnnnnnnnnnnnnnnnnnnnnnnnnnnnnnnnnnnnnnnnnnnnnnnnnnnnnnnnnnnnnnnnnnnnnnnnnnnnnnnnnnnnnnnnnnnnnnnnnnnnnnnnnnnnnnnnnnnnnnnnnnnnnnnnnnnnnnnnnnnnnnnnnnnnnnnnnnnnnnnnnnnnnnnnnnnnnnnnnnnnnnnnnnnnnnnnnnnnnnnnnnnnnnnnnnnnnnnnnnnnnnnnnnnnnnnnnnnnnnnnnnnnnnnnnnnnnnnnnnnnnnnnnnnnnnnnnnnnnnnnnnnnnnnnnnnnnnnnnnnnnnnnnnnnnnnnnnnnnnnnnnnnnnnnnnnnnnnnnnnnnnnnnnnnnnnnnnnnnnnnnnnnnnnnnnnnnnnnnnnnnnnnnnnnnnnnnnnnnnnnnnnnnnnnnnnnnnnnnnnnnnnnnnnnnnnnnnnnnnnatgacatgaaaaattaaacttgcaattaatataatatgtattagttgaaatgataatttttatggtgatttagcctcttagaaatccttggaaaacattattagcttatgaattgaaaactctctttgttaatgagtagtgggaaagaacttagtgttactctaaaaagatggggaattaaatattcagttcaaccagcgttttattgagtgcctgctctgggcttgctgctgagttaggctcataaatataagttgaacaagattgatgtttgcagagatgaaatactggttgcttttgttttttctttcaatcacccttccctccagagtagatggctactattgccagagtgattcaaacattcaacaggtttgtgtgtgtatgtgcatgcccttccctgtgcattatggtgtcacctgctcctgcagtggcttcctattcatctgtcacgttcacacaccacagcttggcttttttcacagccaactttatttctgttttttttttttttgagatggattctggctctgttgccaggctggagtgcagtggcgcgatctcggctcactgcatccaccacctccggggttcaagcaattcccctgcctcagccttccgagtagctgggaccacaggcatgcaccaccacgcctggctaattttttgtattttagtagagatggagtttcaccatgttggccaggatggtctcaatctcctgacctcgtgatctgcccgccttggcctcccaaagtgctaggattacaggtgtgagccactgtgcctggcctatttctgtttttcatttttaaattatatttgtcttttttagagacagagtcttgctctattgcctaggctggagagcagtggcacaatcatagcccactgtggcctcaacctcctgggcggctcaagagatcctcttgcctcggtctcccgagtagctgggtctacaggtgtacaccaccacagccacctaattttttatttttgtagaggtagggtcttgttgtgttgcctaggcttgtctcgagctcctggcctcaagtaatcctccttccttgacctcccaaagtgctgggattagaggcatgagccattgtgcctggcccaacttaatttctttatcccttttgagcatatacctgttctagtcaggcacatggacttggtgtcccttttgtttgacagctcattcttagcttctgttatttcactttgatttccttcattcattccccgatacatttatttagcaaataggcattgaaaccctcttatgatcaagttgtggtcttgggaaatcttagggtatacaaagatgaatcaagcatgaatcctgtttttaagaattttatagtctagtaggggtgacaaggttaatacacaagtaagcataatactaagtgggaaatgaatgtcaaaacagtaaaaaagctaaaagcttcctgttagacaaagatgtttggggcttttgagaagttgtttgcactgggccatgaaggatttgaatttgggcagagggacggtggggcacttatccaggctcagcattatctttcaaggttcagtttcagtcccatccatccaagagatgttcatccatcctccacgtggtttcagcaaggtagtatagtcacagttgtttccagacttcttccttctgtaatcagaggaacacttcctttaaagcgaatcttatggggaagacaaatatatgtaaaacagttaaagtggagctgcactgttgggttcaaggtgctgcaatggcccaaagtttaacccacaaggggtacctgaaggtaatacccgaagtaactccttgtcacagagatctaaagagcctagtttgaaaacctctggagagacagaaagagtttgggctttggcatctgaattaaaatccttcatgacttaatggctctgagatcttggctaagtcaagcctgttttccttttgtaaaaacaacaatgctaccttacagagttgttttaaagtttactgataatctatgtaaagtacctggaccacagtaggtgtcaggaaatggttggtattattattattattatagtttagtgctttgttatttctttttttttaaacaatttattgaggtgaaactcacataacataaaatgaaaaaaccattaaaaagtgaacaaatcagtggcatttagtacattcagtgttgtgtcaccactgccactatcaagttccaaaacatttttattgatcccaaataaaaccccttacccattaagcagtttctctagatatgtccctgagactccaccaatctgtgttttgtctatggatttatctattctggatgtctcatatgaatgaaattatatgatgtgtggccttttgtgtctggcttctttcacagcataacgtgtttgaggtccatctacattgtagtagcatgtatcgaaacttcattgctttttatagttgtatagtattctagtgtatggatataccacagtttatctgttcatctgttgatggacatttgggctgtttacaccttttggctactgtgaatagttttgttatgaacatgggtgtacgtgtacttatttgagtatctgttctcaattcttttgagtctatacctagaaatggaattacagaaccatatggtaattctgtgtttaactttttgaggaaccgccaaacagtgctttgctatttcttaattgcttcttatatgttctgtctctagctttgctttgtattccccatagtacctaccacagggctgcatgcagggagcatcagctcgctaaatatttgttggtttttctttgattagtatttataacctcacctcccagttcacatgttttgggcctgaagcattgatttcagaggaaatagatgcatccaggatttgaaagataagaaatatcaccatatggatggcgtttcatgttgtcagacaacagatatttgttaaccaaggacactattttgagcaactctgccaataacctgagctgggtgctgatagaagaaaaataagtcaaggtcccttcccctaaacagttctgttctgtttcggaagatactgcttagatttgtggatgctcactcagttacacaatgggctttgaaaaaatccaggttttccaacagtgatccctttggggaaaaaaaagaaagaaaaagccaggacttatgaaagtaaaatagttaaaaataactgttagcaagtaaaactcaggatgacaaaagtgtaaactctattattaatctttgtttttttctaccactgttttttgcctcatccataatctcatgacttgagtgttatgacattgattttgaaacaacacacacagctttagtaaaagcttagaggaggcctcgcataatacttatgatccaggatattttgactcttcttatgctgacatgaatatttctgaatagtgttgatgtttatgtaataccagtgaagctaaaagctcagtgctggactaagcatttctctagatatgtttagaatatttgtaatgaatgatgtaaatagtgttatattataagaccgtatgatacaaccatataatttactgatattttgtagttaaaaataaaatgattcacaaccttagaaaatagaataatttaatttgatgtagcacaaatccccagaattaatttaggatgatttgctacctttttgatagccttttagtccaaccttcaagtttttatagaaaaaaaatgaaaagagaataatgattttagggttttcgcttgtgatagaatgtcctatctacatgtgaagcaaatccccatgctctgaaaaagagaaatagtgtggataattccaaatcaggaaaaaaaaaatcatttctatttggcttttgaatgaattatgcatttttttttcctgtggatttgtctttccagttagatactgcttaggctaaaatgaaattggttttcaatctattctcttgcttatatgaatttacagtggggccagtgggatgttggaaacaaatcagcctaagattaaaaaatttgcggtggataatatacaaagtggataatatacatgtgtttagttgagaattggctacagataagagacttctgattttgttcctctcctagctgtgtattttttttttttttttgaacactgtgattctgcttgtagcaaagagctgctgagttacatctgcttctgcctaattaactctgttggttggtgtcagatgagagctaattttgagattaaatcgaggagtggggtgtgtgtcgtggctgggggaggggagaaggaggatccaaggttgcttgattgttttacgtaagatcaaaatgcagttattcacaattgttcttttaaatttattttttgcttttcaagtaaaaataatcactgctgtcctaaaatgtgacttgtgtcaatacatatttactattatgtaaactggtacgtttttcttgtaggtgagcttattggtcatatctgggtagtccattcagtacctaggtgcctggtggcctttgggacaaacagcgaatgctgcccaggaatgtgaatgctgaccttaaaacaacttttgactgtctttttttctgataaatgttatatctgtttggctatttgagtagtagtgggtttttgtttttgttttgtttttccatgatgagattttttcttaggaatctatcacaaacctgatttttaaaatttgaacaggtctgggcttagggatgaaatttacttctataggcacttggctgggtccttggggcttcattttctgtctcaagtttcatatttataagaatccttcagtggtctaaaagaattattatatcaccaaatgtagtataataactcattggagctgtttgtcttgaatggttgtggagatacacggatggttgctgaatttaaggatgtccttatgtccaaatgaacatttccttttttcttttggcagatttgcctgaagacctggataatctccatttttgtcatggactgttaaaacgtttgaagttccaattctggtactttcccttattttattacatttttaaggtataaaatgacaatcttattgaaatgtgttggtaatggatataaacaattgttttatggatataaatgattgtgggtaaagatttgtgggctgggtgcagtggctcacgcctgtaatcccagcactttgggaggccgaagtgggcggatcacgagatcaggagtttgagtccagcctggccaacatggcaaaaccctgtctctactaaaaattcaaaaattagctgggcgtggtggtgggcacctgtaatcccagctacttgggaggctgaggcaggagaattgcttgaatctgggcggtggagattgcagtgagccgagatcatgccattgcactccagcctgggcgacaagagcaagactctgtgcccccccaaaaaaaaaaaatgattgtggtaaaagcttgtcatgaaggtatattttaggtatctattagttatgaaacacattttttttttttttttgagatggagtttcgctcttgttgccgaggctggagtacaatggcgcaatctcgactcactgcaacctctgcctcctgggttcaagcgattctcctgccttagcctcctgagtagctgggattacaggcgcatgccaccatgcttggctaattttttgtatttttagtagagacggggtttcaccatgttggccaggctggtcttgaactcctgaccttgggtgatccacccgccttggcctcccaaagtgctgggattacgggtgtgagccaccacgcccggctatgcattttgttttaatgtacgttcgtttgcttgtgtaacaaaacacctaaaagcaacttggcaatattgggcacttttcctgtgacctcttctactttctgcagttgtattttgtgcaatcaaattaaattagttgtgattcatcctgaataaatgatgaaagattaaataattacttggatacagtgaaatatcttctaatgaaattttgcccgaaaccattttacttgggaaagatcaatttcctgttctaaactaactgacagagaatgattctgtgttctatcctgaaagtggttgcactgtgaaagccagtgatttcattcctaaacacactgtgttccaagtctaacatttttgtcaagggtttatataatgaaacaaaagtgagtacttattagatttgtagatgacatagatgacagaatcaagattcaaaacaatctttagcaggttggaagataggcttaaatcaacgagatgaaattgaacggtaataaacgttaaattgcagcatttcaatttgcagaaggaaaggggtggaaagactcaacttgacagcactttttgaaaaaagatctgggatttttagttggactgcatgctcaccatgaccacttgtgtggcaggggtattgaggaagttcctgtaatttgggttgcatttataattggataatgcctgaactgtcatattttaagatggccaatagccaaactagtgagcaaccaagagaaagtggtgctttgaaacaatgtgatatgtggaagggttaagaaactgggatatgagtggtctaagttatggctggaggtagcatggggttttgtcgttagtggttttcaaaaggtacttgtttttggacatttgaaggcctctcatactgaagaaatactaagaattgtcttgggatccttccagggaataggactagttaggaataggaatagggtcgaagttatggggtggcagatttttgcttctctgagcaagaaatttagctagagctgtgcaacagtggggtgagctgcctcaaaaagtgacaaattatcaatcactggaagtattttaaaaatgtaaagactcattgcccatctatttgggatattgggcagggatcttttattggataactagaggttggactggatgaccttcagccccaagtttctgaatctgaggggagaatgagtagagtgaatttacagcttactgatcacagggacaatcttgtttaaattgcctcctttaaggtggcattttgggttggcatttaaaactgtactgtttgaacaagtatagttcaatgacccagctgtttttcagcaacattccaggatctctgagagcaaatactatattcttcagtatgtctggctaaagtttttaaggaaagatattattttcttctcttaggtatagtctgtctaaataaataaccagagataactttaattttgtattttgttataaaaatttcaaagtatatagatgttgcatttgatgaaagtgataactatatattgaatattagataatgtgtttatttaatcctctcagtagtcctgtaagggatataccagtattgcctacaagtaaagtgatggaagcttaagttatccagggttcctccactggacattgtggtagggctggggttcagacccaggttggtctctttgcagaggcagaactagctagagcaggcagttgtggctcaggtgagaacagtgatggacttagttggattttagaattggctgggcacagtggcttacacctataatcctagcacttttgagaggccgaggtgggctgaggtcaggagtttgagaccagcctggccaaaatggcaaaactccatctctactaaaaatacaaacattagctgggtgtggtggcacattcctgtaatcccagccacttgggaggctgtgcaggagaatcgcttgaacccagaaggcagagattacagtgagctgagattgcgctattgcactccagcctgggtgacagagcgagactctatctcaaaaaaaaaaaattaataaaaaaaattaatgatgttcgaccctttaatctgttattgactcttcccttgggtgaattccatcttctcccgagcctcagtttacccacaaagttctgcagtttaagtgacaagttatatgtgagcacactctgtacagtttaaactataaaaagaattaagaagtggatgttatcattggacaccaagattagagctcaggtttggcccaattcccaggccaaggctctttctccttgtagcctctttgtagatgtactcaataccagattggagatctagggtggtttttgtatataccaagcatctctcagaacaaatgccactgtccacctggaatcagatttgtatatatcttctttgtactgagctgtttaatgagctaactgggtattaagataactagaatgctctactacttaaaggtgaagggttatgttactgtattattttcagttttccaatttgtgggttagagggtatcatagacctctgttaaagggatggggatgtgattccatagaagtagctagatgggaagtttttttacgtatgagacttgggaaatacaatacctagctgaaagctggattatttactcttttttttaagtttaagattttttgaaataagtttaatgtactttcatcagattttttatatcatagacttattctttgatgtgtattttatgtttatggcagacatatacctcaaaccactttcatataattttgttaatttcaataaatataattaaatgtataatttagatgtgattatgcctcataaatgacttcatatagagaagtgaaacattctaaaaacaatttcttctcagactgtgacccaatttcttgttgaaaaatatagtcactgtggctgtgttatgtaatacctgcctgtcattacttcttgtggtcattctgtgtctgaaaaagtcatgctaaagaatcttttagtttatttgtgtaagcttcattattaagagactttcccctctttttatcctttaaggtcttgatttcccagttaaagatgttcttcacccgaatgcagtctttcctgttggtaaaataagacaaccatcaacattgcctgtttgtctgcttttgaatctcttaaggatggatgtttgtaagatgttgcttaatacagtctggaatactctgtccatttgttgaattgtaaatgactttcaaatgtgcaagttctgttaaatacaaagagaacctctatgggtaacttttgtgttgaagaagtcatttgtcaaccatggtaaaacttgcaaacccactttatacagagtggattcttgaagctatacagaaaataaaaaagcaaaagcaaaggccctctgaagagagaatctgccatgcggtcagtacttcccatgggttggataagaagacagtctctgaacagctggaactcagtgttcaggatggctcagttctcaaagtcaccaacaaaggccttgcctcctataaggacccagacaaccctgggcgcttttcatcagttaaaccaggcacttttcctaagtcagccaaggggtctagaggatcatgtaatgatctccgcaatgtggattggaataaacttttaaggagagcaattgaaggacttgaggagccgaatggctcctccctgaagaacatagagaagtatctcagaagtcaaagtgatctcacaagcaccaccaacaacccagcctttcagcagcggctgcgactgggggccaaacgcgctgtgaataatgggaggttactgaaagacggaccgcagtacagggtcaattatgggagcttagatggcaaaggggcacctcagtatcccagtgcattcccatcctcgctcccacctgtcagccttctaccccatgagaaagaccaggtaagcgaaggagtaatgttcgtgcattctcactactgtccttttgtcttttacggtttcacttaagttttatgtggacaaaagttctgaataaagtttgataaaattgaatgttttgccttagagcaggcttttgtattttaaaatgtatatattgtactgcattgtgtggaggacttcctcactggttggccaagaatttaatggaagagtcatgtggtttgtttttaagctctaattgctaactggttggtgtctgaagggaccaggaaggataatattgatctttcttcatccaggcagggtcatatatatttcagaaatctacgaaaaggccatcgtatatttttctctttattactattttcaaagaagaatctacagacttcttattttactattattatttttttgagacagaatctagctctgtcgcctaggctggagtgcagtggcgcagtcttgactcactgcaacctctgcctcccaggtttaagcgattctcctgcctcagcctcccaagtagctgggattacaggcacctgctaccacacctggctaatttttgtatttttaatagagacaggacttcaccatcttggccaggctggtctcaagctcctgacctcaagtgatgcgcccgcctcggcctcccaaagcgctgggattagaggcgtgagccaccatgcccagctagacttcttattttaatggtgataatctatgcttttttttttgagatggagttttgctcttgttgcccaggctggagtgcagtggcacaatctcggctcactgcaacctctgcctcccgggttcaagtgattcttctgcctcagcctacctagtagctgggattacaggcacatgccaccatgcccagctaatttttgtatttttagtagagaccaggtttcaccatgttggccgggctagtctcgaactcctgacttcaggtgatccacccgctttggtctcccaaagtgttgggattacaggcgtgagacaccatgcctggctgataatctatgcatgtaagaagttattttaatacgtcacctaaatccctcatttcaataaaaagtcattttttattgtccacttctctgtgttgtaggtgaatgtttattttgtctcatacagtatctttttaaaatactctgatttcttgggccttatgttatttctatagtatttataaatatatggcagaattctccttacattactgctaccactttaagtttttggttgagtaagatttgtctttgtttcaaagctacagtatttacttcccaaactaaacacaaagtagagcagcagaaagttatttatagttcatgtctagttttggggtttattctctgtcttttgggtgagcagatatattgatatcagttaattttattaatacatgttataaaacattaatcattgttgatagaaaggtggttttggctgggcagggtggctcctgcctgtagtcccagcaccttgggaggccagggtgggaggatcacttgagcccaggagttcaagactagcctgggcaacatagtaagacccctgtctctacaaaaaaatcaaagaattagccaggcttggtgaagcacatgtgtagtcccagctacttgggaggctgaggtgggaggatcacttgagcatgggaggtagaggctgcagtgagccttgattgtactccagcctgggtgatagagtgagatcctgtcccaaagataaagaaaggaagaaagaaaaggtggttttggccaggcacagtggctcatgcctgtaatcccagcactttgggaggctgaggtgggccaattgcctgagtttgagaccagcctggccaacatggtgaaaccccatctctactaaatatacaaaaaaattaggcaggcgtggtggggggcacctgtagtcccagctatttgggaggctgaggcaggagaatcccttaaacccgggaggcagacgttgcagtgagctgagattgtgccactgcactccagcctgggtgacagagcgagactctgtctcaaaaaaaaaaaaaaaaaacaaaaaaaaaaagaaggaaagaaatggtggttttattcatggtttactgcagccttgaccttttgggatcaagtgttcctcccaagtaactgggaatacaggtgtatgccaccatgcccagctaagtttttaaattttttgtagagatggggttttnnnnnnnnnnnnnnnnnnnnnnnnnnnnnnnnnnnnnnnnnnnnnnnnnnnnnnnnnnnnnnnnnnnnnnnnnnnnnnnnnnnnnnnnnnnnnnnnnnnnnnnnnnnnnnnnnnnnnnnnnnnnnnnnnnnnnnnnnnnnnnnnnnnnnnnnnnnnnnnnnnnnnnnnnnnnnnnnnnnnnnnnnnnnnnnnnnnnnnnnnnnnnnnnnnnnnnnnnnnnnncatgagccactgtgcctggccaacatttatttgttaactatatttttattttgttagtcttctgccacatttatttgatccttaggtggttgttgtgtttgtgtaaccaacctctagttctctgtggcagaatgtgggcataaagaaagaagtaaagttatgaaattttcttcttaataacatttgtttaaaagaaaatacaaaaagccacttaaatcctaattcatatgtctgacacagccaaatcagggacctctgtttttaattaaatacatatgtatatatatatttttgttttgtttttttgttttttttgagatggagtcttgctctgtcaccaggctggagtacagtggcatgatcttggctcactgcagcctctgcctcccaggttcaagtgatttccttgccttaacttcccgagtagctgggactacaggagcgtgccaccatgcctggccaattttttgtattttagtagagacggggtttcaccatgttggccaggatggcctcaatctcctgacctcatggtccacctgccttagcctcccaaaatgctgggattacaggcgtgagccactgtgcccagccttaattaaatattttttataaaagcttatactgtgaagaaattccttaagggactatagagccatttcttgatggatttggatatctttgtttttaaaaatatgtacactaccctaaggtatgttaaggttttataatgaacaggtacgtggactaattcaggtagctttaggcaatttaatagtatgtttcaataattttgtgatccaggggatactttttacttgtgatggaagagtcagtacaaattttccacagtatcttctgatccttcgctttaaccttgcccgtcatttcttgccaaccttatcatatttttttcaggcagcatctgtacagaagtatttttagtctaaaggaaaattcatgtctgaaagtgtctaggattgagagcagagtaatttattgcttagcaggcaattgttactgctctttttatgatgctgatctttaaattgtttagttagcatcatgctataatgaggaaagctgagaaatgttttctagaatttttacttgatgaaatttggagactaattctattaagtaatcatttgattcttaaaaaacaaaaataaataaaaatcagtttaaacaaagttggcaacatgtttgtattctttaatgaaatagcatttttttccagctgggtgcagtggctcatgcctgtaatcccagcactttgggaggccgaggtgggtggatcacctgaggtcagcagttcaagaccagcctgaccaacatggagaaacctcgtctctattaaaaaaatacaaaagtagccgggcatggtggtgcatgcctgtaatcccagctgctggggaggctgaggcaggagaattgcttgaacttgggaggcagagattgcagtgagccgagattgcgccattgcattccagcctgggcaacaaaagcgaaactccatctcaaaaaaaaaaataaataaataaaatagcatttttccttaaaaaatgtgagaaaattacaacataatatattaccctttgaaattaaaagtgatttaatagtttaaaaccatgtaaactcgctaagtaaatttaatagaaattcttagcccgggatccacaaatgaacttgggtgggtatcccacaaatcctctgaaatagagtgtgaagtcatgtgtgtgtatccatgtttttctttttttttctttttctttttctttttttttttttttgagacatagtttcactcttgtcacccaggctggagtacaatggcacaatcatggcccactgcaacctctgtctcccaggttcaagtgactcttctgcctcagcctccctagtagctgggattacaggcgtgcgccaccatgcctggctaatttttgcattttcagtagagacggggtttcaccatgttggccaggctggtcttgaactcctgacctcaggtgatccacccacctcagcctcccaaagtgctgggattataggcatgagcctctgtgcctggcctccacatgtttttctatggctagggtctatagcaagcttgtccaacccatggcccatgggctagatgcggccctgaatggctttgaatgcagcccaacacaaattcgtaaactttcttaaaacataaagagatttttggcttgcggcgtggtggcacacgcctataatcccagctactcaggaggctgaggcacaagaattgtttgaacctgggaggcggaggttgcagttagctgagattgaggcactgcactccagcctgggcgacagagcaacacttcgtttcaacaacaacaacaagaacaacaacaacaacaacaacatttttttgtggtttttaatttttttttttttaagctcactagctattgttagtgtattttatatgtggccctagacaattcttcttccagtgtggcccagggaagccaaaagattggacactcctggtctacatcttttgtcaaaggcacccaaaatgcctagtagccattttaaaatagtttgagtttcttatactaaatcatagtatgctaattgtcgacctatgatgattcttcctttggctgctgaacttggattcatatgtagattgattgtactataatttcctatatataagactttttctaatatatttgaaaagattatcattgttcttgatgtgcttgaagtcataggatttgccttgcattgtgggaggaaatttatgatataagtgaaaacagttcagaaatggagtgatctcaattacaatctagtcaactaatgccttttttttgagacagagtgtcactgtgtcacccagtctggagtgcagtggcatgatcttggctccctgcaacctcagcatcccaggttcaaacaattcttgtgcctcagcctcccgagtagctgggattacaggtgtgtgccaccacactgggctaatttttgtattttagtagagatggggtttcattaatgttggccaggctggccttgaactcctggcctcaagtgatccgcctgccttggcctcccaaaatgctgggattatagacgtgagctactatgccccatgcctggcctaactaatgacttttttttttttgagatggaatctcactctgtcatccagactggagtacgctggtgccatctcagctcactgcaacctccgcctcccagttcaagtgattctcctgcatcagcctcccaagtagctgggattacaggcacgcaccaccaagcccggctaattttagtatttttagtagagacagggtttcaccatgttgaccaggctggtctcgaactcgtgatctcaagtgatccgcctgccttggcatctcaaagtgctaggtaggattacaggcttgtgagccaccgtgcctggccatgactttcaagaagctgtttattctggttacttttttgagcagttacattaaatgtaaaacaaaataaaaatagtaagaataataactaacgttttgtaagtgttaaatgctggcactattccaagtgctttacatttattatctccttgacttgtcacaataactgcaagggaggtagattattacccttattttacagatgaaaaaatgaggctgaaagcttaagtgatttgcccaaggtcactgatagagctagtgagtggtgaagccaagattctgacgagacagtctgacctcagagctctttaccactgggcagtacactggtcaacagtggtggctttttttttttttttgagacagagtctcgctctgtcgcccaggctggagtgcagtggcatgatctcgcctcactgcaagctccgccttccgggttcacgccattctcctgcctcagcctcctgagtagctgggactacaggcgcccaccaccacgcccggctaattttttgtatttttagtagagacggggtttcaccgtgttagccaggatggtctcaatctcctgacctcgtgatccacctgcctcggcctgtggtggctttttattaacagtaaaagtatctcttccagttcttcaaatgattagaagcagttttgccccaacaaatagatttccagcattttaaatttggtagatgcaatgagcttattatagtttttaaagtagatactatttataatattagcaatatggaaaggcagtagagaaagtagtaagtctgtgtctaattagattgaacatcatcatcattccgatgcatgactgctaggaggaatacaatgcaagttaaaatagaagggctccttcctttctgaaatgtaattgcacatcttctgatagtctggaattcaaattgggtattaccacactggcttcttagcataaattctttgtatttatttaagaaagctctcttcggtgaggtgatatggaaatgaattaaaccactgaagataaaactttatctttgacttggtgagggaactcctaaaggatagtattaatgtttctcattaaaagtagtaaagctcaattaggtcagattatgaggactttggaaagtcacatattctaagagagacttccattatcactgcgcactttgtagcattaagattccatttgaacatttgagctttagcatttttataaaatcagtttagttccatttaaaataaattccatagtatttcactttagtgagaatgtcttcataaaatttattaagtgtcaagtcttggtctgtttccagtgtagtacataatgtgggaattctcattctaggttggcatcgtaattggaaggtgggacactttcagtatcaagtagggcttctgatgttttttctgttgaagaaatatttgtattagaatcttacaaaaagccttcaaacataaacaaaattacaaaaacagtgatactgtcaataagaaaaaaatcaaaatgatttttttttttttggatacagagtcttgctctgttgcccaggccggagtgcagtggcgcaatctcggctcactgcagctgccgcctctcgggttcaagcgattctcctgcctcagcctcctgagtagttggggattacaggcatgtgccaccatgcccggctaatttttgtatttttagtagagacagggtttcaccatgttggtcaggctgataagaatgattttttttttttttttttggagatggagtcttgctatgttgccaggctggagtgcagtggcgcgatctcggctcactacaacctccgcctccctggttcaagcaattctcctgcctcagcctctggagtagctagactacagacgtgcaccaccacgcccagctaatttttgtatttttagtagaaacggggtttcaccatattggccaggatggtctcaatctcttgacctagtgatccacctgcctcggcctcccaaagtgctgggattacaggcatgagccactgtgtctggccacaaaatgatttttaaaaggagttcagatgatcagaaatggggttgaaagacaaacgtaggacccttgttatgtgtggtcttggcttattcagttgtttattctatttctcctgccccttttagagagatacgttgttagggtttttggcactgttattaatatgaaatatttctacaaatagaagataaatgtacatcctacagcagttgcttgagttgtttacacacatgaattagataagtttatttttagattttcttttcttctgttttctccattctgttttctcctcttcagtccccttaaccctgccctagagcagaccctcctcatctgttctgggacttttccaatagcctgtactttatgaaggactattcattagtccatattgttctttgatgtggcaggcttccagaagtctctcagccctaggggaattgttcatagtctcaggcaactctggatcttttttggcagaaatgtgtatattttttatctgctaattatagagcctgaatgtcctcctctctgttgaccttcttagttttcctttgaattggtatcctttgtgttgcagatgtcatctttcttgaagagtgcttgattatgtgtatttaactgaaaatcgaataaatctctaaatattgtaaaatatgctcttcaaaataacctgcattttggaattggtatggataaagtcagttttagaatcactaaagtcagacagaaacctattgtaatgtgaaagacgaggtggatcaaatacttgctgttccagggtcatggaaggaaaaaaattgcagttcatgttcttcttataattaagcttcagaagttcttcacaatagcagtgtctgaggactgcttttgtgagcaggtagtaccagttgttgagacattgttgagagagcacatgaattgtctcaaactagttagttgggtcaagggaaagataaaatgaagggtgaatgagtctttctattgtactctgaggcatgacagcgtgttccacttttgagcttttatcaagatgggacttgtctagacttctaatgaaatgggcttcaggtaaagtagaaacattatgtcaagaggatttttggttgttcaaatgaatgttaaacattcttttaactctttggatcttagatagatttgatagttgtgatacctttactgtatgtaacacatgatcctgtcctgaatgatcagcagctttcaggagttactcttgtattcccagctacatttgtgatactttcagtgctaagaaaatctatattctgtagctttgaagttatttaacagttaagtactatttgctggtttattctgattttgtcttaaatgacaaatattttattcatcctttctcttcaaacattatttaacaaatgtacgttttaatgtttctcaaaaatgaaggtctatattctttttatatgttttatctttgtatgttatttctttcatctttttttttttttttttttttctgagacagggtctcactctgttacccaggctggagtgcagtggtttgatcatggctcactgcagcctcgacctcccgggctcaagtgatccttgatcctcccacctcagcctcctgagtaactgggactacaggtgtgcaccaccttgtctggctaatttttttttttcttttttttgagacagtcttactctgttgcccaggctggagtgcagccgtgtaatcatggttcactgcagccttgaccttcccaggctcaaatgatccatcctcccacctcagccccccaagtagcttggactacaggcacacaccactacacccagctaatttttgtattttttgtagagatagggtttcgccacgttgcccaggctggtcttgaacgcctgagctcaagcagttcacacacctcggcctcccaaagtactggggttataggcgtgagccaccgtgctcagccttttatttttaatatataagaaatgccttttttttttttttttttttaatttgagatggagtcttgctgtcttgcccaggctggagtgtagtggcatggtctcggctcactgcaacctccgcctcccaggttaaagcaattctcctgtcttggcctcccgagtagctgggattacaggcatgtgccaccactcctggctaatttttttgtatttttagtagagacgggggtttcaccatattggccaggctggtctcgaactcctgaccttgtgatctgcccacctcggcctcccaaagtgctgggattagaggcatgccccaccacgcccagcccattgttttatcatgacagtagcaatgtgttttaattgtaaaattcttgactttttgttttgtttataaacttccttttcttggccctgtgccttaaactacagtagattaggtgaaactgttctctgatcacactagcatttaaaatatgaacctgaatcttctcaggtactttgatctctccaatctattaatgtttctgagtacataaacatcaattagctcaccaaattaaagttagcaaatgcgtcagccatgtaatttgcatgtgacattttgagttagcagggccaagagggaagtatgtttttgtgagtgggtgtgcttatctctctgtcttcaggtggtgatggaaagttgtacatgtaagagaaggagttgtggcagtggatatgtgaaatgctaactgtacatatgcctctgcttggggcagaagcactttaccagagaagtctccaacagttgcaaactacatattctttttccttatataagtgaatcttttaattagtgtaatattatgtagagtgtatgttttttctgtttttttttaatgaaaggtgatattttgataaatctgcaaaatgagcaatatagacaacattttagagtgaatgatactagatttaaactatgaggctggtctctgcaaagatacaaagtaaatactaatcactggtctaagcaaaatccaggaaggatttttgttaatttgacaagtgggtttagaattctttagccactattttttagaaaccagctttgttcatacatcctttctctaatttgcctcacttttgatctgtgataaaccagctgcaatttggtttcattaacaaacttaactggtcaacagatgttttggctctattttgtcctttctattagaaacagcataggcgtacacagaaaccatgctgggccttttcctgtctgtagctcgacaggcgttacagaagagcaacctaactttacttacaagttcaatttttcttcctcagtatttttattataggtatacaaacattgtagttttgtctcccccatcaagtcggtcttttgttgttaatcttccatctgttagtccagtatacacttctcaccctgctttttagcattgcaaaatcttagcatgcagggaaaaaggtactattgcaggagaggtaattgagatatcagcgactcttccacaattcaagggaaggagtggaactagcctggtgaatttagataatttcttccgtcttctttgatgtcagtgagctgccatatggagagcagtgaggcctgcaggaaggaggtgagccttggtctgggctgcctagggtgttcagagtgacatgggctgagagccagaggcagagcttgactgtttctgttagtagtttctgatgtgaccagccctgctttttgtccaaggtttccctgtcatgcttgccaccctatgggtatgatgaagtttaagaaacagatcataaacattatcttgggaaagagaaacataagaacatattaaaatctagtaataaggccattaaaagatgactcccatttgatatttgaccaacttgttttcaaaattagtattgtaaacacttctgtcttataacaaaacccagctttagctgttgagccttgagttgtgagtaaagcagcagaaaacaggatctgctagtggaagagtattggctgtttgaagaacatcagctgttccaggtagactcctggcagtgtgtgagcagacctgggaaaggcaggcatggagggagctaggaaaatacttctctcctaacctttataatttataaaattagagtatttcataaatattaaaagagtagtacagtaaacactctatttctttcacatagattcaccaattttaacattttgccacattctttctcttcctatatgtgtgtatatgtatatgtttttatacatgggtgtgcgtatatatacagcacatttatatattcacaattttgactaaactgttggaaactaaattacaaatattatatttcacccctaaatacttaataatatatcaaaaatgttctcttatatactatactattacgcaaaaaattcggcagtggaatgagtgttaactgacagtccatatttccccaaatggccccaaaatctcatttataacttttgactttttttgagatggagtctcgctctgttgcccaggctggggtgcagtggtatgatcttagctcactgcaacctccacctcccaggttcaagcaattctcttgcctcagcctcccgagcagctgggactacaggtgcgtgccaccatgcccggctaactttttttatttttagtagtgatggggtttcgccaggttggccaggctggtcttgaactcctgacatcaggtgatctacccgcctaggcctcccaaagtgctgggattaaaggtgtgagccactgcgcctggccaacttttgacttttcatccaggatccaaccaaagatcatatattgcatttggctgtcatgtcacctttaatagagaacagttttccctcctttttgcttctgaagacattgacatttttgaagagtctagggtagttgtcttgtaggatgtcccacaattagtatttgtctgactgtatcctcatgattagattcagagtaaacatttttgacaagaatagcgtgtgggggtctgggagtggtggctcacacctataatcccagcactttgggaggctaagatgggtggactgattgagctcagaagtttgagaccagcctgggaaacatggtgaaaccccgtttctacagaaaatacaaaaaaatcagctgggcgtggtggcatgtgcctgtagtcccagctacttgggagactgaggtagaaggattgcttgaatccaggagatggaggttgcagtaagccaaggtcacaccactgcgctccagcctgggtgacagagtgagactctgtctcaaaaagaaaaaagaaaagaaaaaatactgtatgggggatgttgtatatttcttcttgtgagataccaggagataaataatttcagcttgtctcattactggtggtgcttagtttatcagttggttaaggtggcatctgctagatcttcgtttataaaggcgccttttcccttttgtaattaacaagtaatctgtgcaatgatactttgaaagcatgtgagtaacctttcacccagtgtgtattagttttctattgctgctgtaacaaattacagcaacttaatggtttaacacaacacaaatgtattgtcttacagttcggtaggtcagaagtccaacatgggtttcttaggttaaaatgaaggtgagggcaaggtaatgttcttttctggaggctctaggagagaatcttttcccttgcttttttgagcttctagaggctgcgcatattccttgactcatgatcccttcctccatcttcaaagccagcaatgttgcatctctctgactgttctttcacagtcacatctgcctcttaccacagcctggacagtttttcagcttttaaaggatgcatattattagattgagcccatttggataatccagataatgcccttatctcacagtccttaactttatcatatctgcaaggttattttgccaggtaaggttctgggcattaggaagtagacatttttgggggagcccattattttgcctgccacacagggtttagtattgtcacctaaatcaaattttgcattgggggttgcaaatcattgaaggttttgggctatggtgaaccatgatcaagtctgtttagaaaggaaagagggccaggtgcaggtagctcacatctataatcccaatgctttgggaggccaaggcaggtggatcacttgaggccaggagtttgagatcagcctggacaacatagtgagatcccatctctagaaaaaatttttaaaaattatccaagtgtgatggcacagaactgtagtcctaactacttgggaggctgaggtgggaggattgcctgagtccagaagtttgaggctgtaagtgagctatgatcgtgccactgcactctagcctgggcgactgagcaggactctatttcttaattaaaaaaaaaaaggaaaaaataaccagaaaggaattaatcacagtttatgggagtaatgctagctgaaggccgggggtcaagaggcctgagttttgagtctcatggtacatcctgagtcatttccaggagagcaggaacgggggctgcctcttgcctccacttcatgtccctttactcactagttgaagaactgaagaatnnnnnnnnnnnnnnnnnnnnnnnnnnnnnnnnnnnnnnnnnnnnnnnnnnnnnnnnnnnnnnnnnnnnnnnnnnnnnnnnnnnnnnnnnnnnnnnnnnnnnnnnnnnnnnnnnnnnnnnnnnnnnnnnnnnnnnnnnnnnnnnnnnnnnnnnnnnnnnnnnnnnnnnnnnnnnnnnnnnnnnnnnnnnnnnnnnnnnnnnnnnnnnnnnnnnnnnnnnnnnnnnnnnnnnnnnnnnnnnnnnnnnnnnnnnnnnnnnnnnnnnnnnnnnnnnnnnnnnnnnnnnnnnnnnnnnnnnnnnnnnnnnnnnnnnnnnnnnnnnnnnnnnnnnnnnnnnnnnnnnnnnnnnnnnnnnnnnnnnnnnnnnnnnnnnnnnnnnnnnnnnnnnnnnnnnnnnnnnnnnnnnnnnnnnnnnnnnnnnnnnnnnnnnnnnnnnnnnnnnnnnnnnnnnnnnnnnnnnnnnnnnnnnnnnnnnnnnnnnnnnnnnnnnnnnnnnnnnnnnnnnnnnnnnnnnnnnnnnnnnnnnnnnnnnnnnnnnnnnnnnnnnnnnnnnnnnnnnnnnnnnnnnnnnnnnnnnnnnnnnnnnnnnnnnnnnnnnnnnnnnnnnnnnnnnnnnnnnnnnnnnnnnnnnnnnnnnnnnnnnnnnnnnnnnnnnnnnnnnnnnnnnnnnnnnnnnnnnnnnnnnnnnnnnnnnnnnnnnnnnnnnnnnnnnnnnnnnnnnnnnnnnnnnnnnnnnnnnnnnnnnnnnnnnnnnnnnnnnnnnnnnnnnnnnnnnnnnnnnnnnnnnnnnnnnnnnnnnnnnnnnnnnnnnnnnnnnnnnnnnnnnnnnnnnnnnnnnnnnnnnnnnnnnnnnnnnnnnnnnnnnnnnnnnnnnnnnnnnnnnnnnnnnnnnnnnnnnnnnnnnnnnnnnnnnnnnnnnnnnnnnnnnnnnnnnnnnnnnnnnnnnnnnnnnnnnnnnnnnnnnnnnnnnnnnnnnnnnnnnnnnnnnnnnnnnnnnnnnnnnnnnnnnnnnnnnnnnnnnnnnnnnnnnnnnnnnnnnnnnnnnnnnnnnnnnnnnnnnnnnnnnnnnnnnnnnnnnnnnnnnnnnnnnnnnnnnnnnnnnnnnnnnnnnnnnnnnnnnnnnnnnnnnnnnnnnnnnnnnnnnnnnnnnnnnnnnnnnnnnnnnnnnnnnnnncagatggatgtatattatattcttttagtttttagtaaaaattcagaaaaataaacatgaacttgaggtaacgagcctctagaattcttcattttatttcatttcacaatgtttcagcagtcttctgcagttagttggaaggttttggaaattctgactaatccagttgttgaagaataactagttagcttaataaatatgttttctagagctgataaaaaagatgattttttcatctgatgagctctgaccctctataaaccttctaacttaactcattttccaccagctacagaaatgtaacaagatgccaacaattacatcctcatggagcatgtatactagcttataaaatcacccctttgttggaaaattgtgtaatatcttgatttcaatttagcatggcatgttggttagcagtaaatcttgctagtgtatgaacacaagcctgcaggcagtttggagaacattgatcaggtgtaaattgtatgtatttttctcgcttctaaaaattttatagcagaatgaaataaagagctagcattgagaacactttttcagttgttttttattttttatttttatttatttttattatactttaagttctagggaacatgtgcacaagtgcaagtttgttacatatatatacatgtgccatgctggtttgtaggttgttttttattttgacatgtatcttgtggaaagtgccttctctctcctgaaatccatgatttgtgtctctgaccacttaggttccccatttagtatgtgacacatagcaaaagcaaacaagcatagttaaaacgtgtatttgtgccttgtgaaatgtgcattataagcagttaatactagatttgaaggctgtacaaaaaacatgcaaaaagatattaatattaaatacttagtgcttattgtgtatattaagcatttaatatatacaatataattttgcatgaactctgaaagataagtactgttattaactgaattttacagatgaagaaacaggccaaataaggtgacttgcccaagagtacacaggaagtattggagctggtgtttcaatcctggtgcacaggcagagtgtagtgtagtcactttatcaccttctgcctctcatttcttcgggcgaaatcaacacatacctagtgaattcttgcaatatataaaacactgtattaggcacataatatggaagttaccacatatctaaatggtaataaaagtgatcagttgaggctaggcatggtggctcacgcctgtaaccccagcactttgggaggccaaggcaggaggatcacttgaggccaggagttcgagaccagcctgggaaacatgacaaaaccccatctgtaccaaaaatacaaaaattagctgggccaggcgcagtggctcacacctgtaatcctagcactttgggaggctgaggcgagtggatcacctgaggtcaggagttcgagaccagcctgaccaacatggagaaaccccgtctctactaaaaatgcaaaattagccgggcgtggtggcacatgcctgtaatcccagctactcgggaggctgaggcgggagaatcacttgaacccgggaggtggaggttgcgggagctgagatcgtgccattgcactccatcctgggcaacaagagtgaacctccgtctcaaaaaaaaaaaaaacattagccgggtgtggtgacacacacctgtaatcccaactcctcaggaggctgaggcaggagaatcacttgaatgccggaggccgaaggtgcagtgagcagagatcacaccactgcattccagcttgggtgacagagcgagactctgtctcaaaggtaaaaaaaaagaaacatgctaatacatacagctgttattccttttcaaacgatcattggagtgatcatcacttttagagcaattgaaattttaagaatgaataataacaaccaacatttataaaatgctttactatgaggcaggcactacttcaagtgctttgtgtataacctgtttgtaaggtaggactattcattcttcgtttacaaaggaagaagctgaggcatgtcaggtgaaaggacttgcccaagattacctagctattaatgtggtagagctggagccaggatttagacccaggcatccaagctccttgatctgtacatgtaaccattatactacattacctctcattttcctgatgaagaaaacttcttttaatgagaaggtattgaaaatagtttcatattaggttcttataaacatgagcctttaagtgcctttttactgtttataatagacgtcactgagaagattgttaaaatttataatatgatatcattaaagtagcttttcccaaatgatgttctgaggaagaaggaagtactctacaagaaattaatgatgctaataatagtctgagatttacagtacctgagtagttctaaaatttaccttgcctaacccaagatgatttgacgatgggcctctctcctctttgtcttcatagcagccattcacttgtctagaaatctttgcatttggttaagcagtttggatagtgctgatgtaaggttatagtgctaattcctttgcttatttcttctaaatacacatcccaagggaaaccattgattaattaaacttggagtttgtccttcagaatagaaaaccaaaaatcatcaaattcaccccttgtctctattaatgtattgatttagtaatatttatgtaattctttaaatgtagtataaaactttagagttgcaggagatctttgagatcaccaagtccagggttttaaggctaaggttcaaggagcccttttttctggggtttgtagacctctgaaattatatgcaaaaagagtatttttctggagcttcttgcccctcctctccttcagcaggtcatttgacctaggccagtggttcccaaactttgctgcacattagaattactggaggagcttttaaacgttagatgcccagatcacacctccatgctgcttaaataaaaatgttggagtgggagtcaggcattagaactttttgaagtttccttgtgatgccagcatgcatcacatgctttcttctttaatagatgaacaagtaggatctacttatgtggctgaggaagcaatctagagatgttaattggtcagggctctgcttcctgctaaaagagattttagagatcgttctgaaggagtcttgtggggaagtggctctggagctagaatgcttaggttcaaatcccaagttttcctcagctgactaatagggatgataatatagcactgaccacactgggatagtcgctgcctgagctacagaggtggtgagcttgtcctcagcctcaacagaaaggtcagctgaacagactccaaggcagtggagggacggcagcccccagcactccactctgccatactgtttgggaaggaaaagctgtaaaccgatgtcctcattaccttctaacgaagacctcctctcctcttgctctcttacgccaagaatggctagaatccgtttctctttgtggctccttccaccccacctcatgttatttaagtaatcagaaaaggagtctattattttcagagtaacacatgctccttgtacagactttgaaaaacagaaagatttggagatgatacattatcactgcaaatttgactataaagataactactgttgaaagtgtgtattttcttccagtcttttttccttttttcctacatgtaaatatgtatgctatatttaaataaaaagaagactgtgtgagctatataattttgtatcttcctttctaaatttaaaatctgttgtgagccttttcccatattcttgattattctttgaagctgactaaatagctgcatagtatttatgtctttatccttcaaaatttaaggtgctcctaaatcttctgctattacaaataataccgctactaaaaatttgtgcatgtgtggataattatttcccatagaatagattactaaaggaggtaatactgaggcatgactatgaattctttttctaaagctttggaagcatattatcaaaaactgttccaaaaagatagtaccaatttatacttatgggcagagtataagggagtgtgggcatctaattgattcttaatgcttaccttttgtcatgttaatgtagtagagggaagaatggatccttaggagttactttgcatttctttgattactaatgacttggacattttaaaatgattaatggccattgctaaataacagtgttgtggttatttccccatccttattcctatgccctgcagataagcatcttcaactctttcaaccacatttagtctggcttcttagggaagttggaggtctgtaatattcttacgctgttgtttcttatttttaaattgtagacattatctgttgacttcttgcgagtgtagataaggataaaggtccctcatacacatacacttttctctttccctttgcccctcttatctcaatatacactacttttatgtaggtaagtatatgtattcagtgcttatatttttatgagtttgtaaatattattcacacttgagccatcaaaattttttgttgttgtttttttgagacagggtctctctctttcagccaggctggagtgcagtggcgcgatctcagcccactgcaacctccacctcctgggttcaagtgattctcttgcctcagcctccaaagtagctaggactacaggtgcacaccaccatgcccagctaatttttgtattttttgtatttttttgagatggagtctcactgtcgcctaggttggagtgcagtggcgcgatctcggctcactgcaacgctccatctcccaggttcaggcgattctcctgcctcagcctcctgaatagctgggattacaggcgtgctccactacgcccggctaattttgtgttttttagtagagacggggtttcaccatgttggccaggctggtctcgaactcctgacctcaagtctgtataaaaaagcctgtatatgttctgtaaagacgcaaccatccacttttttcccctcaggtattttatttatatatttggagacagggtctttctctgttgcccaggctggtgtgcagtagtgtgatttcagctcactgcaacttccgcctcctgggttcaagtgattcttccccctcagcctcctgagtagctgggattataggcatgggcaccaccccaaccctcgactaccccaggtgttttgaattgaggttagttgactccacacatacagaggtccaactgtatataaagtaaagagtaaaagttttacctcattggccctgtgtgttcttctctgaaaacagctttccaaaggcagccacacttggtggtttgtatgtattcttacagggctttttaaagcacttgtaagctaatattatacctacgtttatgtatttcttgtaacagaaattgggatcggactttggtattttttcttttgaaaagtttttagatatataagacatatatgagtacattcttcttgaaaaagttctaatagcagaaagaaagtgtcacacaaactccctgagtctcacttaccttatctgtaaaatgggaaggattatatattcttcatagggttgttaattagaatttaatgaaattatgcatttaggtggcctaacacagtgcctattcaataacaaaaatgagctagttattttgaacatgtatcagctttggaatttttaatgaagagcattttggcatattactgtatagtttgacagtggtcttttgatttgctcagtcctttttcagggtcttacagaagaaaaggagagtcttacatgttttccttcatagctttgtatgctgtaaatatgagtttagtttaatagcagagtttttctttcttttttgaattaattatttggattgcttcctctctactgccttcaagccaaaagctcagagtttcccaaaccaaagtgtgcctcaatcacaatttttaccagttttatacaatctgtattaattattttatcttttttttttttttgagatggagtcttactctgtcacccaggctggagtgcagtggcacaatctcagcttactgtaatctccacctcccaggctcaagcgattctcctggctcagtctcccaagtagctgagattacaggcgtgcaccaccacgcctggctaatttttatatttttagtagagagggagtttcactgtgttgcccaggctggtcttgaactgctgaccttaagtgatcctcgtgccttggcctcccacaagtgctgggtttacaggcatgagccactgcacccagcccctgtattattttcttaatacttgctttcacattaccgcactaaagaggcataataaccaaatgccgtgcatggaaaacagtacagttgacccttgaacaacacaggtttgtgctgcgctggtcaacttacgtgctgatttttttcaaccaaatctaatacagtattcatggatgcaaaatgcacacatacagagggctgattttttgtctctgtgggttcttcagggccagctgcaggacttgagtatgtgtggattttgttatagtctgaggtcttggaactgatccctcatgtataacaagggatgacaatattaaaaaattacttatttgggggataattggatacatttgaatttggattacatattaagggaacttaatggcattaatgttattgttcttcaatatgataatggcattttgattatctaggatgtctttatgagttgggagatgccttcggaagtatttaatggtgaagtgtcttgatgtttgcagcttactttcaaatggttcagcaaaaatcatactaaaatatgtatgtataaatatatgtgtgaatatagacagatatagataaagatatgaggcaaaagataggacccctaattgttgaatctaggtgaagggcataccagtgttcattatgctacttcaacttttctgtagggctgaaagtttttcaaagtgtaaacttggaaaaataaatgtaattagaatatttacttaaaattaaattgcctcattttctttatcttagtagatttactaaaaaaaaggagtctatatcattattgtaagtggaaaacaagcattccttgccataaatagaagataactgtaaaagttattattttaaaaagtttcagctggatattgttgtctgccaaggctctgagcctgaggcctgctctctcaaaagaagattaacaagcattagaggcgttaaacacaatattagcaccaaaatgagactttcttcttgacttaatgggaaggtatgaaagaaaattgaaaagggaacaagtttctcattctgtgtgattcagctcacctcataacatctcaagtctcacctcaaggcatcttgagtaccactagtgatagaatcccacacttggggaaatactgtatcaggtgatttcagtgtaatgtgttagaatgaaagtaaatttttatattaaatactgtttatagtgcccattatgtcttttttaaaccttgtatgttggtttatcatcatcattattattatttggtagtctcgataactagagctagctgcatggttagctgcgtgatgtcctggcttagggcagatgtcagatattgcagtctaaattattattggggtatacttattctattttatgatatgcagtgttgcctgactctcgaagcataataaagccaattgagatctttaaaaaattaattattattgatttcttactctgaagttgctcttgtagtgggtttttgctatatatattttttctttccttctttttttcttgctacattgttcctgctgttatttggaaggcactaggacattttgcctcttgaacaatgaaaggatccagatcgtgtctgtctcacattttgttatcccagtacaagactcaattgaataaaacatattacccatctggcctggaaatctcagtggcactcaaaataacttactaacaagttgttggatcatgatatcttgagattttctgaaagttcagcttctttttagctgttgctaagagagaaatttcattgacatgagggacacgaggacatgtctgcacactgccagttgttttagaggcatttggctctgccgccttgcagatggttagactctgggtggtgggtgaatgtatgctgattatcttattgaattaaggtaaccttttgtcattcattgaattctgcagaccagttggtcagtgagcagctgctccatgtggcttggtttgggttttgaagtacacaaaaactatcttaaagggtggtcagtctaatccaggtattcaacaaagcaatattgaaagccttcttccccttttgacactgttttctgttctgatggaagtgaatgagcaaaaatatttttactttttgctcaattaactaaatgattgaagcaaaggtttatggaatggccgaataagaattttttaacctagtgctttaagttgaagaaaatacactttcataatatttggtgtcagaaacattctacttttatggcatggtcttatgtttgaagatacgtggtagagtttttaaagtttatttttacaaatatctagaaactaaaaagcattcttttttatcatgcatgcttaataacatcatcttgacaaatactagctgcataacttttggtttgtagggttgttttaagatcagttttttgtttgtttattatattttaagagacggtgtccctgtcttgcccaggctcgtcttgaactcctgagctcaagcaatcctcctgcttcagcttcccaaataactggaataaatctgccatattttttctatatggcttccatttcagtttctagaaactctttcaggaggcttcattttaaataaagaggttcttaattgtttttagtaaattgctgaaattgtatggctcatttctcttctcagagatttttatcttgagctgatccttttggttttactgaaggtgcaatataggtaacctcagagaaagtgactttagccactagttgatttgcttattgtcagagagaaatcatttaacagtgattgatgaggaactgtttaatttctccagtttagtcacctgttgggccctagagcctttcgattcagagctcactgtttcatttgcatttatatcctagtaactatcataatgtctaccagtatttattaagcacatattctgtgctgggtgtcgccgtttatatatgctctttcattttgtcctcaccacaactttatgaggcaggtcttgttagctccatgttagagatgatacagcagcctcccagggatgttcattcacttgtctggtatcatgcagatagttaatggctgggccatattggagtccagggccttcagactctcaggctcatgctcccttctgccctgctgctgttttaatgaaaatcagccttgttctgaaccacagttttacaatgaagcttaagattaaactgaaaatgctcaagttctctgttagggcttcagattctatgtctatacttgtcttattaatggtaaaaataatgtaacaacattaaagaaaaattttgaagggtgaaacactgtttagactcttgccaccttaatacaaccgttttgtttttgcttatttccttccagatttgtttatgcgcgtgtcctttcacacaactataatcaaagcatatatacagctatgcagttttttttttaaacatagtgttattttatacatattttctttttaaatgttcttttttgtttttgagatggagtctcactctgttgcccacccagactggagtgcagcggtgcgatctcccctcagtgcaacctctgtctcctgagttcaggtgattctcctgcttcagcctcccttgtagctgggattggccatgcctggctaatttttgtatttttagtagatacagggtttcgccatgttggccaggctggtctcgaactcctggcctcaagcaatctgcctgcctgggcctcccaaagtgctgagattacaggcgtgagccaccacgcctggctttaaatgttgttctttaaaaagacttttcccacctctttgaatttcccaatctcaacgaggtcccttttataattcgaacaaaggaccatatgctttttcttattagcctttattatagtctaattatgtatttatttgtctggctattttgtaacttaagttgtcccctctaaatggaaaagcttcatgaagacagggaccttatttctgctgtatggatgcaagcagttatttattaactaagattaagcttctgtttatctgttacctcatctgtcagaaacagttggacagattttcaccaaacttagaaggtttttgaagggcatctgtggtgatcaggagacacatgacatatattttctgatcctgtgtctgagataacatacagagatttcaaacatgagacctggctgggtgcagtggctcatgcctataatcacagcaatttgggaggctgaggcaggaggatcagttgagtccgggagtttgagaacagcttgggcaacttagcgagaccccacctctacaaaaatacaaaaattagacaggtgtgatggcatgcccctgtagtcccagcgacttgggggtgctgaggcaggaggatcaatcacttgagcctgggaggttgagtctgttgagtctgcagtgagccatgatcacaccactgcattccagcctgggagacagaacaagactctgtctcaaaagacaaaaaaccccacgaaaaaccaaatatgagaccatgagacctatattgaagggcccaagggcagattgtcaagatggcagaccttggtttgcactttagagttgggtagcttcttaacttgggctgttccacatcttaatctaggatgagcagcaacaaggatgtctttatttaataatgaccaacaagtctcccagtcacatactgactaatttcaaataaatgcatttgatcttttcattttcattttgcttgtttaaatataaattgtctattgaaagagtttttttttctttttgagacagagttttgctcttgctgtccaggctggagtgcaatggtggatcttggctcattgcagcctccgcctcctgggttcaggcgattctcctgcctcagcctcctgagtagctgggattacaggcatgcgccaccacgcccagctaattttgtatttttagtagagacggggttttccatgttggtcaggctggcctcaaactcctcacctcaggtgatctgcctgcctcggcctcccaaattgctgggatgacagatgtgagccaccatgcctggcgtttttttgtttttttttttgatatggagtcttactctgtcacccaggctggagtgctatggcacgatctcggctcactgcaacctctgcctcccgggttcaagtaattctcctgcctcagcctcccaagtagctgggattacaggtgcccagcaccacgcccaactaatttttttgtgtgtttttagtagagacggggttccaccatgttggccgggctggtctcaaactcctgacctcacgtgatccacctgcctgcctcagcctcccaaagtgctgggatgacaggtgtgagccaccaagcctggcctttttttttttttttttttttttttgatatggagtcttactctgtcacccaggctggagtgctatggtgccatctcagctcactgcaagccctgccttctgggtccaagtgattctcctgcctcaacctcccaagtaactgggattacaggcacacaccgtcatacccggctgatttttgtatttttagtagagatggggtttcaccatgttggccagactggtctcgaactcctgacctcaagtgatccacctgccttggcttcccaaagtgttgggattacaggcgtgagccaccatgcctagccctcatatggtttatgagtacttaagacatgtttgattcaatttaaaaaataattacaagctgggcatggtggctaatgcctataatcccagcacttagggaggctaagacaggaggattgcttgagcccaggagtttgaaagcagcctgagcaatatagagatactctgtctctacaagaaatttaagaataggctgcaacactcactctaaggggagcattgtgaggtataccaagatgagtaagaacaatatggtttagcatgccagaacaaggaagtttcaggtgctagaaacacagacatcctcagctcaaacaggaacgcccagaacagtatacaagaaagcctggagctggagtcagaagactggctcccatgtgtggtgtcctaactctctctagacctcaatttcctcatatgtttaataaggataacaacctactcttcagcccacctgagaggacaggatgcttcaagaaagacagtgagcagcaggtcctttaaaaatcaaaggaaaacaggctcctggataggtgtgagatagaagtgaattatggcacatacgagagcaacaataaattatcctttactaacagtaacctaagggaaatgcccggcattgtgtctggcacagactagatactcagtagttcccttctcacacttgctcagccctgtttgaacccagacagagagcagctcaaaatatgcaagtattacatactcacagaacctggagacaagagaagcggcttctaggcacatgggctcccatccttgcagcagctggtatagaggttgcatgacaacttgtgaggattctgcagtagcgtgggctcagctacatgacctaaataaaggtctctttcaaccctgagattctgtaagtttctttttctttagacagagtctcactctgtcacccaggctggagtgcagtgacacgatctcggctcagcgcaacctctgcctccaaggctcaagtgatccttccacctcagcctcccgagtaggtgggactacagttgtgtaccaccatggctggcaaagttttaaagtttttttgtagtgacagggtctcactatgttacccaggctgattttgaactcctaagctcaagcgatcctcccacctcaggctcctgagtagctgggactacagtcttgtgccaccactcctggctaattaattttttttttttttgtagagagggggttctgctatgttgcccaggctgggtgaactcctgggttcaagtgatcctcccactttggtcttccaaagtgttggggttacaggcatgagccactgtacctgtcttagtttatgttttaaagtcatcgagagacatgaaaactaaatggtcctaggttggaggaagaaaacttactgtaaaggacagtattggggaaaactggcaaatttggaatatgtactgactgttagatgatactcttatatcaatgttaagtgtcctaagtctgataatacattatggaaatgaagagaatgaccttgttcttaagcggggtgaatgatcatggtctttacaacttattctcaaatgattcacaaaagagagataaagcaaaagtggccagttttaaagggcatatgggtgtttattgaattattcctgcaacttttctataggtttgaaattttttcaaaataaaacttttttgcccaggcatggtggctcacggctataatttcagtgctttgggaggctgaggtggaagtatcgcttgaggccaggaattggagaccagcctgggcaacatagagagatcccatctctacaaaaaatgaaaaaaaaaaaaagccagatgtgatggcatgtgcctgtggttccagctgctcaggaggctgaggcaggaggatcgcttgagcccaggaatacaaggctgcagtgagctatgatcatgccactgcactttagtctgagcagcagcaaaataaataaataaataaataaataaataaaataaaactttttaaaggtcaccgaggctgctgtgtggccaggggagctatagaggagcaagggtagaggagggcaagcctgggaggaggcctttgtgaggatggaggcatagactggggttttgacagtggggatggagagatgaggacagatctgaaatatgttttgaagaacatatttaacagaacttgctcatggattggaagagattttaggggagagagagggaggtagatgttccccacttggtgcaccctgatggttgcagactgaattccaatagaatcttctccccaaggtctttttattccctctctcttttcctcaattcagccactctatgagtagttaatacaggtatttatttcacagatgaggtgagactcagggagatgaaatgactcatttagagttatcaggtgcagacagaaattttactctacccagaaaaccaaaatataggcatgaaatcagtgttcttcaaactgaattgtctctcattaattgattgtgaaatcaacataatgagttcctatcagcattaaagaaaaaaaaaagagaaacagaataaaaatatagcatgccttgtgtaaaagggtaagtaatgtttcatgaaacttctattttagtttaatattcacatatgtgtatagtaggtcatgatgtgaacgtatttcttacttgaagttatgaaaaattggaaaggcacatacaggatcattgtagaaggaacttatgttatcacagaggtcctgtagtccccatgggaataagaaagcaaaagacaaattcacttgggtggttactgtaggttgtcatatgttgtttatttcttcagtgactgataggctgtaagtctgtcagtttcttagttgttttcttagttgatttttcttttcttttcttttctttttccgagacagagtcttgctctgtcgctcaggctggagtgcagtggcgcaatctcggcacactgcaacctctgcctcctagttcaagggattctcctgcctcagtctcccgagtagccaggattacagccatgcgccaccacacccagctaattttttgtagttttagtagagacagggtttctaccatgttggccaggctggtctcaaactcctgacctcaagtgatccacctgcctcggcctcccaaagtgctgggattataagcgtgagccaccatgcccagcctttcttagttgatttcatagtcatcctgtacttccagtcttgccattagcaaatattgagtacttgctgtgtgcagggttagaagttacttctttgtgtgagatctatgttttgtgtgtgggtggtgtgtgtggggtgtgtgtgtgtgtgtatgtgtgtgtgtgtttgtgtgtttaaaagtagacttttttttgaagagcaattttagatttacagcaaaattgagtggaaggggcagagatttctcatgtactccctacccctacacatgcacaattttccccattatcaacctcccccaccagaatggttgttacatctgatgacacattgtaattgcacagccttatcacccaaagcccatagtttacattagggtttactcctggtgttgtatattctatgggtgtgagatacatgtttaaaaatattttgtattagataaattggggataatagtcatttcaagaacaaaatgttggataaattaaattagctaataaacacagagtgctttaaacattcctagtgcaaaataagatcttgttgtttgtggtggtggtggctattcaggcttaaggtctagattccacttagtatgtaagtaaataatagcaatcctggctgtcatctgtatgtgtaatgtagtaatcagttttgtttagctagttcttatgtgtagcacattaaagcaatcttgaatagtgaggggacctcattactagattaccattaaatggtaatgttaagtgaccctgaaaccaaagtaatggaaaattgtcttcctttttttctttttttttttttttcccttgagatggagtcttgcactgtcacccaggctggagtgcagtggctcatggcaacctccacttcttgggttcacgagattctcctgcctcagccacccaagtagctgggattacagatgtacgccaccacacccggctaatttttgtatttttagtagagatgaggtttcaccatgccggccaggctgatctcgaactcctgagctcaagtgacctgcccacctcagcctcccagagtgctgggattacaggcatgagccactgtgcccagcctgtcttcctttttctcaaacatttaatttgctgtttcttgatcacatatcatccttctttcctttcaaggtcaggggagataattttttactgtatgtactgctgcatcttcacacaaattatcatctgaaaagccttctcagatttgacaaatgaagtctcttttcattcccaggaggaacttgttaaaccaatgaagttcaaaattctaattcctgttcctttctagtgtgcaccactttattcatcttgaataaacatacaacctcaagcatcctacaaggcaaatagattcctttttaattagtggctctatacacagagttttatcatcatgaaatttataaaccaggaagggaacaaatatttacacttgcaacttcatgtcaacattgcctactatttgaagagctctgaaattgtaaatgtatcaccccctccttcttcccccactccccacccctgccggcttttaaactatggcagtagaaaaataggtttcaactttctaggagcacatctctcctatgtggggaatgtggcagattctttatataagtgctctttctttgtgactggcattacttttttttctcacaaagatttgtttcagaagctaatcttcatttttttggttgttgctttttgtagtactatttctaaggcatctccaagtagaaaggcaaaattttattttgagaagttactgctttcatagttacacagaattatttctcaatttaagtaggccttttattccaggacaaaattaagccagtcagaaggtttctgggagaaaaataatgaagagctgaggttttgtatgttaatgtgggcagtctaatgcttgataaaagaaaacttttggctgggtgtggtggctcatgcctgtaatcccagcactttgggaggccgaggtggtcggatcacctgaggtcaggagtttgacaccagcctggccaacatggtgaaactccatctctactaaaaatacaaaattagctgggcatggtggcgcatgcgtgtagtctcagctactcgggaggctgaggcaggagaatcgcttgaacctgggagactgaggctgcagtgagctcagatcgcaccattgcactccagcctgagtgacagagtgagactccatctcaaaaataaaataaataaaataaagaaaactttttttttgtttgtttggcccttgtcagggacagattccgtctcagaaaagtctcgctctgttgctcaggctggagcgcaatggtgcaatctcggctcactgcaacctctacctgccggttcaagcgattctcctgcctcagccttcccagtagctgggattacaggcatgcgccaccacgcctggctaatttttgtatttttagtggagacagggtttcaccatgttggccaggctggtgtcaaactcctgacctcagataatctgcccacctccgtctcccaaagtgctgggattacaggcatgagccaccacacccagccaagaaaacttttaaagatgtgtaaatatgcagtgatttaaaaatctcagttgaagcttgttaaaatgtatcaaaataatttaggaaaaggggggctgattttgccaaaatttgggagatgcatactttttttcaaggctttactgcagttttaaaaaatattttattgttttgtaggcagcttctgaaccagagtaggctcagagactccctttattgcagttttgatgctgcagaaagtgactgcttaatttcagctgttgaggatgttggttatactatgcctggatcaaaaaaatgattttacattgcttagtttgttaaaatatgtttaataggttaatctttttttcaaagcatcaaaaataattaagatgaaatatcagataaaccctatgtctagaatgaataatttagttctaaacatcctggatgctaaggagaaaagaacaagatgttggtttataaaattcttattgtcaaataaagaagcatagaagtttgaagaaagataatttttttgtttttattttttctctctgaatttaggagtaatttatgtttgggttctaatcctatgttatcatcaaagagtaataacattggcaatcttccctcccattctgcttcatcctccccactaaagggaaataccagattgtaaaagaaaaaaaaaaagcatgctggttgtataaaaagaaacattttaaacaaataagaaatatatatattgaaatgcagtctccctgaatgatgctaaacccctgtccaagtaggcatttctcagcccacagaaagggatggcattaaatcacagctcaatggagacatttttatgaggagctgtgatggtttgtgtttagcaaacatgtattgggcatctcagatttgcctgttagggatgcaacagtgagtgagatactatttgttcccttaagaaactcaaagaggaaaggggttgacttgttcagtcagtgacttatgaaatatttcatactcattcatttacagagtactttttgtaggtatagtacagcgtggtcagccagggagactatagtgggtgcattagtaactaaccatacaactaatgctaatgttgcgggctgactgggtttggggtgaacaaatgacccctaaagctcaggagttctagaccagcctgggcaacacagtgaaaccctgtctctactaaaatacaaaaaattagccgggtatggtagcatgtgcctgtaatcccagctactcgggaggctgaggcaggagaatcacttgaacccgggaggtggaggttgcagtgagccaagatggtgccgctgcactccagtctgggtgacagagcaagactccatctcaaaaaaaaaaaaaaaaaaaagacatttgttttggctggggaaggctttgcagagggaggtaacttctagattgagatttgaagtcagagtccatccagaaagtagggaagacattttatgtagagaagtaacaagctacagggatcagaggtatgaaccagggtgcatgtttgggttatggtgagtggtgtctggccaaactgtgtggctcagggtctttctgcttcaccatctttagcatagaagccttccttgtgctcacttgctcatctcattctcacaaaatagctgcttcatatctaggcaccatctctctattcccacaggggaaagagggaaagtgccaagggtaacagcggaaacgtcttcctttttattcaggaaatgagggactccccaaggcttctgcttatatttcattggcttgagctgagccgtacaaccatcactagtggcaggtagtctgggatgtcaagaaagtagcttcccagtctctttggttagaaggcaaaggagaagatggtgggaatcggtttgcatcagtcactctacacattatctgctttgttagggcagcattatcttagtattgttaccaagttcagggtcttttctggggtgatcaagcatcctgggtcgcctgggaccaagtggttttctgggttgtaggactttgagtgctatagcctggaaagccctaggaaaaccaggatggttggccatcctagtctttccccatatcctctgttgtccaaaaatatggaagcaggtcatttcttgacataggagctgccttgactgggcttaaaaaggcctgaaaggcagcttaataatttacaatgagaaataaatgatattggatcaggggaggatactggaagaagagctccatgggatttgcttggtgctcgtgagattttgactgacaagagatcttagggctactatattacccaaattcaggggactctgttcactttgccagcagcctgggattaattctgtagtgctaatgccattctgagaagcctttcaatgaatctgagctcagggttcttagtccccctgttactgaagcttctccccagacagtgtcgtttttgttttttccttcctttctaagcttctggtgctgactagtctccccttctaatggacagtgtttagatacgttattgtctaaaggtagatctggccaggcatggtggctcacacctgtaatcccagcactttgggaggccaaagctggcagatcacctgaggtcaggagtttgagaccagcctggccaacacggtgaaaccccgtctctactaaaaatacaaaaattagctggacatggtgacaggcacctatagctgagatccattgtgagtgccattgcactctagcctgggcgacagagtgagactccatctcaaaaaataataataaaaataaaggtagattaaaaaaaaagagacataatttgcgttatcgtaaaatttacttttttaaagtgtgtaattcagtggtttttagtatgttcacaaagtcattcaccactgtctaattccagaacatttttcttaccccaaaatgaaatcctatacccattagcatcactgcccatttcctgcttcctttagactgtggcaaccactcatctattttctgtctctataactttgcgtattttagacatgtcatataaatggaatcctatggtatgtggccttttttaaaaatcactggcttctttcactgagcataatttttcaagttcttttaagctgtagtatgtatcagtacttcattctttataactgccaaataatagttctttgtatggatataccacattttatttcattcattcattagacattgatggttctactttctggctattatgagtagtagtactatgaacatttgtgtacatatttttgtgtggacacgtttttacttctcttggctgtatacctagcagtggaattgctggtcttcaggtgtgtcttactgatgtttttttttgagatggagttttggtctgtcgcctgggctgaagtgcagtggcgcaatctcggctcactgcaacctccacctcccaggctcaagcaattctcctgcctcagcctcccaagtaactgggattacaggcgcacgccaccatgcccagctaattgttgtatttttagtagagacggggtttcaccatgttggccaggctggtctcgaactcctgggctcaagcaatcctcctgccttggcctcccaaagtgttgggattacaggcgtgagccactgttcctggccttatcttactctctctttttttttttgagacggactctcactctgtcttccatgctggagtgcagtggtgcagtcttggctcactgcaacctccacctcccaggttcaagccattatcctacctcagcctctggagtagctgggactacaggtgcagctaatttttgtcattttagtagagatggggtttcaccatattggtcaggctggtctccatctcctgacctcaggggatccgcctgcctcggcctcccaaagtgctgggattataggtgtgagccactgtgcccaaccatctttaagcctccttaaggaggctgtgtctctaacatgccctgttggttttatagttggactctcactggacagcctcgtttttctaagatttgggggttataaggatcagagttgtccccagttggctcctttcacctcgtccataaggttgttgtgaggcttcactgaggtaatctgtataaagtaaggtgctggcctgtaccctgtacatcactcagtagtggtgatttcactgccctttgcctcctgcctttggcttctggctatctccaaacaccccatgccttctgtgctccaccctctgttgaaacacaggaatctaaaaccattcattgatactttttgagtgattatactgaaaacaattgcatgttgtctcatgcagaattttcgtgttaaaccctgtgttgcaaggatgccattaaccagcacacagatggcggtggagattgattgattgagatggggtttcgctgtgttgcccaggctggagtgcagtggtgtaatcgtagttcactgtaactttgaactcctggactccagtgatcctcctgtgtcagttttccaagtaactgggactacagtctcatgtcactgtgcctggctaatttttaaaattattttatagagctggggtctcgctatgttgcctaggctcttctcaaactcctggcctcaaagcgatcctcctgcctcagcctcccaaagtgttgggattaccagcgtgaaccaccacacttggctggggatggagttttagacaccagaggcttccttccgaggttgacctagaaagcacccttggtgggtgccatgggatgggggaatacagtcaaaaggaacctgctcttcccgctgcgcctccacctgaggtggatgtgtctgctggggctgctggagtctccatcttccactttaacttcacttaagagctgaaagctctgccccttcttcaagattttccctgctgtctccccttccctgctcaaccagagattcctcttattcttcctcttgctattagtattaatctggctcactgactcttttccttaacctcatcctaaaactgtctgatgcatattttatattttcttgcatgtttgacttttagttagtattttacagtaatttcgttctgcagccatcctcttatctgataccctggaactcattcctgtgcctatcagttctcacctctggtaattaaactttgtaaaaaagaaatgtgacatttggacatattctcttattagtaaaggtattattgtgtatgagactaatgctgtgcatctataataagttgtttcaccttgtgaatactaatgtaatttggaaataaacctttctttgttaaagactttttctacatgggccacgtttttccagacctatttcctaataatttgtggtttttaaaggtatgtcaatagagatgctgtagccagcatggctggattctgttagataaacattttgtgagattgcttaccttaaacaattgtctttaaaagttaatttcttccctaatgtgtcagtaaggaaattctatagtatttaagaagcctgataaagtccagttaaaacattttgcattgctctttaaacatcttttctgagggttgatgtgttcgtgtttgtttggttcacatagtttcttctgaattttaagaaagctttgtcagaatcagtaacttgcctatagtgtatttttcatgaccatatggctttcttcatcaaaaacagctaagtaaaaatttcagtgaataatagtatatatatatgggaatgtattcctcatcatttgtatgctcttgagagagtgactcatgtactgttttctattgagttcccgaaagtttataaagagatgacaaacaattggctatgggattgaaataatgcacatgtaaaatggaagggaaaacatggaaacagtttcttcctttgttcttcccttaccttgatgaaatttttaccacttaacgtttttcagtaaagtcaaggtcagtatcagagcctagtacggttctgcttgccgctgtctgaggattacctgtcttattacagaatgtacatgctcccagaggagaagatacagtttgatttcaggatgacaaacagctcttctgggacaatagtgtcaagtataaaaggattataaaggttttaggaccatgggatggtttgaaggggaaagggtgaaatgacagttaaggttggcatcaccgaggtcccagttgttggctgccccctacttctcctgttcccctctggcagtattttacagatgtatttcctttgacctttcctttagtaggaagttgtaggctttaagatccagcagaaaaaaattatgagccatttgtgaccctcttgagcagtccttcaggtagaacacatttcataagagctagtgaatggtcttgggtaattaaagctcactttatgattatacagtgtggtggccagcccagagggaacatcacaaatacacattatgaatgtatagaattgagactttatacctggagactgttggatgacctggtcctctgcccccaggcctacccttctgcccatcctcatccaattctgttttgatttttaaaaagtatgtgcttcttagccctctcattgcttcactgtgaggggaaaaacttttctattgaggtgctgaagctgtgctttccaggactcatacttatgtgctgttgaatgagtctcagtgctcctaggagtctataaaaggaatagaagacttcttttctctaactcccttatggtttgtattttatctgctaagagacactggcatttcatggagatgggagagaaaaagacacagcctacttagacagttcctttattccaacatatatactcacttcacatattcatagacaccttccacctagcatcaaattctgaactcatagaagacttaggtgtttttggttttgtatgcatagcttttgaaatccctgggttgaaaattttctaggtgttgtttgtatgctctagtcaagcccaggacataaagggttatgttaaaattactttccttagtgactattaaccagaaattttatctgtcaggagaaaggattcatgcaactctaagaatgcattgccctctgcataggctattagctttggcaaccgaagatagatgagacttaggctgtgtttaaatttttcattgtgatgagacaaatctattattataaaagccctactttatcagtgagagtgtttccttatgttgttttaattaaaggagcagtgtgtttttaaatttaattatggtaccttgaagatctgatactagctgtaagctaaggattctttgggttttcaagattttttttttggagacggagtttcactctgttgcccaggctggagtgcagtggcgtgatctgggctcactgcaacacctgcttcctggtttcaagtgattcttctgcctcagcctcccaggtagctgggattacaggtgcgggccaccatgcccggctgattttttgtatttttagtagagacaggtttcaccatgttggtcaggctggtctcgaattcctgacctcaaatgatctgccatcttcagcctcccaaaatgctgggattacaggcgtgagctacagtgcccagccagttttcaagatttttaatgcatttggagcagcgctatcctaaagaaccttctttgatgatggaaattttctctatctgcaccatccaatatggtctggtaaccaccagccacatgtggctattgagcacttaaaatgtggctgagactgagaaactaaaattttaattttcttgaaaatgtaaattaattaattaattaatttatttatttatttagagacaaggtcttgctctgttacccaggccggagtgcagtggtgcaatcatagttcactgcagcctcgacctcctgggctcaagtgattctcctgccttagccttctgagtagctgggattacaggcatgtaccaccatacctggctaattaaaaaaaaaaaattttgtagatatggggtctctctatgttgcccaagctggtctggactccaggcctcagcctcccaaaggagaaaatgtaaatttatatagtcgcatgtgattagtggttattgtgttggacagcacagatttagaatctgaggaaactctccatttagtataatgccatctgaagctcttaaccagttgaggctggttaaatctgaagttgatattggataatattgctattaggccaatgagagatttctttaataaagatgcaagtttatcaaacttaaatatgctagatatgaactttgggaaggcaaaaattaaattccagaaataattccaatataattaattgaacaaatatttagaaaatgttatctaggataaagaagtgtagtaaatattgtggaggactcagaggtgagtgggacttaggtgaggctgcctattttgagtcctgctggggaggccttgaaaggtcaaggagaagttcttttttttttttttttgagatggagtcttgctctgtcaccaggctggagtgcagtggcacgatctcagctcactgcaacctctgcctcccaggttcaagcgattctactgcctcagcctcccgagtagctgggactacaggtgcacgccaccacatccagctaattttttgtatttttagtggagacagggtttcaccatgttggccaggatggtcttgatctcttgaccttgtgatcctcccaccttggcctcccaatgtcctgggattacaggtgtgagccactgcgcccggccaggggaagctctttctaagggagtagcttagagcacagaatgccaactgggttatcatcaggctgtaaacagtaggatttcagtttgtgcaagcacgatggttggggctgtaacaggagaagggggagctgtttacatcaggggaacattaggttacatttggctctgacaggcaagattaattttgtctgagagaaggttgaggtgggattggaattttcccaggtatgccctgcgatgttctgctgagtttcatgtgtgttggagcaggcctctcaggccatcacagttctgggagatggactttccaaagattgggaagctggaggcagggacacctggacacagagccttcttcacccccacctgcatcccaggtgaggaggaattcttgaaaatgccgagtttgactcaccaaccaggagtatctaatgtatataaatattcctttaaacgtaagtatagtgatgagtagataagccagagtatttaaaagccacagcaaagattcagcttcctctccgctcccccgtgccccacatctgggaggaccccacctgagcttggtgttatagttggctgatgctcttaggtggaaacccaggggcaaaggacaagccacagaaacataggctgcatctgctcctactctgtacttccaccttacctgcccattaagtgctatgttcttgactaaataattcatgtatcgcagagagggaaggtatgtgttcccaccaacctctgacccatccataacccagtgtattacactgacccaggaaccagagctcacttcaccctgcttggagtcagggaactcggaacctaactgtcctgggccctctttctggtagttgggtgagtcctgagggcctgatacgtgaggtttggacaggctgggcagtaggttatggcatatcttgtaagggagaccatgtcagcagtggggagcagaatgcagaggaatcaaagacctgatctcatagtgcaggtgtgaagggagaagagccagcctttctccaccgtctctctggggacaggggactgtctcgcagggactacaccttggcatttgggcatgtcagaccaggatctagtcatcagagttacccaatgccctggggttggtttctaccaggtcaggggatgcagttctgcaggcagtatgttacatctgagactacaggagagaggggtggggtgacagtctttccatagggtgtccagacactcctggcccagggactgagccatggatagtgggatgcttgcctctctgtgtggcagggctttcgtctctgttttttgtttttgagatggagtcttgctctgttgctcaggctggagtgtagtggcgcaatcttggctcactgcaacctctgcctcctgggttcaagcaattctgcctcagcctcctgagtagctgagattacaggcacatgccaccatgcccagctaatttttgtatttttagtagagatggggttttaccatgttggccaggctggtcctgaactcctgacctcaggtgatccacctgcctcagcctcccaaagtgctgagattacaagtgtgagccaccatgcccagcctggtctctggttttgagccatgatgtcaggctgaccaggctggcacatttagcctggaatgggttaggcttctggctttgatgttaagaaaggaaactagtgccaagtgcagtggctcctgcccataatctcaagactttgggaggctaagccaggaggattgcttgagcctaggagtttgagaccagcctgggcaacatagcaagaccccacctcaaaaaaaaaaaaggtagtttggtgtggggcatgcgcctataattccagtgctttgggctgaggcactttggggagattgagactgcagtaagctatgattgtgccactgcagcccagcctggttgacagagtgagatcctgtctggaaaaaaaaagagaactggctggtccttcctgaaatagtgcccacaggctggcagagcactgactgacacctgcctctttcagaggtggggtcaggatagctgtatggaaattctccaatgtgtgggttgtaggagtgtatctcatatcccttcaagcactgccaggccagaacccagtggagtttgcaaagaatgggtttcttgttagaagaaagtattacgtacatgtaagtaatcttgggtatagctgggaagtgatgaataaatttgaccattaaaagattgtaatgtctgtatcaccaaagacaaaatcacaaatataattaaaaaacaaataacagactaggagaaaatagaccatgtgcaatacacaaaggataaatacagagtatataaagaagcttctgcatattaataagaaaacactagaataaatgggcaaaagatataaaaaggcattgacagaaagggaacaaatggccaataaatacaaagagatgcttaacttcattaataattagtgaattacacattaaagcaactagatatgattttatcccatcagattggcagaaattaaagagaataatattctttggcggcaatgagaaaaaatgggtgtactttcatattctgagcatataaattgttcagacctttttggagaaggtagtttggctgtatctttgaaaataaaatcacatacttttaatttggtaattttgtgtctagtgaaatacacctgaacacatgctcattccagcactggaatggtgaaatattggaatgattaaatgtacagtggtacagccagcatatagaatgcgatacctaaaaagtgtgtaagagtgtggtatagatctttatgcagctgatgtgggaggctctctcagatacgtttttagtgagaaaaaatataaaattattacatttatatttgtaaacctcaaaatttatatgtatttgtaaattctaaaacatgcttttcagattttttaacatttctgaaatcagcgtatctaacaattggtgacatagtttactaatttaaactcttggtgaagcatagtgcacattacaagtgataagatcttagatttgatgaaggatgatatgtaaatacgtggataaaggactctaagacagacatgggacgagattgaggaagtgtcagtggagactttgtctgtgtcatctatgttgtcaaattttttttacagtgaaattatattccattattgtgtaacgaaaaattttaaaaatacatatttatattttttagacaagatataattttagacaagataaggttgcctggatgtctctgatgtctgatccatttctctacttgggtgattatgcttgatattcagctttgagaactttaaggcctggatggttgatagagcgttcagcttcattaagaagttaagtagctgtgaagattcagtgggagagaattgagaactgaggtccaagagaagggaggagccgaactccagaattcagggccagttgcctcatggggacctttgcatctgtgtaaagaggttgaaattctctccccacaaggtggtgccaggctttttatactggactgggcataccctggagcaaggctcagtggatgggaggcagaaaatagatcaaatcaaggagccttatccaatgtcattgaaaggaaaattcattgttttgggagagagctaagccctagtgggaaagagccaaaggaataaatgggcttttaaatctgaggaatttacacaaggcaggcaggagatgacctgccataggttggaggcaggctctgcttggatcctgtgtaaacagggcatagtgtgagtgtctccccataagtaaaagctgtgttgtgaagatgaactcacagtttagtagtgactttttgaccaaagatgactcttcaagaagggataaggtgtatggagtatagctcattgccaggactgtgggaggcagaggaaggagaggacacttggccaagatgccatttgagctggtcactgtaggaaagggagaatttggacatgtaattttttttttttttttaagacagagtctcactctgtcacccaggctggagtgcagtggtgtagtcttggctcaccacaacctctgcctcctgagttcaagtgattctcctgcctcagcctccccagtagctgggactacaggcacatgccagctgcctggctcattttgtatttttagtagagatggggtttcgccatgttgcccaggctagtcttgaactcctgacctcaagtgatctggcctggacatgtaatttttaaggagatattcagaagaaaagggaggtgagcccaccatttacaaatgcacacaggaggccgggtgtggtggctcacacttgtaatcccattactttgggaggctgaggcaggcagattgcttgaggctaggagtttgagaccagcctggccaacaatgcaaaatcccgtccgtactaataatataaaaaattagccgggccactgcactccagcctgagtgacagagcaagactccgtctcaaaacaaacaaacaaacaaacaaaaatacacacaggagaatgtgaggagctgagtagtacagttttctcggagtacacgtctattaaagggaagcagtaggaagtaaaatagaaaaaggtaggctagggccggaccatgaagagctgagaatgccaagtttagaaatttgaccttgagtcagtgaactcatgttttacatttaatcttttggttaccaatttttttttgtaccatcattggtttgatttttaaaatacagtcactttgttttctaaggattttatgatatatgttcaaatcttgagttaaaggtaaatagaacacagtttgggtttttttttggcatataaatggttgaatttcaaaattatatttgtgttacaaactttgtttttactctctgccttccagcatttgcaaataaccatttctctttcaaaggaaattctagtatgtattcccattcaataaaagcaaagagctgagctctatatgaataagaggtaaaattgaacatgaaaattactgagcaagattagtgggggatgaaatggatgaacattggggaaagctgtgatccttgttacctttgctatagtgcaatttggaatggcttctttattcctggcaattcctgacagcatttcttttaaacctggccacctttccattgccagctcgaccttgatgttagctggtgctgctactgcaagggctgcctttggcaggaagccttcagtcaactttctgggctctggttttggctctgcacatgccttgctgagaagaccttaagaatctgaaatgtggagggtcattttggggtagggaaatgtggtggcaactcttgagttttctgccacgatgtaacttaacagatcctcttgtttttccttaaatggtacaagggtttgcaccgaaatggtaattcatctgtgtctgtgatgctttaaaaaataacagtttcactaatgtgtcacaacatgtattatttatcattttagtaaatggatattttaacaagcaacaatttgcaaatttaagcatggcagttaacatgatctgacattaaaaaattaaataatctcctgccatctttgttatcagccttgcattaaggattttagcccttctgggagcttttatttttttgttgactctgactgatgatggcagattgtggtagtgatcagagctatgcttttataaattattttttagttggaacaatattggcatgtaacgtggactggcagaattaacattgtttatcattaccagtgttgttttgacagatattctcagttctttaaggaagcagatagggaatgtctgtaatggacatctgctgtccactataggttgcccaataatgagtcctggtaggttctaccttctgctgtggaagccagcagagttcaaatgggcattttctgttcttgcctcctaggaactgcaggggtggacatgcttcttaggcttagcctgttgactgcttccacctggagtttgaatctgaacagtgttagaaaatgcagggacaggctgagtgtggtggctcacgcctgtaatcccagcactttgggaggacaaggaaggaggatcacttgagcccaggagttcgagaccagcctgggcaaaaaagcaagacccagtctctacacaaagtaaacaaattagccaggcatggtggtgtgcacctgtagtcccagctacttgggaggctgtggtgggaagatcctttgagcctagaagtttggggttgcaatgagctatatttgccccactgcactgcagcctgggggacaaagagagaccctgtctcctataaaggcagcgacagttagtagtggcactagagttactaaaattatcaagattttcttcctggatagtcctggttgcacacatcagtgttactataggtggacttagcctttacttttgtacatttcgcactgatacctctaaccaccttttgtgcacatagcagctattataccccccatagcataaccaacctgtgtaagagaagagtataagtcagttgcttgcaaggaactcttaggggtagggagctcttgcctgggggaggtgggggtttctcctctttctgtcctcccctagtcattagagaaaggcctcaagagaataactcagagattacggttgaattcaagagggtagattgacatctcattgagctgcacagaggtaccagccaggtgctgctgtgggattagaatggactcctgagaaagcgttcttgagtgagtgtggtgtggctttcctggagtttggggatgtctgtgaatacagaggcaagtatcttcctctcatctgaaagccccccatgtggctggagctgcccctggggacagtgtatggagagaggacagcaaaaacgcttgacatttcctgtgggcctggtggtctacatggaggacagctggcctgagtctttttgaaagacttgtcctgcctgcgaaggctgcctgccagggctaggcccgcagcagaaagaggttgtgggtgaaccacagaggcaggagctgagaggagactgagagctgagtcaaagggcacccgttgcctgcatcaggcagcatggaggtcccagcaaaggggtctcactagagagagctggcatgtggactcctgcaaatggtggaagatattttacaggctgcaggactggaccacagaaaagtgggcagacctttccctttcctcacacttgccgcctttcattccttggacccctctctttttcctcactgctgttcttaggggaaaagcttgacattggataaaatgaatttggatttagactaaatagactttttaataactgaaagtttggctttatttaagataatattttctttttaaaacactgtctagaaatcagtgggtttttttttttgttttttgtttttttttaaagacagagtttcgttcttgttgcctaggctggagtgtgatgacgcaatctcagctcactgcaacctccatctctggggttcaagcgattctcctggctcagcctcccgagtagctgggattacaggcatgcaccaccacgcccagctaatttttgtatttttaatagagatggggtttcaccatattggccaggctagtcttgaactcccgatctcaggtgatctgcccacctcagcctcccaaagtgctgggattataggcatgagccaccacgcccagccaaaattagtggttttaatgttactaaatcctgaaatagctttccatgatgacaaaatcaatcaacaatctcaaccccagtagactggagtggattttagaatttagcacactttcccttatttatactctgcaggtttcaagcatacaacttgccagcaattactgtgttggctgagaaatttgaaattttactagcttgaacactaaatttgttgatgtaacatacagctaataataaaggtcacgtccccatattggcatgagggaccccttatgaattagcctgaaactttgcagcctttaatcatatttttctctcttttttcccttgagacggagtctccctctgtcgcccaggctggagtgcaatggcacgatctcggctcgctgcaacttcgcttgccgggttcaagccattctcctgcctcagcctcccaagtagctggaactataggcatgagccaccacgcccagctaattttcgtacttttagtagagacggggtttcaccatgttcaccaggctggtctcgaactcctgacctcaagtgatccacccacctcggcctccccaagtgctaggattataggcatgagccaccgtgctcggccatgttgttatttttggtttgtttgttgattatggtttaaaaaaaccacataacattaaatttaccatctttgccatttttaagtgtgtagtatggtagtgttaactgtatgcaacagttagtgcaacagatctttagagtttttttatcttgtaaaaccgaaactctgtacccaggaagcaattcctgattccctgcttctgccagcctctaccaaccaccattctactttttgttgctaagagtttgattactttcgataactcacatcagtggaataatgcagtatttgtttttttcttactggtttatttcacttagcttaatgtcctcaaggttcatccatgttgtagcatgtgacaagatttccttctttttaaggatgaataatattccattgtatggatagaccacatttgctttatctagttgtctgttggtgaacatttagggtacttctacctttcggctcctgtgaacactactgcagtgaacatgggtaagcaaaaatctctttgagatccttttggctatatacccagaaggggattgctggatcatcattctgtttttaattctttgaggagccgccaaactgttctttatagcagctacgccattttacattcccaccagcagtgcacagagattaccattgcttcatatccttatcaacacttggtttttttttttttgccattttaatgggtctgaggtgatatttcattatggttttgatttgcatttctctaatgattagtgatgttgaacatctttttatatgcttcttgcccatttgtatatcttctttggagaaatgtcttttgaagtgctttgcccattttttaattgcattagtttgttgtttttttgatttgtaggagttatttatatattccgggtattaatgccttatcagatatttggttgaaaatattttctcccattcataagttgccttttcactttgccctttaatcatattattattattattattattatggttaaaacattaattgtgtaatactgaaaagtttaggaaataatatgacagattttgatcaggtcttaaatatcttcccaataggccctatgagtaaggcataaaaagcttgaattaattccatagtttcaccaaaacgctcttcttcttaatcttattccttatttttttgaggcagagtctttctggcccaggcagcctggagtgcagtggtgcaatctcagctcactacaaccttcacttcccgggttcaagcgattctcgtgccccagccacctgcgtagctgggactacaggtgtgagctaccatgcctagctaatttttgtatttttaataaagatgaagtttcaccgtgttggccaggctggtctcgaactcttgggattcgagtgctgggattataggcatgagccaccatgcctggcccttaatcttgttcctatcaatctttccagctttaccttccccagcatgacttcctcttatccccttcctatgtccaaagattccctaaaaatattctagctctgtaccattccacacactgcttttttgttgttgttgttgttgttgtttttttttgcctgaaatatgggatatgtacctttccctcttgtttaaccttgtttttcagactccttctttttcttttcctttaaagactcagcccagatgtgaaaatgttccagtcagccagtcagctgcttttctctcctatagcctcttaggtacagcccaggttagcacacttgtctgaaagtattgtgaggacttttataaaccccctctctccaggaccatatgctgctagatcacctagcttagctttgcctttttattcctctttgtcatgggcctaccataatatctagtccataatatttgtgtactttagttttttatttatttatttatttttgagatggtggtcttactccatcacccaggctggagtacagtggcacgggatctcggctcactgcaacccccgcctcctgggttcaagctattctcctgccttagcctctgagtagccgggactacaggacacgccaccacgcccagctaatttttgtatttttagtagagatggggtttcactattttggccaggctggtctcaaactcctgacctcaagtgatccacctgccttggcctcccaaagtgctgggattacaggcatgagccacaacacccggcctatttgtgtactttaaacgattatgggtagaaagaaagagcaaatgcctttttagaaataagataacagaactttttaccaattgtgcttccaaatatgctttctcttctaattttatctgctaagattttggcagctaattgtagattttatgaacttacattgggttgcctttgtcttctgttataaaagcaataattagaggaaatgatccttttgagaggttgtttaatgaattctgcttgttttaaatgtgctgctttaaatcttatttcacgtaaactgtactaatgcccaaattatctcaccctagatcagcattgaaccaaagtattatgatgattaatttccttctgttaaatcccttatagtcttttctttggtgtgtgtgtggggtcaacaatcaaagaaagaatttattgactttacatttaatatggtttactctacttgattatattgttcaagtgtgaatttgtgtatggtataagattatgccatactgggattctattttctgttaaacaaatagctttgtgttttattaactgccagtgtttaaatttaatggtttaagatttcagagagccctttttgtaagtatttgaaagtttttattataatcctgagcctaaccttcttctggtttcactgcatccttctccagccttgaaacaagccctggcacagacgcaaatcctggcgtgcaccacctcttcctctcccccgctccccactctaacatgacaagaagtgtctgtcccagaagtaatctgattgtgcacctagagtacctgttttctgcctggggaagaatgcacactgctggacctagagcggtggcaaaagtgccctctccactgtgggggccacagtggtaggcacaacccttatccctcagccccattagttaattaagtcattttacctgcattaaactttacgggcagagaaaattcagtaagtcaccactaccaggtgactttcttttttatgttaccccctagcaaggcatgtagtttgcatcctacagaatataaaagatggggccagcatctattctgtgtcttagcagtgaacttcatccaatagatacttgatttttaaatactttcaccttgtgtcatgattaaatcactaaacaggaagtttcagcttttctttaaagaagtacatcctattaaaaatttaaatgtcttcataactgcttacgctcagtaaatgaacactaggaatctataaacaggaatctatggctctaaaaattgaaattttgggggctgtttcattctttagaacttgaaaacgccataggcaattagctataattcatttgcagattatttttgccatgttaaattaggaattttagccatagcaagcataacagacaagcacacttttaaattattttgttcagcaaaacaccataggcccttatatgtgtttgctggaatttttctttgtcaacaataaatctatatgtttctttagttaaaaaaaaaacagcaacaaagtgtttattgtagaatgtttactttttaaacaaacgtgaaaggcattggtacaaaaagggaaaagcacctaggatttggatcctcagtgggtccaggagtacagcttccttgttctgcagttactggaggcagtgtggtgaggggaaggatgtgggctttggactgagctgctgcttctacctgtgctatgactttgcacaagttaggagtagcctttttgagctttgttttctccttagaagatgactaagatcatgtttgcacatagcacatgacacaaactcatgatactggttttgttttttctaacattgtctcagtgggtcttcactgccttctttctacaattttttttttttaagggaatagggtcttactctgttgctcaaggctggagcgcagtggctgatcattgctcaccatagcctcaaattcctattcactgccctcttatatagtggataatgtgggcgttagtctcatgcagttaagagaacaggttcaaaagaagttttgaactgtctgttttattttcacaaggccagtcagtgacagagaaagaacttccacttgggtgtcctggctctgtgtcccatggttttcctactgaaatactattactgtgctatagcagaagaaagaaggctaagacagttctgtgcttacagtcaccttcagtttcaaatgtaatcatatcctgggggaggggaaatgaaactttgagtttcatctcccaaatcattcctttatttagaatcaaccggctgggcacggtggctcattcctgtaatcctagcactctgggaggctgaggtgggtggatcacttgaggtcaggagttcaaaaccagcctggccaacatggtgaaacccccgtctgtactaaaaatacaaaaaaaaaaaaaaatagccgagcatggtggcaggcacctgtaatctcagctacttgggaggctgaggcaagaaagttgcttgaacccaagaggcggaggttgcagtgagctgagattgcgccactgcactccagcctgggtgacagagcagtactccatctcaaaaaaaaaaaatagtatcaatgaattcaaagaaataaaatgtttttcatgtactcatggaaacaactatttctaaaattctaaatgaattattattattattattattattattattattattattatttgagacggagtttctttcttgtcagtcaggctagaatgcaatggcgcgatctcggctcatgcaacttctgcctcttgggttcaagggattctcctgcctcaccctccccagtagctgggattacaggcgcctgccaccatgcctggctaattttgtatatttttagtagagatggggtttcaccacgttggccaggctggtctcgaactcctgacctctggtgatccacccacnnnnnnnnnnnnnnnnnnnnaataacgtccactacatcagtgcataacgtccgtgccacacgggggaatagccaatgcgtatagttatctcctacgaatcggaccataagaatcttcagtgctcgggagtaacgtcactaacatcccgacattgtcagcaacgaccataaaagacgggacccaaactgctgtctagcacaatacgagatgccccccgccaaatacacaccgcctcaggctacgttcaaaataagggttagatgggtaatctcagatccaccgaaggcaatagagcattatattcccgcgagaggaaataacagttagaacgcgcaccgcctccaaccataattaaatcctcggcacaagggggtggtacaaaaaagggcttcggacccgtaaaaaaacaggacaaaaatggacttctaggccgccctaagcaaccaaccctcctggcgggggcaccaattcaacaagctcgtttgtcggcaacaatgtcaataaccttctttagcaaaatgaaagccttcctcatagggagaattttgccggagaagttaggtaacggggtaagtcccgatctacacccccatccacctgggttgttcgtgtctgcaagaatatatcgaccgagagccaatcaaaaaagccggacataccgtttctcacaatgctgtcatcaggggcatattcttttgaaacaggaggcatgatcaagatggccagagtcagtctccaaaacctttctcatggtagtgctagcaccttagctagtcaaagtattaggatgcaaggtatgagccaccgcgcccgacctctaaatgaatttttaaaactccagcatctcacaaatggttcttgaataatttttccttagcctgcagtgtttaagttgggttttgaaggttttgttactcaatagtcacccttttttgggtgtaagtttgtcctctactcctgagtaagtaagtgaccttagggcagtattaccatgaaacagatctcacaaataacattgataccaacatcattatttttggtcaaatgttaaatagttaaaatttgtcatcctagtctatattgaactaatttgaaataccttatatttaagcaaactttattgtttttaacatagcaaaacaattaataaaactttaaatcaattacacatgaaacagtaagaaagcagtgcaagattaaaatctctaggtaagtgttctatagtgtataagtaagttctgtagaacttcagaaaaaagagaggtcagtaggattcttagagcaaagtgtgattttatctgtactttgggtcagaataacttttctgattttttttattactaacatacctaaacacagataatgttaacattaattaagtgaccttagggcagtatcacaatgaaacatctcacaagtaacattgatactaacacaattatttttagtcaaatgttaaatatttaaaatttgtcatccttgtctatattgaactaatttaaaatatcttattgaaatatattattaattaattcatatcagacttagctagagacacctaatgttcaaaacagaaagtagaggtggattgggcccagttggctccagttgctcagaggatgtggtcagtgctgtttttgtacatcttgagctctgctcactctgtctgcgagtaggttttgcgttttgcttgttggctgtcttgttgggggtgggaaaatggctgcccataccttctgccaggtgggcaaccccaaagacttttcttttccagcgcacgtgtaggagcagcctgttggaggcatgtgcccatgctttagactgtcacccaggtcatgaggactgtggtttgaagagtgtgctcactcaactggctagggggtgagggcactgtgtttgacaactgtcaaggactagcgaggttcccagatgaaagggggtgatataccagaagaagaggcatgggtgggaaatgtgcatagcagtcccagccaatagctatcactgcctaccacatagtgctacaaaacagcgtaagaattattcattgagtgcaaatgttgggggagtgggggttaaacagagacctattctaagtgattcttgactgtttgtccaggtgtcattccttgttataggagttttaaaagcagaaaattctcaactgctcattcacctaatactccatgaaagtatatattcttgagtgtcctaagtgtgtgtcctttgaaatgtttatatatataaaagatattttaagtataaaatcttaaatatcttttacacttaaaatatcttttatattttatatttgtgcttttataagttaaaaaatgtgatcaccatgaccctctacttggatgtgacaaccctccattttataaaataattaccgttgaatcaaaatttttgctcaacgtatgctatccagttacctgtcaaagccaactgaatgaatgatgaaaaggttcagatcaaaagcaactggcttaacttcacggaggttttcatgctttaatttaaaatgtgtctatgtctaactgattatctctcacattttataaagaaatattgacgttctgtaaagtatgtagtgacctcacttctggctgtgtgggcaggtttcactgcaggcctctgaagcattgatattcctgtaacctttgaggcaagatgtgtgtgtagtgtattaatgagctgattgaagtgatgtacagtaatttcatccttgggtaaaaacagatgtgaaagattctgttttaatatttaatcagcctccaagcctctgttggcttgtttaagttgacctgacagcattatacctggaaacactttgaattaaactctgagtgcttgaccttgttcaaacagttgtaatttaataaggctgctgtcttggtggagatagtgtcgctaataggcaaatcctcttctgactgggattgttctgtttgtgagtgctggggttggagagattcagagattctcatcagtttgtggggaggaactgggatttgaagaagtaaaaacaaatctaaattaagaaagtgtcttttagaagatctttaaaaacttttattttaatttttagacatatagaagtaatgtttttaatgtcattttgattaggctcattttggttgaaaggaatggaaaatcatttgttaaaaagagagctggaaacttgtcagaaatcaaagaagtgctaggaggactgcatactcactctggctctccttgtcctcctgtccacccatccctccacccacccatccgtccctgcttttctctgtctctgtcttgggcgtcctctgcacgatagcctgtctgctctctcctttcttctgttggctccctcaatctctgtttcgtgtacttctctctagcccatagctcctctttactaatcatttctgttctctcatgccatcagtttgcaggggctcttggtagtttcagctctcttgtatcctttcagctctaagtcttgctgtcaacaagtttgtttccttgttcacgttccagttagctgggtctgaatggctctcctgatcttttttgtgccatatccaaattgcccatgctttccaaagcagggggagctgtggacaagacagtttttggcttgaaggaaagattagttggggcaaataccatgatttgcccaatataaatgcgtgtagatatatattttctggttctaagagtaccatatgcttactggggaaaaatgagaaaatttaaaaaactaataaaaatacagttaaaatctcctgtaaaccgactattcaaatagctaaactactttggtgtatttcctctgattttttttgcttgtttatacataaacataatatacacagtaaacatcccaaaattttagaatcatagtggtaacattttaaagatcttcatatctacttgttaccagtggcatctgtaggaatactctggctgtcaggcctacgttaaaaactgtggtaatttggtgtgaatcttttattaattctttccttttgactaatattaagtgtggcatcattaatcatgttatattatcttcactttggcttgcattacttatcaactcctttgagaagagttaatattattttcatatttcacagtacttgacatattgtctcatacttagtagatgttcagtatttggtctatagtttctgcttaatttttatgaaacttgatttctgtgagtgggcaaaatacattcataaggttccagctcagaagaaggaaaaagtaacaatgtatagcactaagaatattggaaaacaacggggaaatatgctaattgcttttaaacgaacagggattttggcagtattgtggtatatgaagggtctcctgtaggaagctgactggctcttctcttttaggagccctcccagggtggcattcattaccttgtcggattgccatggtccagtgtgggtagcagaatcctgagagacccccagtgaccctgccctttgtattatatcttcccctttgagtataggtggaacctatgcatgtttgagatatcacccatgattctactaccttgcttggcagagggagactatccaggtgggctgatctaatcacacaagccccttagaaaccatattctccagcaggtgggaagaaagagtgatctgaagcatgaataggatttgatgttgactgcgaagatgaaagggaccatgtgccaagcaatgtgggtagcttctagaaactgagcatggtccccagctggcagccagcaaagaaacagggacctcagtcctacaaccgctaggaaccgaattattctaacaacctaaacgagcttggaggtgaatttttcctaagagctcatggataagagcagagtctggctgacaccttgattttggctctgtgagaccctaagcagagaacccagctgagcctgactggatttctgacccactcagctgtgagctcatgaatgggtgttgttttaagccactgtttgtggcagtaagactaatatagtccagggtctggctaattcttagctttgtcagattttaacttgattttctgtggatatcaagggtggagctgtctctcaggggtagacttacaggagcctagctgaagaaactggtgtatggaatcaggaggccagcatatttatttgtttatttacctgaaaagtaaatgttccagggactgagatactccatgtggatggtcagtacattatctcccttaaggcagacctgtgtaggaggccaggtgtgtattagtgagcatggcatccaaaccatgagttagatgagcacagtttccatggcatcaaacacctgtctcacaacaaggatggccttctctatgtctggacaatgtttagatgggtactgccagcttctctggagactcactgtattagttttcaattacagtgtaacacataaccacaagttagcagcttaaaacaatgaaagtatattatctcacagtttctatgagtccaggcacaggtaactgggtcccctgctcaaggactcaccaggctgaaatcaaaatgtcagcagggatgtggtctcataagctcactggttgttggtggaattcagtgccttatggttgtaagactgaggtcctcttctcccagaggctgccctgccacatggccctctctacaatgtagcattttgcttcttcaaggtcagctggaaaatctcccacacacttttggtctttacaatctctgaccccctttaaaagcctagccctgtgtatgctcatagggagagattgtacaggggcccaaatcttgagggcattgtaaaattctgctcccacacttgctttcccctcagcatcccttgatgactggccagctttctgtttgacacctcctttctttagctgtgttaatatatccagtctttgggagtccaggcttggttggatatttcacatctctgaagtgactacatagttcttctcacattcagtatgtattgatttttaaaatttaaatttgtgaacttaatcacacctttatttctgtgatcctcccccctttagtaactggggaatgggatgaggaggaatttcttcatcttagtttcagaagtcttcacagcagtggcctctatttgtagtttgatggtctaaggagtttagattgttagagaacttctaccttcactagaattttgaagacgtaacttaaaattacacttactagatgtagaaactggggagacaaaatgagttatttgcacagttaaattattagctagtgaagaagggtttttatttcttatttatatcctgccttctctcaatatgatgatgtccagtaaaaggcatagatagtctaaaagtgaagcaattaaaaatttttctattatgggaatttgacagtacaaaaaaacacagatgtccttgcccattaaagtgaacaccaaggagtccaaaatattttcatgaggtagttttttgccattgcctgtcagttgtgagagatcattgcctcaggccacagcgactaggtgtgtggcagagttaacctgcctgctctctagggaaaccgtcaagaaatgggcaataaattaataagtagaaagtgttctctgagctccaggcagttgttgattgactgatggaaaaggtaggcggtaggctaatagacgatgacatccaaattcagctgttgcctctcagctgaacccaaccctgggcttctgctgccttttgctccttttccctgagtggtggtggcctgcaggttaaacaggtgggcttgggaattgggctgcctagggtaaatcctcattcccccatttaactcagtctgccagactctgttttcttgtctgtaaaatgagggttaaaagagagtctctgtaaagcatttaatacgttgttgggcactagcggtggattaaggagaagagggctgtgatgggagctgtcagccccagcaggcaggagttagaattgtctggaattgccggtgtagggtgataataaaaagcaaactgactcttggtcggtttattactatttttaaattccctactgacaaggccctccctattgcctgcactctgagtggaccactccttccatccatgccttgcaatgccactgtcttgcacataagggctcaaaagtgtatgctgttgttgcccttctcacatttcggctgaggtgtatattttcattaaagaggattatgtagaaaaattggtttaataaaaatgatgagactttttaatatggtttgtacaccattaagagtgaaatatggcaaaatctggtctgaaaaataggaaaaaatatagcaataactgattaatagaaaaccataggattggctgggcacagtatctcacacctgaaatcccagcactttgggaggccgaggcaggtggatcacctgaggtcaggagttcgagaccagcctgaccaacatggtaaaaccccgtctccactaaaaatacaaaaactagctggacgtggtggtgcactcctgtaatcccagctactcaggaggctgaggcaggataattgcttgaactcaggaggcaaaggttgtggtgagccaagatcgtgccactgcactccagcctgggtgatagggactccacctcaaaaaaaaaatcttttttttccctttttatatttttgtctggatcctaaatattgggacatttgaaagatgtgcatatttagtttaagcaaattctggtggatttggttggttctctctgtagtaagagtagagaagaatggtagatgtgaaaagaatatattctgaaaagaatatgggataagagaaaatcaagaaggcaagaaaataatcatttccacccttttatctactttgaaatcaccacttttcttactttggtcttctgtttcctctataaactatgcttaagagaccagagtgagcagacttcttcgtgaaaacctgagcttgggagttgggatggtttacagtcttggcttcagtccacttttctgacttaacacccagacccctttccggctaaatttattgtctcctgttcctgctgggcctttctggagcgtccgcctctggagtgccctctgctcttgaggtcccaaactgcccatcccacacctacctggtcacagctttgcagtttaagtccccacatgccagtgactgcttcctttctggacccctttactgcatttcagcagtgctgtcaatccttcctttaaatttatgtcactggtttgtagggctcattcttccagcctgcagacgtcagttgagattccactgtgatcaaagcaggatatttaagttctgcagcgggtgggctgcaagtggtagaaatagttattttcttgccttcctgaatttctcttgttccattctcttttcaggatacattcctttcactacagagagttgtctgctctcactacaaacagaaccagccaaacccaccacgatttgcttagacataatgggcaagaactttcagaacatttggaacttttcagaacattgggtggtcttagagactagccagtacagaaatctcttgagagggtgttactgtgttccttctggacacctccagtttctgatttggctgtcctgtttgtcagcagtacatccttcatattgagcccaaaacctccattcattctggtgttcttcagtgcagtcacactgcttcgtgatggcttttcttcagtgcagtcatttgcttcatgtgacttttcttttttctttttctttttctttttctttttttctgaggcagagtttcactgttgttgcccaggctggagtgcaatggcatggtctcggctcactgcaacctcctctgcctcctgggttcaagcaattctcctacctcagcttcccaagtagctgggattacaagtgcccaccactatgcccgcctaatttttgtatttttagtagagacagggtttcacaatgttggccaggctggtctcaaactcttgacctcaggtgatgcatctgtcttggcctcccaaagtgctgggattacaggcgtgagccactgcacccagccatgatggcttttccaatgcaaaacattgcaatagttattcctttgaaccttataaaattactgattgttatgttttgaatatttgtcccctccaaaacttacattgaaatgtaatccccaatgtggcagtattgagaggtggagtctttaagaggtgattggatcaccagggctttgccttcatgaatggactaatccattcatggattactagattaatgagttaattcatgaattaatggactgatgggttatcatgggagtggacctggtggctttataagaagagtatgagagacctgaaccagcacattcagcttcttgccatgtgatgccctgcactaccatgagattctgcagattcttccccaccagtgggaaggtcccaccagatgtgaggcccctcgaacttggacttctcagtcttcataactataagaaataagttcctggccaggcacagtggctcatgcctgtaatcgcggcactttgggaggccgaggcgggcagatcacgaggtcaagagattgaaaccatcctggccaaagtggtgaaactccatctctactgaaaatgcaaaaattagctgggcatggtgctgcgtgcctgtagtcccagctactcgggaggctgatgcagaatcgcttgaacctgggaggcggaggttgcagtgagccgaaattgcactccagcctgggcaacagagccagaccccgtctcaaaaaaaaaaaaaaaaaagaaagagaaataaactccttttctttataagttgcctagtttcaggcattctgttataagcaatagaaaatgaactaagacactgatattcaattgttttagcctataaaaatgggaattttatgtgggtcaacctagtatattccccctgattctctgcttttccagctcatatacttttgtagtttagataacctcctgtcagttaaatcatgatataagttcttcgttccttttttttcctttatagtttaaaaattattttatgtgtatctttcctctggtagccccctgagacttgcttactgcaagcccacatgctgccttgactccttttccctgaatcaactgtgaattgttccgcagcttctctcctttttggtctctgaaccaaggtttcttaattagagtatccacaagtctatatgtgaagaggttgagggaaaagtaaccactggggacatgagaaatctgaaaagtaatagttagaaatggccatcttagccttattaaaatgtaagtaaggccgtgtatggtggctcacacctgtaatcccagcacgagaggccaaggtgggcagatcaccttaggtcaggagttcgagactagccttgccacaatggcgaaaccccatctctactaaaaatacaaaaattagctgggcgtggtggcatttgcctgtaatcccagctacttgggaggctgaggcaggagactcgcttgaacctgggaggtgaaggttgcagtgagctgagatcgcatcattgtactccagcctgggagacagagcaagacaacatctctaaataaataaataaatataatgtaaggcaaggccttttcccttatatctattttagggtttacccttgtgtatacagaaaaattgttccctgtccagcttattatgggctggatagcaggcagaactcctcagtttgggttagcattgcattaacagaactgccacatctttctggataatcttcctttgtgcataagctccaggctcaccttctctgcctcacagctgtgcgctggtttcccttagctttcttgggttctggatggatactggccttctgggtgagaagggggttctttggcaaaaggtgtttttgacataatttaggaccttcttaagttctacagcagacctaaatttcttcccccaagttctttgtctatatagagtactcagcactcattacccattctcagttctgaaggaaatcttatggagcagttgtagtatttatagggtaagcagagtgcccagtttccatgccccaccccaaaccatttagatttcagtcatgtatgtcaagggaggagtgagtacatttttgtggtcagctgcctcttcttttccctaacattctcactttttcatctttcctgctttcttgaggtcatttatctattgaataggatgtctattgaaaggaaaaacctcccctaatcgcctttaaactaatatttcttactgggcatggtggatcacctgaggttgacagtttgagaccagcctggccaacatggagaagccccatctctactaaaaaaaaaaaaaaaaaaatattagccaggcgtggtggcgcatgcctgtaatcccagctatttgggaggctaaggcaggagagtcgcttgaacccaggaggcggaggttgcggtgagccaagatcgtgccattgccctccagcctgggcaacaagagcgaaactccatctcaaaaaataactaaactaatatttctcttttctcaataataatggcatgaaaagaattttttctgtgccttttcaaaatcccaataccccctcgtggcatttcctatgttgaagttttcaacagccttatcaggaggagaaatgagcttaatttttgagttttagtgcttagggactctgtcttggcttctagagataacttcactgtgggcacccacaaataatatgtttaattttttttctaaaccttttgctgatggtcattgcaatattttcttgattttaatttcctgagttttcttctttcacattttttcttttttttttggtgatatttttccatattccattatctgcatccttctcactctccctgatttttcaaacatcatggactacagatctgcaacctccctggtaattcctcttgggtttgagaggaagtttgtcaagtactggaaacttgaacttgtataaaacagatgtcaccactcattttaatggaagaaggcatggagtaaatacagatagcacataacagctatatgcattctcttaaatttctttcccgatcttgggcttgaggtatttttatctaatctagtctacccttgccattttcaagatctttttctttgatacttgatagagaagtgtcttctgtatttttcttccttcttggaagaatatattttaaaaaatgtattttgagattgagtattttgtgaaacatctttcctctaaaatcctcaaagtaactttgcctctctttgatttctatgggtagtccagcggagagtgatacacataaggatatttcataaacactgcttgcattcctctgggatttgtgctcctagatgacagcatatatatgcatgtgattctgtgtgtgtaaacatgctttaaaaaatttattgaacatagttttcagctgtcttcactcactttaaaccttagtctactttctttttcttttttttttttttttgagactaagtattgctctgtagcccaggctggagtgcagtggcgcagtctcaactcactgcaacctcctccaggttcaaacgattctcctgcctcagcttcctgagtagctgggattatagttgcccaccaccatgcctggctaattttttgtatttttagtagagacagggtttcaccatgttggccaggctggtctcaaactcctgacctcaagtgatccgcctgcttcagcctcccaaagtgctgggattacaggtgtgagccactgtgcccagcctttagtctactttctgtttttacaattccatgccatgtttattgaaagcatgttgttggtttcttttgatgcctcccctgtctttcttctcatcatgattttaaaaattaatactttgtaatatttgagatttttatatctatgtcaagttaacttttcctgaaaaatattttgatacattttctagaatgttagtgtattgtgtttataacatgggggaaaatgtactgtttcatttttaaatttatttttatttatttttgttattattattttttaagaaacagggtcttgctctgttgctcaggctggagagcagtggcatgatcctggactcaaacaatcttcccacctcagctttctgagtagctaggactacatgcgtatgccaccatgcccacctaatttttaatttttttgtagagacagagttttactatattgtccagactggttttgacctcctgggctcaagggatcttcccaccttggcctcctaaagtgttaggattataggtgtgagttatcacagccaggtgcaataagtgtttatgattaatttaaaagcagatgctgtgcttttcaaaaattatgctcaattttttttttaatattacaaaggacttttagactggcttcctcctaaacatttcttcaactcctatcaagttcagtctgcaaatatcctaatttctaggttgtttgggaatgttaattgattgtctcatgtatgtatgtatgtatgtatgtatggatagacagatagatgaaggttgaaggatggatggatagattaaatggatggatggatagatagatagatagatagatagatagatagatagaaagatagatgaaggttgaagggtagggctggaggaggaattccagctttccagtagattttctatcaagcagtcattcatatatataacttcctatattgttagccaaagttcatccatgtctcttgtatttagctctctgtctgtattgtagaaagcttatttattatgtgagcattttgctttctcctatccctccctctttctttaacatcagttataacagctgtgaatacagtttataatatgagcagccatattcagtttttaggctttcaaaatcacaaatacaaaggaggatataatacatagtcctatattttatacaaattgggacacttttcttcatttcttatttcgtggcattgcctaactatagtcaagctaatgacccatgtagatgtagtgttgtacctggtgtccgtgtccctgtgaatgtgtcatgttgtgctggcctgattccccaacatcagccccagggagccagcagctggagcagctgtcatcttgtgaaagcagagtgtccttgttgctattgattgggttgttcagtcaattgcaaaaaagtggatctaactgtcaatggtagttatatgataatcctggagataaataagtgtcaagtgaagtattacttgaatttaggacttgaagagagagaaaggggtatgagtagttggaggggaagatttgctatgacaagctattattcagtgtggttattttgtatgacaggtaagtctacaggtatcttttgttagataaatcagaaattaagcattccctttgtaaactccaaacaagattttgaaacaccatggtccccccttatccacctccaagatctccagtggatgtctgaaaccactgatagtactgaagtctctatatattatgtttttcccctgtatgtaatacatacctgtgataaagtttaatttataaattaggcacaggaagaaattaacaaaaataagtaagaatagaacagttataactatatgttctattaaaagttatgtgaatttgttttctctctctctcaaaatatcctgttgtgctgtgtgttcacccatttttgagctgccgttgactgtggataacaaaccacagaaagtgaaacttcacataaagggggactactgtattctcataatgttaattgcttctagaattcacaaggattgaattcaacttgaatcttgctaaagaagtactttattattcgatgttagtccagcaacaacttatagtgtagaaatttgcccttttgagggtgaatacacaaaggggaaagaaaacttgtgtgcccacggtccactaacagataagcttctggaggccaggagtaaaccgccctgcaggggagccatctcccagggtttccccagcagagagctgtgcccagtgccggggtctcatgcttacctatttctctgtgccagtatagtagacctgttttcaagcctagcatgagccttaagtattactggctgggagtggtggctcatgcctgtaatcctagcactttgggagggtgaggcaggcggattgcctgagctcaggagtttgagaccagcctgggcaacatggtgaaaccctgtctctactaaaatacaaaaaattagccgggcgtggtggcgggcacctgtagtcccagctacttgggaggctgaggtaggagaattgcttgaacccaggaggcagacattgcagtgggctgagatcacgccagtgcactccagcctgggtgacagagcgagactctgtctcccacaaaaaaaagaaaaaaaaaaaaagtattacttatttagtaagtccatagcattttgttcacacagtgtatcattgtgcttttctgtttcaaagtgtaattatttaatctagaaattttaagtcctgtgacagaaaacaaatgctgttctcacaaaatatgagaaatcaaattccatcttattatttaaattaattcttttttaactgaagaattgttatgtgggtagctttcaacataattttttcaatattagatgcttataactaatgtggatttagttaattcgatgtttatcacatttaattcttatttactacaaaggttaaagcaattttatttcttctggaaacttttaggatcttgtgagtgagggacgtcagccaaaattggcaactttttcaagcaactggctcaagaaattaggaatttctctaataatgagccatcgttttttgaattcaacaatttaaaagggctgcatagttaggatatgattccagtttcccctcagtgcaaattgatatttttttctgttgacacattctactttgttttcgaagactagtttatagtgttcttttaaaagcaaagaaaatatctttaaaaatcccagctttttggctgggtgcggtggcttcatgcctgtgatcctagcactttgggaggctggggtgggaggatcactggaggccaggagtttgagaccagtctgggcaacacaggcactccatctctttaaaataaaaaataaaaaaataaaaatagccaggcttggtggcccacacttgtagtcccagctactcgggatgctgaggcaggaggattgctggagctcagggattcaaggttgtagtgagctatgattgagccactgcactttagcttgggcaatggagcaaaaccttgtttcctttaaaaaaaaaatttattaaaacatgctcttactttggcaaaaatatatgtttcttcatagtgatgataatcataatgatacattattactatatgcagcttataagaatcagttgtctaatgtatccgtgtaagtttctctgtggttttaagaatcattccataggctgataaatgcatactctcttcaccccattgcacatccagcattctgaatttttctcacttccttgaatatgccatgttccatgcacttgtagatcttccatcacagaaggtgcctcatctgtccagaacccctgccatacctctgctccctttgtctagctaacgctcactcatcctttagatcccagtgaaatgtcacttgcatctgggaggactttctgactaggttctgagcttcctttgcattctgtttttcattgacataatgacatcacatttattagtattgtctcattgtaaaccccagtaaggcaggaactgtatctctctgtatccccaacactaccacagtgcctggtgcatgttaaattgcagttaatatttctagaatgaaagagtgcttccatccttcatcatccgtctttcagataaagaagtatctagttacctttgtcttaaattaaaacaatttcaaaaggttgcatgtgctggtggaccagttgaaatccacagctcccatattgctgctcattgccactgttattgatgccctggagatgatttaaaattcagttatgttgcttgtgatggtggtatttaaaaatctataattttggctgggcgtggtggctcatacctataatcccagctctttgggaggccaaggcaggtggatcacaaggtcaggagtttgagaatagcctggccaacagagaaaccccgcctctactaataatacaaaaattagccggtcgtggtggtgtgcacctgcaatcccagctactcaggaggctgaggcaggagaattgcttgaacccggaggcggaggttgcagtgagctgagattgtgacactgcactccagcctgggcgatagagcaagactctatcttgaagaaaataaaaaataaataaataaaatctataatttttatactcatgtgctattatagtgaccctgtgagacatcataatgccttaatgatagcttgtcttgtttttactttcacttacatctatagttccaaatgttttattgaattgtgctttatttgataattcatagttgtaaactgacctcatcccatatttgtatttttacaatctcaacagttttatcagggacatatttttatattctgtagcataatacagtgccttctgtagagcttagtttcatgtgcagtgatgtgtcagaatgaaatatctgcccagtggtattgaatttcatgtattatgatttacatattcttctgtgtatcaactggttttatattacccagagaatgcttatggtggtggttgagagttgtgtattgctattgactgtacgggccatagacatatttgtaggtatattaaatttgctttgtacttctcacacaattgatttggtgggcattcttcttaattatacttgatgggtgcatacataaattcattcttggttaaaaaaattcagatagtgtagatatggcagtggttcctttaatccctccaattatttatttaccttatatatctgggaactttgtataaaaactaaacactggcctggcacggtggctcatgcctgtcatcccagctctttgggaggcccaggcgggtggatgtcttgagctcaggagtttgagaacagcctgggcaaaatgtggcaaaaccctgtctctacaaaaaaatacaaaagtgacccaagtgtggtggtgcacacctgcagtcccaggtactcgggaggctgaggtgggaggattgcttgagcctgggaagtggaggctgcagtgaactgagatcacaccactgccctttggcctgggtgacaggccgagaccctgtctcaaaaaacctgaacacttctttgttatgtttctacaatttgacacaataattcaagtcagccaagcactttaaaaattattttgaaataattttagatttataggaaagttgtcaaaatagggtagagttaattatatataaccttatgcagtttccctgataaccacttatataaccatagcacagttataaaaaaattatcaggaaattcactggtataataccattaactaaactgtggccctttttgactttcaccggtttttcacctcctgtatttttctctgttccaggatcccatccaggatcccacattaccttcagttgttgtttctcctttatttcctgcaatctattaaagattctaatcctttctttgtctttcatgacttcagcaaacagttttagttggatgcttagtatataccagtcactgagattggtgcttgagggaagggagataaatgaatggatgagacatggcccttacctaatgaggtgagccaacacatagacaagtaatgctaaaacaatgtagtgcctttaaaaggcctttgtactatctccctagagaagagagagttgctgactcactgaataacagtgttgaggcagcattttcagaagaaatgacattgatctgggtcttaaagaatggggaaacttttccttgtggagaaatggagtggaagaggagttcatcatggacaggcaggggcatttggcatgaaagtgtgaaagactggcttgtttgcagactggcaaatcacttgataggaatggagcatagggtatgtgaagaacacagtgaggcatgaaactagaagagtagttacaaagctaccttttttcattactttttattaataaatatatcctcatatttgtagggtaagttttggcttaaattttttttaaatctcattattcatacttaatgagcatttaattgtaatcagtgtttctagttttaaactgcacaacattaagattgttactgtacttttggaaagaaaaagagaacaaataattatgcttagctgttgcaatagcatctaatagcatttaaattctgttaataaagaatatgaatttattctgtaatgcctattgggcacctattatatggcaggcactgtttgaggtgagagagatatagcagcaaagaaaagagaaaaactcctgctcttgttctaatatattctagtggtcctagttgcaatatgtttgaactaacatggtagttcagtcaacaagtcaaatgttaactgcctagcatgttatctagatgctcagcagatttttaaaaaatgaatagatatatgactgggtcttgaaggagtaaaagaatttcaggctgggcacggtggctcatgcctgtaatcacagcactttgggagaccaaggcaggcggataacctaaggtcaggagttcaggaccagcctggcccaacatggtgaaaccttgtcttttcaaaaaatacaaaaattagccaggtgtggtggtgggcccttgtaatcccagctacttgggaggctgaggcaggaaaattgcttgaacccgggaggcagaggttgcagtgagctgagattgtgctgttgcactccaacctgggtgacaagagtgaaactccatctcaaaaaagaaaagaatttcattgagtagaggtttgctggcatgagtaatttttgtttatttcatatgcattcttggagattattcttaggtagttagaacacattgaagatattatttcattgtcttttgacttcaattgtcaatctcaggtaattgtcttttccctggctgtctttaaaaatattttctctgggccgtgcatggtggctcacgcttgtaatcctagcactttgggaggctgaggcaggtggatcaccagaggtcaggagttcaagaccagcctggacaacatagcaaaaccccatctctactaaaaatatattaaaaaaatgggccaggcgtggtggcaggtgcctgtaatcccagctacttgggaggctaaagcaggagaattacctgaacctggggcatggaggttgcagtgagccaagatcgcaccacttcactccagcctgggcaaaagagcaaaactccatatctatctatctatatatatatatttttttcctctggttcttatttttgaagtttttgtacaatatatcaagatacagatttatttttatttattctgctaggtatctgaggattggtattttagttcaggaaaattcgcagccattatttcttcacatactgtttgtgcttcatcctctttttttgtttgtttttttgagatgaagtcttgctctgtcatccaggctggagtgcagtggcgtgatcatggctccactgcaacctctgcctcctgggttcaagctatcctcccacctcagcctcccgagcagctgggattacaggtgtgctccaccacgccctgctaatttttaaatttttttagtagagatgggatttcatcatgttggccaggctggtcttgaactcctgatctcaggcgatccgcccacctaggcctcccaaagtgctgggattaacaggcatgagccaccatacccagcctgcttcatcctcttttaatctcattttcagtctccaattaaacatatgttaaaatttctcactgtatgctctatgcctttaccctcttttgtgtttttcttctttttctgagctgtactcagtttactgattctctcttcaactatatctaatctgtcattagttatagaatttttatttagttatcaaatttgtcatcttttatagtttatagttccctgttaaaaccatttagtttggtttttatctctttgaatatagttaatgtcattgtttttaaatctttacctgtattttcaatatctgaagttcctgtgggtcttcttctgtagtttcttgtttctgctggttctgactcatggtgtttgttttttcctgtgcctgattacatcctggatgttgtttttgaaaaagtatttatagaaataatttgaggttgagaattttcatatgcttctgccttctgcctaggttgtacagtttaaggcctcctcaagccaagttcatgattcaggtattgtgagttgggctgcaaacctgtgtgcaggctggttacttacagttcactttccctctttgaagccccatttacaataggggttggtatccttgagaccccacctgcttaggctccagatgtcaccagaatttcacatcagctttatttcctggattggtaaatataaccccatgataaaagtggctctgagtgttgggtttacctcttggacttcctgtcctcaccaatttttgaccgaaaattcaaccctatgttgttagctctttgaattacctattctgtcctcattagaagagtgcctccagcatttattgcctaaacatgacagctgagtatttttagtttgattttttttttaacatttgctaataatacgttttcaaccagatcataaactttgtggataaggtccctgtctgctatttctttacccttctcatatagcatttaatacaatgataggtggataattggttctcttggccagttgactgatcaaggggcaattctccaaactctggtgatttctccttttcgttcgtaagactgcttttataccccaacaaagaaacttgttataatttaatagtggctgtgtccatttttcttttcttctctgctgttccatcccaaggtgggatggccccaattagactaaccactgaaaccctgggcataaaatggtgcccagggagcttttcttcatattaatttgtgtgtactctaaaaggaaagattatttggcttgctcataaatccaaaattttggtgatgaaaatatgtttataattatttcttttgagcttgatttgttgtggattttttcctttattttggtttaagatcaaatggtttcctaatgtgtatgggtcactgtagtctaaatttttttttttttttttttttttgagatggagttttgcccttgttgcccaggctggagttaaatggcgagatcttgcctcactgcaacctccacctcctggcttcaagtgattctcctgcctcatcctcctgagtagctgggattacagatgcctgccaccacgcccagctaattttgtatttttagtagagacaagattttatcatgttggccaggccggtctggaactcctgacctcaggtgatccgcctgccttgaactcccaaagtgctgggattataggcatgagccaccgtgcctggcctctaaatatttttaaagtatagatgtttttaaacttgtagctcctgagtgtgaactgtcccttgctgttttttgggcatctatcaaggcatttgttctaaccactgagtaagaaggacatcactaagggggttgtagctatacctttcttctttttatctttaattaacatgcattgactgcctggtatgttagaaacagacctgcctattacagtctcattcccttccatactcatccttgcttgtgtggctacctcccaagctaggactgcaagacccttatcactcctgcttactattggtttttgtgtccttttggcaattttctagtggctgcttgaactattggttgtcagattgacctgatttgtttcacttgtaaacaaaatgcttaagccactgttgatttttgtggcagctcagttgcttagagcaaggtgttaatgagacatcggtcataggtccaggctctgggttgactggtaagctttgctctggcccatggccacagaccctgactcccccttgccagctgtcttgcacatgtagctatggctcattatggggacacagcagggggtggagataagacaaggcaaatctgtcatctctgccagaaaagacaactcctactgataggtcagtaaccttttcattggaagaacagcacgttagtattagcttctgtagatgtgtctaactgagtctttttcttaaaataactcatgtgattgtatgggttgtctgcagcaagtttagaatactgctcacattttaaagcatgtttgaatataaggatggctttttagtttgtgaagattattgtccttaatcagggattcttaatatcattctctaaagtagaaaagtgagctttagaagtcaaatttgataaagctctagaaaacaactgcaaaattgctgttataaagaaacctgtcaaatttaggaagtgccctccaggagcccttcatcccaaccaatcctctcctaaaagaaaggaaaaaaagaagaaagatggctaggtagatggaatagtgatcagaaaaaaagaacttttctagaaaagcataccagtgtgctctttaccagagcattttagcaggtaatattttacaaaggacccagcagataattgggcaggttttttctttaggaacttagtgttgatggcctgaattaatctgactaggaatttagacatttcttcatgatatattttgagtccatagatgatctgattctaatgtgacttcagtttttaacttacatagcgttaagcaaaaggatgtgtgtgtatgtatgtgtgtttgttttacatcctaaaggtattacaggccccatggtaaactttttggctcaagtgaatccagagtttggtatatgtaacctccagtggtggttcatgaacaaacacttcatttctgtagtcatatttttttttaaagaataaaagtgagccaggtttaaaacttgttaagaaaataatagcacaggtgatacacagatgaagcaaaattgccgtggatggtctgggaatgcctgaggattgagaaacactggctgaattatacactgtggcagaagaaattataggcccttagaaacaggtagaggttattggaaagattcaagcacctaatgtttagttagaaggtaagtaagctggtttcttaagttcttgtttatttattgggtgtgggctcaggataagttagtttgaaatagatcttagagaagtaaatgcaagacaactttatcaatgagtcatgggcaaacaattctattattagaagtagtatagaaaaggagtaggagaagtagaagggaggaagtctagtattcattcatttatttattcattaattcagccactatttcttgagcacctggtgtatgtcaggcactgttgtaggcactggggacacagcagggagcaaaacagacaagtctctgccctcatgaaattcatttacatcctaatgggaagagacaaataatgtaagtgagtatatagcatgtcagctgtgagaaatgctatggagaaaaataaagcagagtaagggaattaaggagtgatgggatggggaggcattgcttttttaaatagtttgatgaggaaagacctctctaagaaagtgacatttaacttgacttctgagggaagtgagggagcattccaggcatggagaaggagtgttctagatggagggaacagcaagtgcaaagagcccttgacatgtctgagaaacagataagaggccagtgtggctggcgtggagagagaggggagagtcgtcaagtagtaagaggtgagagcagatgggaggaaggtctcagcacaggtcaggcctctggctttgctgagagtgatggatgcctttgcagggttttgaacagaggaggcacatgatttgacttaacgttttaacaagctgtttcctgctgctgtgttgagaataagctgtaggcggcaccaaggtggcagctgggagggtattgccacaaaacaagcaagagatatgatggtttaggccagtggtaatggtggagagtgtgagaagaggacagattctggatgtattttgaagtagagcccgcagaatttgttgatgaacttgatgcagagtgttagaaaaagagaagacttcaaggttattggcctgaataactggaaggatggagttatctatcactgagataaacagaggtaacagaagtaaaggggagagatggccatggtagaaggtggattacacctttaaatttttaaaacatatttttatttaaaatagccctcactccctggcccagtgcacacaaaggacctgatttgcttttaccctgagtttgtcactgtagatatcctggaatacttcgttaaaaactataaataaagtggccataatacggctcattttgttcagattctaaaaaaaaattccttcataagcagttggcttccaaatagcaatgcatgctgtcagtttggtgactaattgggttagaggttaatagcaaggcagtcctataaacatcaacgggagtggtgtatccaaatgaaagcttgcattaggcaacaattcaaagaatgagaatgactaaataccatgttacaagccaagtgaattatattaagagttttaactttgagagaaagggacgttacccctgaaataactatcttagttggatcttccctacttaatactcatagttgggttgtaaaaatgtaaaggttaccatcaaaacagcacttcttaaccatgaaattgactaactttgtaaaattagaaattctgttacttacttcctactatgctgattggacattccttcttttgccaaaagaacagaaagttggattttgtgccttctagccaagagaaccacacacctctctctctgtagaccagctaaatgcttcctactgctcggtgatgaaatcagatcatggaatcagtcagtttgctatactgaattttttttttttcagctgtgttctaattgaacctttggggaataaactaattcttaacatctgaaagtttaaaggtctgatactagaatttatggggtggtagaggagaccttttagtctctgtatccaaaccaaaatgtaaatttacttttatttattttttattttttgagaaggagtctcgcttaggctggagtgcagtgacatgatctcggctcactgcaacctctgcctcccgggttcaagcaattctccctacctcagcctcccaattagctgggattacaggtgctcttcaccacgtctggctaatttttgtattatttagtagagacagggttttgccatgttggccaggctggtcttgaactcctgacctcacgtgatccgcccacctcagcctccaaaagtgctgggattacaggcgtgagccactgagcctggccaatttctttttttattgtgggataatcattccatacttctccctcctctctagtccccacccccacccccctttttccccccacaagtgaagatgatttcctgtgctggtctaggattagttttgttacagtctgtctttataagaacatttcttttccataatccagaagcattttgtaaaacctatgcctggaaattgagtcactttttattgcttagattttcttcacagaaaaacataggttctgttggatgagtatttgttgtgaaagcaaattattaaggggtgaaaattgtctatacaagttgatgtataggaggatatctgaactggattagttgctcttttatctgtgttttcaaagctctttaatagtaactcttataacacttataacagtgttatcactattgtttgggcatcattccattctgctagactgggaattcttttataatacagtgcctgataggcatccattcattccttgaaataatgtattgagtgctcattatgtgcttgaaatagagtgtgtgcaggagccagagcagtcggcagaacagatgcagcttgtgtcgcatgtgcgtacagcccatggcagggtggggggcaggggacccagcaaacaagatacagataactgcgcagtacagtgccaatatgcacaggaacagtgactgtcccctacctacataaatgcatagacctcatatgtgtattgtgaatcctctataattgttgaatttgactttgaaattaaacacttgatattttagactagtcaaaaatgggatatgttattattttaataaaaacaccattgtatccagccgggcacagtggctcacgcctataatcctagcactttgggaagccgaggcgggcagatcacctgaggtcaggagttcaagaccagcttggccaacatggcaaaaccccgtctctactaaaaatacaaaaattagctgggtgtggtggcacacgcctgtaatcccagctacttgggaggctgaggcaggataatcacttgaaccctggaggcctaggttgcagtgagtcgagattgcaccactgcactccagcctgggcaacagactgagactctgtctcaaaaaacaacaacgacaacaaaaataacaccactgtatccatattgcctacaggagaaaatgcagatcacttattttatgtatgtgttgaatcattttaaataacctgacggaggtcctttcttgggcccatgcctctgcacatgttgggcatgttgtagttgtcgttactagcaagacacacctaccctttaagaccagtctaaatgccaccttgttccctccatgtaatctcagaacttctttaagggcaaggaccaaattacgtctgtgaaaccctagagtttgatctaccacttcacgtggaggcatgggacagaggttttgttaatgagtgaatgtatccatttaataagttccttcttcagtacactcttgagacctattctggctttcccaggaaacagctgaaggagtgacctccaatcaagtcagctctgtgtcaatccttcattttcggatgttttttcttccttttctcacagggtcataaggatcaaatgtaataatgatgtaagagttaagcgtattcaataaagggaggcagtggaatcatcacaatgttgatcatcacaatcaacattattattactgcaccactatagttccttgtaatacacagtccagaaatattatcacaaaatctcactgaggatgtcattgttctgggtttgacctagatgttgatgtaatgaacagttctctatcagttagtgtgttggcctagcacaggtgcttgacaaaggccctattcagacttctgtgcattacttcaaacccctccctttgctcccatagtatagtaatgaattaggagtcatatcttttgactggcaagggactgcctaaagcagatccctgcagattggggcctcactgtttctgtgggtataaagaacctctcgggagagcctgaatgatcaggagatctgaactggggagccatcggcccagcaggaggtgcctctgcttggccaaccagagcctgctgcaagaaaccttttttttttttttttttttggttctgacaggcttgttggggaaattgaaaatctcctgtttgaaagccagataatttaaaatcctttctgattcagaatctcagcaagtagtgaagggctaggttattgattgtgggaaatggggcagcctcaaagggctctgggctatctcagtaccccatctccctcacccctcacgcttcctcaggtttctctctcatgctagcttggaatggatggtgtatttcctacccagttgcctttgtttataagcatccaccaccgctgcagtagggtcaggaaactggcaatttcctcagtgatccttgcccttgaaccctatctcctccagcctaggaagtattcagaccaagtactcatgtgtgactctccagtgcttctggatagagaagaccctctgagctgccctaaactcgcaagagaatactccacaggcttatgtaagccaaaccagatcatgagtcagacatctgaactcatcaacaaaaagtgctccaggaaaaagaaatggtctacctggcatattattgtttgaaaatttattttaagtcaatcctctatttcattaagggtaataataatcagtctacaatgcaaaactcagggaaaagtaaatttcattttgtatagctgtaatataacattttttactctgctcaaaattcttgaaattgttaatccaactctataaattaggatatttgagtaaagtaagtatccattgtttgactgtgccagaagcaggagttaactttttctttctctggttaaaattatcacttacttgatagctaagtaattttttgaaagtctcttatatcctgatggtacactaaggccctgaagagagtataaaggtgcaagattcagtcccctctctcaagaaactagcagtatgattggatggataagatttatgcatgtgaaacagagaatgctagatattttgggtggtaatcaagtgtaatagtatgtgattttagttataagcgtgatgagtgcaggaagggagatgaaaaataaataatatttagtgaactccactactacagaataaatatttataatattttctatttcatcaggaagaacaatttgaatcactggcttaatcactggtggggggcctggtttttagtctgtgtcttaaaattcttagctcacttatgtcatttgtcatatgaactttttggagaaagaaatatttagtttttatacgtagtttttaagactttaaaggttttataaccctt

SEQ ID NO: 1304 - DNA, 6537 bp, Homo sapiens
gataatctccatttttgtcatgggactgttaaaaacgtttggaagttccaattctggtcttgatttcccagttaaagatgttctttcacccgaatgcagtctttcctgttggtaaaataagacaaccatcaacattgcctgtttgtctgcttttgaatctcttaaggatggatgtttgtaagatgttgcttaatacagtctggaatactctgtccatttgttgaattgtaaatgactttcaaatgtgcaagttctgttaaatacaaagagaacctctatgggtaacttttgtgttgaagaagtcatttgtcaaccatggtaaaacttgcaaacccactttatacagagtggattcttgaagctatacagaaaataaaaaagcaaaagcaaaggccctctgaagagagaatctgccatgcggtcagtacttcccatgggttggataagaagacagtctctgaacagctggaactcagtgttcaggatggctcagttctcaaagtcaccaacaaaggccttgcctcctataaggacccagacaaccctgggcgcttttcatcagttaaaccaggcacttttcctaagtcagccaaggggtctagaggatcatgtaatgatctccgcaatgtggattggaataaacttttaaggagagcaattgaaggacttgaggagccgaatggctcctccctgaagaacatagagaagtatctcagaagtcaaagtgatctcacaagcaccaccaacaacccagcctttcagcagcggctgcgactgggggccaaacgcgctgtgaataatgggaggttactgaaagacggaccgcagtacagggtcaattatgggagcttagatggcaaaggggcacctcagtatcccagtgcattcccatcctcgctcccacctgtcagccttctaccccatgagaaagaccagccccgtgctgatcccattccaatatgtagcttctgtttggggactaaagaatcaaatcgtgaaaagaaaccagaagaactcctctcttgtgcagattgtggcagtagtggacacccatcctgtttgaaattttgtcctgaattaacaacaaatgtaaaggccttaaggtggcagtgcatcgaatgcaagacatgcagtgcctgtagagtccaaggcagaaatgctgataatatgcttttttgtgattcctgtgatagaggatttcatatggaatgctgtgacccaccactttccagaatgccaaaagggatgtggatttgccaagtctgcagaccaaagaaaaagggaagaaaactacttcatgagaaagctgcacaaataaaacgacgatatgcaaaacccattggacgaccgaaaaataaattaaagcaacgattgttgtctgtaaccagtgatgaaggatccatgaatgcattcacaggaagggggtcacctggtaggggtcaaaagactaaagtctgtaccacaccttcatctggtcatgctgcatctgggaaggactcaagcagcagattggctgttacagaccccactcggcctggtgccaccaccaaaatcaccaccacctccacctacatttctgcctctacacttaaagttaacaagaaaaccaaagggctcattgatggccttactaagttttttacaccatcacctgatggtcgcagatcacgaggtgaaattatagacttttcaaagcactatcgtccaaggaaaaaggtctctcagaaacagtcatgcacttctcatgtgttggctacaggtaccacacaaaagctaaaacctccaccttcttcacttccacccccaacccccatctccggtcagagccccagttcacaaaagtccagcacggccacttcttctccctctccccagagttcttccagccagtgcagtgtgccctccctgagcagccttaccactaacagccagctgaaggcactctttgatgggctttctcatactataccactcagggacagtctcgcaaaaagggacaccccgagttatgcaccacccaaacgtatgcgtcgtaaaactgaattatcttccacggcaaaatctaaagcccacttctttggcaaaagagatattagaagtcggtttatttctcactcctcctcctctagctgggggatggctagaggaagtatttttaaagcaattgctcacttcaagcgaacaactttccttaaaaagcacaggatgctaggcagattaaaatataaagtgacccctcagatggggaccccctcaccagggaaggggagcttgacagacggaaggattaaacctgatcaggatgatgatactgaaataaaaataaacatcaaacaagaaagtgcagatgtaaatgtgattggaaacaaggatgtcgttactgaagaggatttggatgtttttaagcaggcccaggaactttcttgggagaaaatagagtgtgagagtggggtggaagactgtggccggtacccttctgtgattgaatttggtaaatatgaaatccaaacctggtactcctcgccttacccacaggaatatgcaagattaccaaagctttacctgtgtgaattctgtcttaaatatatgaaaagtaaaaatattttgctaagacactccaagaagtgtggatggtttcatcctccagcaaatgaaatttaccgaaggaaagacctttcagtatttgaggttgatgggaatatgagcaaaatttattgccaaaacctttgcttgttagccaagctcttcctggaccacaaaacgttgtattatgatgtcgagccattccttttttatgtccttacaaaaaatgatgaaaagggctgtcatctggttggatacctctctaaggaaaagctttgccagcagaagtataatgtctcctgcataatgatcatgccccagcaccaaaggcaaggatttggacggtttctcattgatttcagctatttgctttctagaagagaaggccaagcagggtctcctgaaaagcctctctccgatctgggccgtctctcctacctggcatattggaagagcgtcatcttggagtatctctaccaccaccatgagaggcacatcagcatcaaggcaattagcagagcgacgggcatgtgcccacatgacattgccaccactctgcagcacctccacatgatcgacaagagagatggcagatttgtcatcattagacgggaaaagttgatattgagccacatggaaaagctgaaaacctgttccagagccaatgaacttgatccagacagtctgaggtggaccccaattttaatttctaatgctgcagtgtctgaagaagagcgagaagctgagaaagaggctgagcggctaatggaacaagctagctgctgggagaaggaggaacaagaaatcctgtcaactagagctaacagtaggcaatcacctgcaaaagtacaatcgaaaaataaatatttgcattccccggagagccggccagtcacaggggagcgagggcagctgctggagctgtctaaagagagcagtgaagaagaagaggaggaggaggacgaggaggaggaagaagaggaggaagaagaggaagaggatgaagaggaggaagaagaggaagaagaagaagaagaagaagaaaatattcaaagctctcccccaagattgacgaaaccacagtcagttgccataaagagaaagaggccttttgtactaaagaagaaaaggggtcgtaaacgcaggaggatcaacagcagtgtaacaacagagaccatttcagagacgacagaagtactgaatgagccctttgacaactcagatgaagagaggccaatgccacagctggagcctacctgtgagattgaagtggaggaagatggcaggaagccagtcctgagaaaagcattccagcatcagcctgggaagaaaagacaaacagaggaagaggaaggaaaagacaatcattgcttcaagaatgctgacccttgtagaaacaatatgaatgatgattcaagtaacttgaaagaaggcagtaaagacaatcccgaacctctaaagtgcaaacaagtgtggccaaaaggaacaaagcgcggtctatctaagtggaggcaaaacaaagagaggaagaccggatttaaactgaatttgtacaccccgccagaaacacccatggagcctgacgagcaggtaacagtggaagaacagaaggagacttcagaaggaaaaaccagccccagtcccatcaggattgaggaggaggtcaaggaaactggggaagccctgttgcctcaagaggaaaacagaagggaagaaacatgtgcccctgtaagtccaaacacatcaccaggtgaaaaaccagaagatgatctcatcaaacctgaggaagaggaagaggaggaggaggaggaagaggaagaagaggaagaagaggaaggggaagaagaagaaggaggaggaaatgtagaaaaagatccagatggtgctaaaagccaagaaaaagaggaaccagaaatctccacggaaaaagaagactctgcacgtttggatgatcacgaagaggaggaggaagaggatgaagagccatcccacaacgaggaccatgatgccgatgacgaggatgacagccacatggagtctgccgaagtggagaaggaagagctgcccagagaaagcttcaaagaagtactggaaaaccaggagacttttttagaccttaatgtgcagcctggtcactcgaacccagaggtcttaatggactgtggcgtcgacctgacagcttcttgtaacagtgagcccaaggagcttgctggggaccctgaagctgtacccgaatctgacgaggagccacccccaggagaacaggcacagaagcaggaccaaaagaacagcaaggaagtcgatacagagttcaaagagggaaacccagcaaccatggaaatcgactctgagactgtccaggccgttcagtctttgacccaggagagcagcgaacaggacgacacctttcaggattgtgccgagactcaagaggcctgtagaagcctacagaactacacccgtgcagaccaaagtccacagattgccaccacgctcgacgattgccaacagtcggaccacagtagcccagtttcatccgtccactcccatcctggccagtccgtacgttctgtcaacagcccaagtgtccctgctctggaaaacagctacgcccaaatcagcccagatcaaagtgccatctcagtgccatctctgcagaacatggaaaccagtcccatgatggatgtcccatcagtttcagatcattcacagcaagtcgtagacagtggatttagtgacctgggcagtatcgagagcacaactgagaactacgaaaacccaagcagctacgattctactatgggaggcagcatctgtggaaacggctcttcacagaacagctgctcctatagcaacctcacctccagcagtctgacacagagcagctgtgctgtcacccagcagatgtccaacatcagcgggagctgcagcatgctgcagcaaaccagcatcagctcccctccgacctgcagcgtcaagtctcctcaaggctgtgtggtggagaggcctccgagcagcagccagcagctggctcagtgcagcatggctgctaacttcaccccacccatgcagctggctgaaatccccgagacgagcaacgccaacattggcttatacgagcgaatgggtcagagtgattttggggctgggcattacccgcagccgtcagccaccttcagccttgccaaactgcagcagttaactaatacacttattgatcattcattgccttacagccattccgctgctgtgacttcctatgcaaacagtgcctctttgtccacaccattaagtaacacagggcttgttcaactttctcagtctccacactccgtccctgggggaccccaagcacaagctaccatgaccccaccccccaacctgactcctcctccaatgaatctgccgccgcctcttttgcaacggaacatggctgcatcaaatattggcatctctcacagccaaagactgcaaacccagattgccagcaagggccacatctccatgagaaccaagtcagcgtctctgtcaccagccgctgccacccatcagtcacaaatctatgggcgctcccagactgtagccatgcagggtcctgcacggactttaacgatgcaaagaggcatgaacatgagtgtgaacctgatgccagcgccagcctacaatgtcaactctgtgaacatgaacatgaacactctcaacgccatgaatgggtacagcatgtcccagccaatgatgaacagtggctaccacagcaatcatggctatatgaatcaaacgccccaataccctatgcagatgcagatgggcatgatgggcacccagccatatgcccagcagccaatgcagaccccaccccacggtaacatgatgtacacggcccccggacatcacggctacatgaacacaggcatgtccaaacagtctctcaatggctcctacatgagaaggtag

SEQ ID NO: 1305 - DNA, 6222 bp, Homo sapiens
atggtaaaacttgcaaacccactttatacagagtggattcttgaagctatacagaaaataaaaaagcaaaagcaaaggccctctgaagagagaatctgccatgcggtcagtacttcccatgggttggataagaagacagtctctgaacagctggaactcagtgttcaggatggctcagttctcaaagtcaccaacaaaggccttgcctcctataaggacccagacaaccctgggcgcttttcatcagttaaaccaggcacttttcctaagtcagccaaggggtctagaggatcatgtaatgatctccgcaatgtggattggaataaacttttaaggagagcaattgaaggacttgaggagccgaatggctcctccctgaagaacatagagaagtatctcagaagtcaaagtgatctcacaagcaccaccaacaacccagcctttcagcagcggctgcgactgggggccaaacgcgctgtgaataatgggaggttactgaaagacggaccgcagtacagggtcaattatgggagcttagatggcaaaggggcacctcagtatcccagtgcattcccatcctcgctcccacctgtcagccttctaccccatgagaaagaccagccccgtgctgatcccattccaatatgtagcttctgtttggggactaaagaatcaaatcgtgaaaagaaaccagaagaactcctctcttgtgcagattgtggcagtagtggacacccatcctgtttgaaattttgtcctgaattaacaacaaatgtaaaggccttaaggtggcagtgcatcgaatgcaagacatgcagtgcctgtagagtccaaggcagaaatgctgataatatgcttttttgtgattcctgtgatagaggatttcatatggaatgctgtgacccaccactttccagaatgccaaaagggatgtggatttgccaagtctgcagaccaaagaaaaagggaagaaaactacttcatgagaaagctgcacaaataaaacgacgatatgcaaaacccattggacgaccgaaaaataaattaaagcaacgattgttgtctgtaaccagtgatgaaggatccatgaatgcattcacaggaagggggtcacctggtaggggtcaaaagactaaagtctgtaccacaccttcatctggtcatgctgcatctgggaaggactcaagcagcagattggctgttacagaccccactcggcctggtgccaccaccaaaatcaccaccacctccacctacatttctgcctctacacttaaagttaacaagaaaaccaaagggctcattgatggccttactaagttttttacaccatcacctgatggtcgcagatcacgaggtgaaattatagacttttcaaagcactatcgtccaaggaaaaaggtctctcagaaacagtcatgcacttctcatgtgttggctacaggtaccacacaaaagctaaaacctccaccttcttcacttccacccccaacccccatctccggtcagagccccagttcacaaaagtccagcacggccacttcttctccctctccccagagttcttccagccagtgcagtgtgccctccctgagcagccttaccactaacagccagctgaaggcactctttgatgggctttctcatactataccactcagggacagtctcgcaaaaagggacaccccgagttatgcaccacccaaacgtatgcgtcgtaaaactgaattatcttccacggcaaaatctaaagcccacttctttggcaaaagagatattagaagtcggtttatttctcactcctcctcctctagctgggggatggctagaggaagtatttttaaagcaattgctcacttcaagcgaacaactttccttaaaaagcacaggatgctaggcagattaaaatataaagtgacccctcagatggggaccccctcaccagggaaggggagcttgacagacggaaggattaaacctgatcaggatgatgatactgaaataaaaataaacatcaaacaagaaagtgcagatgtaaatgtgattggaaacaaggatgtcgttactgaagaggatttggatgtttttaagcaggcccaggaactttcttgggagaaaatagagtgtgagagtggggtggaagactgtggccggtacccttctgtgattgaatttggtaaatatgaaatccaaacctggtactcctcgccttacccacaggaatatgcaagattaccaaagctttacctgtgtgaattctgtcttaaatatatgaaaagtaaaaatattttgctaagacactccaagaagtgtggatggtttcatcctccagcaaatgaaatttaccgaaggaaagacctttcagtatttgaggttgatgggaatatgagcaaaatttattgccaaaacctttgcttgttagccaagctcttcctggaccacaaaacgttgtattatgatgtcgagccattccttttttatgtccttacaaaaaatgatgaaaagggctgtcatctggttggatacctctctaaggaaaagctttgccagcagaagtataatgtctcctgcataatgatcatgccccagcaccaaaggcaaggatttggacggtttctcattgatttcagctatttgctttctagaagagaaggccaagcagggtctcctgaaaagcctctctccgatctgggccgtctctcctacctggcatattggaagagcgtcatcttggagtatctctaccaccaccatgagaggcacatcagcatcaaggcaattagcagagcgacgggcatgtgcccacatgacattgccaccactctgcagcacctccacatgatcgacaagagagatggcagatttgtcatcattagacgggaaaagttgatattgagccacatggaaaagctgaaaacctgttccagagccaatgaacttgatccagacagtctgaggtggaccccaattttaatttctaatgctgcagtgtctgaagaagagcgagaagctgagaaagaggctgagcggctaatggaacaagctagctgctgggagaaggaggaacaagaaatcctgtcaactagagctaacagtaggcaatcacctgcaaaagtacaatcgaaaaataaatatttgcattccccggagagccggccagtcacaggggagcgagggcagctgctggagctgtctaaagagagcagtgaagaagaagaggaggaggaggacgaggaggaggaagaagaggaggaagaagaggaagaggatgaagaggaggaagaagaggaagaagaagaagaagaagaagaaaatattcaaagctctcccccaagattgacgaaaccacagtcagttgccataaagagaaagaggccttttgtactaaagaagaaaaggggtcgtaaacgcaggaggatcaacagcagtgtaacaacagagaccatttcagagacgacagaagtactgaatgagccctttgacaactcagatgaagagaggccaatgccacagctggagcctacctgtgagattgaagtggaggaagatggcaggaagccagtcctgagaaaagcattccagcatcagcctgggaagaaaagacaaacagaggaagaggaaggaaaagacaatcattgcttcaagaatgctgacccttgtagaaacaatatgaatgatgattcaagtaacttgaaagaaggcagtaaagacaatcccgaacctctaaagtgcaaacaagtgtggccaaaaggaacaaagcgcggtctatctaagtggaggcaaaacaaagagaggaagaccggatttaaactgaatttgtacaccccgccagaaacacccatggagcctgacgagcaggtaacagtggaagaacagaaggagacttcagaaggaaaaaccagccccagtcccatcaggattgaggaggaggtcaaggaaactggggaagccctgttgcctcaagaggaaaacagaagggaagaaacatgtgcccctgtaagtccaaacacatcaccaggtgaaaaaccagaagatgatctcatcaaacctgaggaagaggaagaggaggaggaggaggaagaggaagaagaggaagaagaggaaggggaagaagaagaaggaggaggaaatgtagaaaaagatccagatggtgctaaaagccaagaaaaagaggaaccagaaatctccacggaaaaagaagactctgcacgtttggatgatcacgaagaggaggaggaagaggatgaagagccatcccacaacgaggaccatgatgccgatgacgaggatgacagccacatggagtctgccgaagtggagaaggaagagctgcccagagaaagcttcaaagaagtactggaaaaccaggagacttttttagaccttaatgtgcagcctggtcactcgaacccagaggtcttaatggactgtggcgtcgacctgacagcttcttgtaacagtgagcccaaggagcttgctggggaccctgaagctgtacccgaatctgacgaggagccacccccaggagaacaggcacagaagcaggaccaaaagaacagcaaggaagtcgatacagagttcaaagagggaaacccagcaaccatggaaatcgactctgagactgtccaggccgttcagtctttgacccaggagagcagcgaacaggacgacacctttcaggattgtgccgagactcaagaggcctgtagaagcctacagaactacacccgtgcagaccaaagtccacagattgccaccacgctcgacgattgccaacagtcggaccacagtagcccagtttcatccgtccactcccatcctggccagtccgtacgttctgtcaacagcccaagtgtccctgctctggaaaacagctacgcccaaatcagcccagatcaaagtgccatctcagtgccatctctgcagaacatggaaaccagtcccatgatggatgtcccatcagtttcagatcattcacagcaagtcgtagacagtggatttagtgacctgggcagtatcgagagcacaactgagaactacgaaaacccaagcagctacgattctactatgggaggcagcatctgtggaaacggctcttcacagaacagctgctcctatagcaacctcacctccagcagtctgacacagagcagctgtgctgtcacccagcagatgtccaacatcagcgggagctgcagcatgctgcagcaaaccagcatcagctcccctccgacctgcagcgtcaagtctcctcaaggctgtgtggtggagaggcctccgagcagcagccagcagctggctcagtgcagcatggctgctaacttcaccccacccatgcagctggctgaaatccccgagacgagcaacgccaacattggcttatacgagcgaatgggtcagagtgattttggggctgggcattacccgcagccgtcagccaccttcagccttgccaaactgcagcagttaactaatacacttattgatcattcattgccttacagccattccgctgctgtgacttcctatgcaaacagtgcctctttgtccacaccattaagtaacacagggcttgttcaactttctcagtctccacactccgtccctgggggaccccaagcacaagctaccatgaccccaccccccaacctgactcctcctccaatgaatctgccgccgcctcttttgcaacggaacatggctgcatcaaatattggcatctctcacagccaaagactgcaaacccagattgccagcaagggccacatctccatgagaaccaagtcagcgtctctgtcaccagccgctgccacccatcagtcacaaatctatgggcgctcccagactgtagccatgcagggtcctgcacggactttaacgatgcaaagaggcatgaacatgagtgtgaacctgatgccagcgccagcctacaatgtcaactctgtgaacatgaacatgaacactctcaacgccatgaatgggtacagcatgtcccagccaatgatgaacagtggctaccacagcaatcatggctatatgaatcaaacgccccaataccctatgcagatgcagatgggcatgatgggcacccagccatatgcccagcagccaatgcagaccccaccccacggtaacatgatgtacacggcccccggacatcacggctacatgaacacaggcatgtccaaacagtctctcaatggctcctacatgagaaggtag

SEQ ID NO: 1306 - DNA, 13118 bp, Mus musculus
  misc_feature (1)..(2832): n = a, g, c, or t.
  misc_feature (3670)..(5514): n = a, g, c, or t.
nnnnnnnnnnnnnnnnnnnnnnnnnnnnnnnnnnnnnnnnnnnnnnnnnnnnnnnnnnnnnnnnnnnnnnnnnnnnnnnnnnnnnnnnnnnnnnnnnnnnnnnnnnnnnnnnnnnnnnnnnnnnnnnnnnnnnnnnnnnnnnnnnnnnnnnnnnnnnnnnnnnnnnnnnnnnnnnnnnnnnnnnnnnnnnnnnnnnnnnnnnnnnnnnnnnnnnnnnnnnnnnnnnnnnnnnnnnnnnnnnnnnnnnnnnnnnnnnnnnnnnnnnnnnnnnnnnnnnnnnnnnnnnnnnnnnnnnnnnnnnnnnnnnnnnnnnnnnnnnnnnnnnnnnnnnnnnnnnnnnnnnnnnnnnnnnnnnnnnnnnnnnnnnnnnnnnnnnnnnnnnnnnnnnnnnnnnnnnnnnnnnnnnnnnnnnnnnnnnnnnnnnnnnnnnnnnnnnnnnnnnnnnnnnnnnnnnnnnnnnnnnnnnnnnnnnnnnnnnnnnnnnnnnnnnnnnnnnnnnnnnnnnnnnnnnnnnnnnnnnnnnnnnnnnnnnnnnnnnnnnnnnnnnnnnnnnnnnnnnnnnnnnnnnnnnnnnnnnnnnnnnnnnnnnnnnnnnnnnnnnnnnnnnnnnnnnnnnnnnnnnnnnnnnnnnnnnnnnnnnnnnnnnnnnnnnnnnnnnnnnnnnnnnnnnnnnnnnnnnnnnnnnnnnnnnnnnnnnnnnnnnnnnnnnnnnnnnnnnnnnnnnnnnnnnnnnnnnnnnnnnnnnnnnnnnnnnnnnnnnnnnnnnnnnnnnnnnnnnnnnnnnnnnnnnnnnnnnnnnnnnnnnnnnnnnnnnnnnnnnnnnnnnnnnnnnnnnnnnnnnnnnnnnnnnnnnnnnnnnnnnnnnnnnnnnnnnnnnnnnnnnnnnnnnnnnnnnnnnnnnnnnnnnnnnnnnnnnnnnnnnnnnnnnnnnnnnnnnnnnnnnnnnnnnnnnnnnnnnnnnnnnnnnnnnnnnnnnnnnnnnnnnnnnnnnnnnnnnnnnnnnnnnnnnnnnnnnnnnnnnnnnnnnnnnnnnnnnnnnnnnnnnnnnnnnnnnnnnnnnnnnnnnnnnnnnnnnnnnnnnnnnnnnnnnnnnnnnnnnnnnnnnnnnnnnnnnnnnnnnnnnnnnnnnnnnnnnnnnnnnnnnnnnnnnnnnnnnnnnnnnnnnnnnnnnnnnnnnnnnnnnnnnnnnnnnnnnnnnnnnnnnnnnnnnnnnnnnnnnnnnnnnnnnnnnnnnnnnnnnnnnnnnnnnnnnnnnnnnnnnnnnnnnnnnnnnnnnnnnnnnnnnnnnnnnnnnnnnnnnnnnnnnnnnnnnnnnnnnnnnnnnnnnnnnnnnnnnnnnnnnnnnnnnnnnnnnnnnnnnnnnnnnnnnnnnnnnnnnnnnnnnnnnnnnnnnnnnnnnnnnnnnnnnnnnnnnnnnnnnnnnnnnnnnnnnnnnnnnnnnnnnnnnnnnnnnnnnnnnnnnnnnnnnnnnnnnnnnnnnnnnnnnnnnnnnnnnnnnnnnnnnnnnnnnnnnnnnnnnnnnnnnnnnnnnnnnnnnnnnnnnnnnnnnnnnnnnnnnnnnnnnnnnnnnnnnnnnnnnnnnnnnnnnnnnnnnnnnnnnnnnnnnnnnnnnnnnnnnnnnnnnnnnnnnnnnnnnnnnnnnnnnnnnnnnnnnnnnnnnnnnnnnnnnnnnnnnnnnnnnnnnnnnnnnnnnnnnnnnnnnnnnnnnnnnnnnnnnnnnnnnnnnnnnnnnnnnnnnnnnnnnnnnnnnnnnnnnnnnnnnnnnnnnnnnnnnnnnnnnnnnnnnnnnnnnnnnnnnnnnnnnnnnnnnnnnnnnnnnnnnnnnnnnnnnnnnnnnnnnnnnnnnnnnnnnnnnnnnnnnnnnnnnnnnnnnnnnnnnnnnnnnnnnnnnnnnnnnnnnnnnnnnnnnnnnnnnnnnnnnnnnnnnnnnnnnnnnnnnnnnnnnnnnnnnnnnnnnnnnnnnnnnnnnnnnnnnnnnnnnnnnnnnnnnnnnnnnnnnnnnnnnnnnnnnnnnnnnnnnnnnnnnnnnnnnnnnnnnnnnnnnnnnnnnnnnnnnnnnnnnnnnnnnnnnnnnnnnnnnnnnnnnnnnnnnnnnnnnnnnnnnnnnnnnnnnnnnnnnnnnnnnnnnnnnnnnnnnnnnnnnnnnnnnnnnnnnnnnnnnnnnnnnnnnnnnnnnnnnnnnnnnnnnnnnnnnnnnnnnnnnnnnnnnnnnnnnnnnnnnnnnnnnnnnnnnnnnnnnnnnnnnnnnnnnnnnnnnnnnnnnnnnnnnnnnnnnnnnnnnnnnnnnnnnnnnnnnnnnnnnnnnnnnnnnnnnnnnnnnnnnnnnnnnnnnnnnnnnnnnnnnnnnnnnnnnnnnnnnnnnnnnnnnnnnnnnnnnnnnnnnnnnnnnnnnnnnnnnnnnnnnnnnnnnnnnnnnnnnnnnnnnnnnnnnnnnnnnnnnnnnnnnnnnnnnnnnnnnnnnnnnnnnnnnnnnnnnnnnnnnnnnnnnnnnnnnnnnnnnnnnnnnnnnnnnnnnnnnnnnnnnnnnnnnnnnnnnnnnnnnnnnnnnnnnnnnnnnnnnnnnnnnnnnnnnnnnnnnnnnnnnnnnnnnnnnnnnnnnnnnnnnnnnnnnnnnnnnnnnnnnnnnnnnnnnnnnnnnnnnnnnnnnnnnnnnnnnnnnnnnnnnnnnnnnnnnnnnnnnnnnnnnnnnnnnnnnnnnnnnnnnnnnnnnnnnnnnnnnnnnnnnnnnnnnnnnnnnnnnnnnnnnnnnnnnnnnnnnnnnnnnnnnnnnnnnnnnnnnnnnnnnnnnnnnnnnnnnnnnnnnnnnnnnnnnnnnnnnnnnnnnnnnnnnnntacttttcaacaccaataaacaagaccttctcaaggttggagttccctgcgagctgccagtcagctcccaccgggcatctgggcaccattttgtgcgctgcagccgttcagtatatacatacaaatgtcaaacatatttttgacttttcagcattaattaaaaccagggcgttatttgcatgtaataactgtttacttgttactttttatgaaactgaaatagtttacattctttcgaacatttcctgttcctgttggctcccttccccacgcacagatttctttcaaacgtagcccttaactggttgcaggttgatgggtggaaaatgtttgcttttatgaattaagctttcgttgctgctcctaattagtccccaagccccctttgtcatccccaatctctgagccctttgcaacttaattgaaggtctggccctgagtggagtgccacgggtgtagggtccaggtgatgggggcgggggcgggggcacattatagcatgtcgctagctagggaagtcggtggatggtgaaccccaggaggcattaggcactcaggattctcttcttcctccacactgctccctctcttgagaggtagcagggaaagaaaggggtgatcatgattctcttactgtggcccctctgctactaagaagtttttttgctttatttatgttgaggcagtctcacaccaggtatagtataggctggcctggaacttgttatgtagccaagattaaccccagatttttagtattggctctgcctcagtgctaggatcgcaggtgtgtgctaccgcacctaacccactgacatctcttagtgaattgtaccgnnnnnnnnnnnnnnnnnnnnnnnnnnnnnnnnnnnnnnnnnnnnnnnnnnnnnnnnnnnnnnnnnnnnnnnnnnnnnnnnnnnnnnnnnnnnnnnnnnnnnnnnnnnnnnnnnnnnnnnnnnnnnnnnnnnnnnnnnnnnnnnnnnnnnnnnnnnnnnnnnnnnnnnnnnnnnnnnnnnnnnnnnnnnnnnnnnnnnnnnnnnnnnnnnnnnnnnnnnnnnnnnnnnnnnnnnnnnnnnnnnnnnnnnnnnnnnnnnnnnnnnnnnnnnnnnnnnnnnnnnnnnnnnnnnnnnnnnnnnnnnnnnnnnnnnnnnnnnnnnnnnnnnnnnnnnnnnnnnnnnnnnnnnnnnnnnnnnnnnnnnnnnnnnnnnnnnnnnnnnnnnnnnnnnnnnnnnnnnnnnnnnnnnnnnnnnnnnnnnnnnnnnnnnnnnnnnnnnnnnnnnnnnnnnnnnnnnnnnnnnnnnnnnnnnnnnnnnnnnnnnnnnnnnnnnnnnnnnnnnnnnnnnnnnnnnnnnnnnnnnnnnnnnnnnnnnnnnnnnnnnnnnnnnnnnnnnnnnnnnnnnnnnnnnnnnnnnnnnnnnnnnnnnnnnnnnnnnnnnnnnnnnnnnnnnnnnnnnnnnnnnnnnnnnnnnnnnnnnnnnnnnnnnnnnnnnnnnnnnnnnnnnnnnnnnnnnnnnnnnnnnnnnnnnnnnnnnnnnnnnnnnnnnnnnnnnnnnnnnnnnnnnnnnnnnnnnnnnnnnnnnnnnnnnnnnnnnnnnnnnnnnnnnnnnnnnnnnnnnnnnnnnnnnnnnnnnnnnnnnnnnnnnnnnnnnnnnnnnnnnnnnnnnnnnnnnnnnnnnnnnnnnnnnnnnnnnnnnnnnnnnnnnnnnnnnnnnnnnnnnnnnnnnnnnnnnnnnnnnnnnnnnnnnnnnnnnnnnnnnnnnnnnnnnnnnnnnnnnnnnnnnnnnnnnnnnnnnnnnnnnnnnnnnnnnnnnnnnnnnnnnnnnnnnnnnnnnnnnnnnnnnnnnnnnnnnnnnnnnnnnnnnnnnnnnnnnnnnnnnnnnnnnnnnnnnnnnnnnnnnnnnnnnnnnnnnnnnnnnnnnnnnnnnnnnnnnnnnnnnnnnnnnnnnnnnnnnnnnnnnnnnnnnnnnnnnnnnnnnnnnnnnnnnnnnnnnnnnnnnnnnnnnnnnnnnnnnnnnnnnnnnnnnnnnnnnnnnnnnnnnnnnnnnnnnnnnnnnnnnnnnnnnnnnnnnnnnnnnnnnnnnnnnnnnnnnnnnnnnnnnnnnnnnnnnnnnnnnnnnnnnnnnnnnnnnnnnnnnnnnnnnnnnnnnnnnnnnnnnnnnnnnnnnnnnnnnnnnnnnnnnnnnnnnnnnnnnnnnnnnnnnnnnnnnnnnnnnnnnnnnnnnnnnnnnnnnnnnnnnnnnnnnnnnnnnnnnnnnnnnnnnnnnnnnnnnnnnnnnnnnnnnnnnnnnnnnnnnnnnnnnnnnnnnnnnnnnnnnnnnnnnnnnnnnnnnnnnnnnnnnnnnnnnnnnnnnnnnnnnnnnnnnnnnnnnnnnnnnnnnnnnnnnnnnnnnnnnnnnnnnnnnnnnnnnnnnnnnnnnnnnnnnnnnnnnnnnnnnnnnnnnnnnnnnnnnnnnnnnnnnnnnnnnnnnnnnnnnnnnnnnnnnnnnnnnnnnnnnnnnnnnnnnnnnnnnnnnnnnnnnnnnnnnnnnnnnnnnnnnnnnnnnnnnnnnnnnnnnnnnnnnnnnnnnnnnnnnnnnnnnnnnnnnnnnnnnnnnnnnnnnnnnnnnnnnnnnnnnnnnnnnnnnnnnnnnnnnnnnnnnnnnnnnnnnnnnnnnnnnnnnnnnnnnnnnnnnnnnnnnnnnntgtggagagaggcttggggggagagagctgtaggtgcgggctgatggcatcactgggcaagggataaacgcatcttgctgaagctgggaggttacagagctgaggggaggccccaggagtccagacagctccctgtgggcggggcttgtcagtcatacttcctgacccacttgagactgctgattggtcagggttgcagggtacacgtgtttcacacacctgatcaggacagccttcctacgggccccctccccctcctcccctaaccttatccccatcccccacccctgccgccagcaaccagagcccacatagtttcttgattgcgactcatggccttgtggcctggcaccatagcatggttgctaggctcttgcccagccagccacctcctgcatcttcctcttagttccctgcatcagagaaatgctcgcactgagcacctccaaggaaactggggacagctcactccacccatctttctcaaggtctcttgctcttggcccaaaacctgactccctttccagctctgtggttggttgagaaggcaaggagctgctggtgacctcagaagtggcatgtggtctgttccctggggcaggttgggaggtgggtggcagatgatgagttgtgtgtgtgaatcttgagtcctgcctggatactatgggagctgtggttacccagctcctctgtgagcctcagtctttgcatctggaaagttggtgcatttaaaatagttaatccggtctctatcatacacggggtagcatcctggggactgggggtagggtggggtggagatagggtgacactctggcccctgtgaacttagcacctaagagagagaaagtgagccagcaggcagattctgaagtgaactttgcaaagaaacttttacacaggtccaggggcaggaggcacatggagctggagaggggaacagctacatttagacactggggagggggatcatggtgaactggtggtctgtgtaacagattccacagtaagctccaacagtggttctggtgatgaccataacgttgagtttatgaggagcactgagactattcagagaaatctctaaggactgtcatgtgatctgtaaatgtctgcgtagcttgttggtgacaaggtcacaggcactgctcattagacttctgtggcttgtggcttgcactctggcttgagagaggctcttccagttaggggttggggacaatactattgcagatttttttcctgtcccagatccctggccagctctatactaagaagggccaaccacagaggccaaattgaaaatctccactctgtttgagggttttggccctggagatggaacccaggacctgaagcattctagacaaaccttctaacactgaagtcaacccccctccccctggcctctaaaatgtcacctttaaataaagtagctaggggaagtcctcattgaaaaggactacgtctgaaaaaggactctccagtacagacctagccctcagtctggagtcctggcagctaaggctccaggtatcagcctaccccaccccaccccacccccttcattgtggccctagaagcaatgaggtcagacagccactccaacttccccttcgtgcccccattggttgggaggaggagtctaggagagaaatgacctcaaaatgagaaggcagagagaagagtgtccccaaggggagtagaaaggaatctgaggccacctgccctgtgtctccccagactgtctgcagttctttttccagaaatcaagcaaatggtccctgggcctggggatgcggccgggctggctttcctaactcaaacctccaaggatagatgccttaatatttgtgtcctgggctctgctggccacctcagggaccttcttccagtgctgggtctatttcccagggtgctcggtactctcccagaagcccttgagtttggaggctcagctggctggctggcctggctgccttagccatgctcaggcgtctcctgtttctggagctagaattttcccttgagcaaagagaacaataagattgcctgtgtcctcttggagagcaggactgtgaaaactggccctcttcttagggcaccattaacatgacctgtctccagtagcctcctgggcatctctgggggccactccagagagacacaaatgcctgggcttggagtgcccagggggagttcccaagccactaacttgggttgagagtcagtccacagaggcaaagctggacgtggggaatggagcttgggtctctgtggagtcccatcttgtccccaccccacccacccaggctcatcttaaatggtaacggcgctggcctagacattggggaaacaggcagagagatgaagccctggacacagacagtgtacagcgtgataaaatgactaagatggtagaaaaaaatcaggcttgccctttgacgtacgtccctaaacctttggccttcaaggtagagtactttgaaagtacaccttcatctacttcctgcctggggaggtctctaacatggacagtagaagaaagagaaagagagaaagaggggggaaggaggggaggacagagagagacagagacagagacagagagacagagagaaaatggatcgtgagaaagaggtgaagttagaaatcagactatggtggccacatagcctatgggccacaacccatagctgcgaacaagcttcagatgcaacagttgtcaaaagtcctaaagccccaacgggaaagcctcaagaagaggagatagcgatgtgtgttggattctggcgatggatagtggccagagacagtttcagtctcactagtacaagaaaggcaaacaaaaccaagaggaattgaagatcttccgttgtgatagacagaagccggggcatttgggtgacgtgtgacctcacgtcactcctgatgaggtacgtgtcccaagagagtcaagatcggccaccacaaactcatcccgggcctctgaggtgacaccctcgctcaataccccttgtaactctctgggaggaagtttacagagaagagatgtagaaagagattttgacacatggaaggccatattttaaatggtaaagagaaaaaaaacacaaccaaaaccatattattttaaaagattttcccctctgaggaattttgaatggagacattgaagccaaacatctatctaaaaatagaacagggttctggaaataacagttgtgtctacagctcccagatcggccctctacagtgagggctgcacacaacagcaagaacttaacggtgacataagggggtggaccaatcaaagctgagacttctgccaagggaatacttagtagccattaaaaattgaagattatggagagcttgtaatggcatgaggaaagaaaacaagacgggggcctcagtggttagagtgctggctcctcttgcaggggagctgggtttgagtcccagcacacacacatggtggctcacaacaatcactaagtacagttccagggaatctgatgtcctgttctggtctttgagggtgccagatcacatgcatggtgcacatacatacatacatacatgcaggcaggcaaagtaaataaataaataaaatataaataaaaataaataaataaacaaacaagacaggtgctagaattggggaggcagagacaggtggatctcagcaagttcaaggccagcctggtttttacattgagttccaagacagccagggctacattgagagatcctgtctcaaaacccaacaaattaaaaaatgaaaagctatggatgttatcaccataacaactgtgtaaaaactgttccatccggaggagtgaaagagaaactccaaatgatggtggccgtctcagtcagtggaactgtgggtgggatttcttcttcttcttcttcttcttcttcttcttcttcttcttcttcttcttcttcttcttcttcttcttcttcttctttttgggggtggggttcgagacagggtttctctgtgtagtcctggctatcctgaactcactttgtagaccaggctggcctcgaactcagaaatctgcctgtctctgcctcccaagtgctgggattaaaggcatgcaccaccaagcccggcacttcttctttttaaataatgttttgtgttctcaatttttttccctgtaaagatcactaattgctctcaggaaaaagcacacacccatctttacctcaaaatcatatgagtccctaagtagatgatcacaaaaatatagtctcatagaatgaaggaagaaagccaaaagggccctgtgtagtcggaggacagctaaggccacacctcctgtggccttgaatgacaagcccaacagcttgaactacactctccctgccttctctctgtgatcacacgtgttggactactggcggctgggcccaggagggaggctgggggactgtgcatgcacctttcaccaattcctgccttgatttccccagggaagagtttcacgctcacaatcaccgtgttcaccaaccctacccaagtggctacctaccaccgagccatcaaggtcactgtggatggaccccgggaaccccgacgtaagtgctactgagccctagtcagggcaaagggtccaggggagaagggcaccgggggctgtacctgtagctctgtgtctccttccaagcactcaaagggtctcagtgctaaacttcagccgtctgggctcagcctcaggctctgaagggtcagcaaggagaccaagatggcccagactctctagggacagcaggaaagaggaagggcaccatggcgggcagcatttgggatgaggcttaggccagtctgctctgcaccccagctgcctctgcagtgatgaaggatgtaagggaacagctaccgagggtgccatgaaaccacatccccttctgaaagccctgcatcttcggagcccaggcacactggctacgggatccctgggcatccctgagaatagggatgcagtgagtgtacactgagcatcacctgcatttggcaattccctgtccctcagagtccgtccctcagtgtctgcagcagagggtggaatttgcacatgtactaaagaagcttttcatgatggctgagtcaaaaggtttccctgttctaggaggtgatggcccagtgtttgtggggaccagtatttgtgggggatatgctcctgcctcaggctgccagggcttgggacaggagggcagggcctgagacctctttctggtacccaggaaactcaaaggagcgtggctcgccaggtccacattagtgagagccattccagccaagagtcaggcttcgcccctcacttagtgctccagcaagtagttctttgaagggggggtggtgggaggcagagatggacaatggacttggggaagtcacgttacctcagggtcaccttctcccatgctctgaactgcaggtcttgggctgatcactttcagcctcatatttcttgtctgaaaaatgggtttgcacaagcaattgcctaggatactgatgcctaggctactgctgtgcacaggcaacagatgcatctgtacatggcaacttacagaggtgactgatgtgcagtcgcctcagccagggcctcagcgaccgaccgtgtatggccaggagacaggcactgagtgccttctctgtgaaggggcctgatctgatctgatcctggcccacagtgggtctgggagttggagggcagcatagagaggttctaagtggccaggcaatgcctgcaggtcccaagaatatcctgtgtacatctgttagccctgtgcttcttgaggcctgtgggtgaggatgtgggtcaacctgctcagggagtcctctgcacaccttgtcttggttccccaacccaccatagctcagctggccctttaaggaataagccagctgggagggagacagaacagaaagagatagatggggtcagaggctgggattgctgtgtggcctaagacacttcttatccctctctgggccttcttactagctcatttttggaacagagcagaagagaagggctattttccatgttactccaggttatcccatccttgggctgtgctaacttctgcctatggcctaactgacccagaaatcaggtctcgagttcctattctctagacccgacctgcttagtattacttggctggactcagtttccctatatacaggtggggacccccacaggcagcggcagcactgagaaacccggtatgcatagcctcatgcagtgtttccatgaactgactctaggagcatcctgcaccttggagaggtagagccactcctaagattgccttagcatctccaggcatcagtgcatctcccagaggtacaagctgagggtgtgggtctgggacttagggggatcataagagtcctgacttatcactatcatacaggaagtgtcacacacacacacacacacacacacacacacacacacacacacggctctcgggtttctgcagtttccccttcctccacttgccaacccctgtgaggtcagagcctctgtgggtggctagggctggtccagagtctgggagtatcagtcctgcatccctgagacccagctgtggcttctgtggccaggtcggtcccctctagtgccctgcagagtgtgcccagtatgcagccgggtggccagctcaggctgaggctgatatagtggcttcctccctgtgtggcctcggtctctgatggatccctttcagttaatggggactggttcaaacgcaggttgctgagctgaatccagctctgggatgggaggtggttcaggagctgggcacagcagcagtggccacagctgggggcagctaactctccaggcacagcaggtgctgctaccaaaagtgtgggacccagcttccatgcccttcgggaggctgaagggatggcctgaagcttctcttcctctaaatgcccacaaagcaatttccacaaatattttcccaggcacgggctgccatacctccagcactacccgccacctgctggtcccactctcctgggtctcacattccacaggagaaaggaggagacaggttttacagtgtccacggccctgccaaatctggtggtggcctcttcctctcttgtaccctcttcctccctccagctgctggcttctgccaggaacattcctgcctcagggcctttgcacagctgccacagcatgccagagttatgcctctgtgctggtctgcatgctccaccacaccagcgttctcttttgcctgtctgctacttgcacctggccccgaggatgcccacaggagcgtttagctgatattccttaagtaggtcaggactgagctgagtaaatcatttgttcgcttcaacaaagctaaaaggaagccatagtaggcaaagggtgggcagggtgggagggcttcctggttgaggttcagtcctgaaagggcggagggggcatagcagtgtgacctctcaggacctggtatgggcagagaaaatggcccagtgctatacctgggccttggagacaagtgaagggcggtgccatcctggcctccaggtgtggggaagctgagaacaggatgct

SEQ ID NO: 1307 - DNA, 1855 bp, Mus musculus
cccgccccgaggcccggggtactaaccccgcgcgggcggccgcgtcgccgccacttgattctctaggatccgggctggggccgcggccgccgagtccgtggggcggccgcgcgcgccggatgcgggactagcgggcgcgcggccgaccgtcggggcgcaccccctcccccggcgccgcccctccccccaccccccacgctggccgggccccgagccgccgccttcccgcctcccgcttcccgcggctgcggccgcccgcgccctgacggccgcggcatgcgtattcccgtagacccgagcaccagccgccgcttcactcccccctccacggccttcccctgcggcggcggcggcggcggcaagatgggcgagaacagcggcgcgctaagcgcgcaggcgaccgcgggccccggcggccgcacccggcccgaagtgcgctcgatggtggacgtgctggccgaccacgcgggagagctcgtgcgcaccgacagccccaacttcctctgctccgtgctgccctcgcactggcgctgcaacaagacgctgccggtcgccttcaaggtggtggccctgggggatgtgccggatggaacggtggtgaccgtgatggccggcaatgatgagaactactccgccgagctgcgcaacgcttccgctgtcatgaagaaccaagtggccaggttcaacgaccttcgattcgtgggccgcagtgggcgagggaagagtttcacgctcacaatcaccgtgttcaccaaccctacccaagtggctacctaccaccgagccatcaaggtcactgtggatggaccccgggaaccccgacggcaccggcagaagatagaagaccagaccaaggccttccccgaccgctttggagacctgcgcatgcgtgtaacaccaagcacacccagcccccgtggctctctcagcaccacgagccacttcagcagccagcccaagaccccaatccaaggcttcttaaacctgaaccccttctccgacccccgccagtttgaccgctccttccctacgctgcagagcctcacagagagccgcttcccggaccccaggatgcactacccgggagccatgtctgccgccttcccctacagcgccacaccatcgggcaccagcctgggcagcctgagcgtggcgggcatgccggccagcagccgcttccaccacacctacctccctccgccctaccccggggccccacagagccagagcgggccctttcaggccaaccccgcgccctaccacctcttttacggcgcctcctccggctcctaccagttctccatggcagccgcgggaggtggtgagcgctcgcccacccgcatgctgacctcctgccccagcggcgcttcggtgtcagcaggcaacctcatgaaccccagcctgggccaggctgatggcgtggaagccgacggcagccacagcaactcgcccacggccctgagcacgccgggccgcatggacgaggccgtgtggcggccctactaagcaccctggagactctcgggccagccgaatccttccctccagcccgagactacaagaagaaacagactttggcctggtcccaggggccagagctggcagtggctcccagagctctgtccagccacaagtttgagcagaggatgtggggacctcccacaggacactgctccaacccaaatcaatgtcctctctagctgtgcatcccaaacccacctcttgtctccagccatgcccaggatcaattctagaatcagaggctacccctgcctgtgtggggagggcctttgctggcaagagaagctcaggctcagagatgtctggactttctctccctccctctctctctctc

SEQ ID NO: 1308 - DNA, 1230 bp, Mus musculus
atgcgtattcccgtagacccgagcaccagccgccgcttcactcccccctccacggccttcccctgcggcggcggcggcggcggcaagatgggcgagaacagcggcgcgctaagcgcgcaggcgaccgcgggccccggcggccgcacccggcccgaagtgcgctcgatggtggacgtgctggccgaccacgcgggagagctcgtgcgcaccgacagccccaacttcctctgctccgtgctgccctcgcactggcgctgcaacaagacgctgccggtcgccttcaaggtggtggccctgggggatgtgccggatggaacggtggtgaccgtgatggccggcaatgatgagaactactccgccgagctgcgcaacgcttccgctgtcatgaagaaccaagtggccaggttcaacgaccttcgattcgtgggccgcagtgggcgagggaagagtttcacgctcacaatcaccgtgttcaccaaccctacccaagtggctacctaccaccgagccatcaaggtcactgtggatggaccccgggaaccccgacggcaccggcagaagatagaagaccagaccaaggccttccccgaccgctttggagacctgcgcatgcgtgtaacaccaagcacacccagcccccgtggctctctcagcaccacgagccacttcagcagccagcccaagaccccaatccaaggcttcttaaacctgaaccccttctccgacccccgccagtttgaccgctccttccctacgctgcagagcctcacagagagccgcttcccggaccccaggatgcactacccgggagccatgtctgccgccttcccctacagcgccacaccatcgggcaccagcctgggcagcctgagcgtggcgggcatgccggccagcagccgcttccaccacacctacctccctccgccctaccccggggccccacagagccagagcgggccctttcaggccaaccccgcgccctaccacctcttttacggcgcctcctccggctcctaccagttctccatggcagccgcgggaggtggtgagcgctcgcccacccgcatgctgacctcctgccccagcggcgcttcggtgtcagcaggcaacctcatgaaccccagcctgggccaggctgatggcgtggaagccgacggcagccacagcaactcgcccacggccctgagcacgccgggccgcatggacgaggccgtgtggcggccctactaa

SEQ ID NO: 1309 - DNA, 23107 bp, Homo sapiens
caaggggatgctgccaggcgaaacaagatggtgcttgtcagctgcttagacgctgccgtggaggaagcacccagcaagcatctgctgccgttttgatgatttccactcctgctggcgactgctttaaaggacagccctagcctgcagaggtgtgatggggatctactgtgggagaaggggggcttcctggaggaggggctcctggactgggcttcacaggacagaaagcattgctggcagaggctgtcctgagctgaggctctgaagagtggggggcagagaatattcaagaaatactgggaacagcagcagcaggaagaagtggtagtgggtgggccctggggccagcagccctgccttcttttctttctggggcccctctgaccagcggctgatctttgctaccttaaatcagggactttcaaaaggaaggggcctcagtgagcagactgtgcagaggggaaactgaggcgtagcaggactgggcccaaggtgacggagtgggttagagccagagctccccacgcagctcttgctctgggtaaccgaatgaaagaggctttttctgaagaccatcttctttcctcaggcactggaacttctgtcctattcccagtgtgagagccctggccctgtggctctgagactctctggcgccctggccacgtggggccgccttggctcccctctcccctccctggcagtggctccagcgttccacagtaacaaggaagctatttccgaagtgctgttggactcccctcctccgggaagtctgccctacggagggcaagggagcatgtggtgggagcgtgggttccggggtcagattacctgacccacagcctgggtcccggaacaggcgctcagcgtcggtctcatggtgaagcctcggtggccccgtctaaacaatgggaacaaaagggaaagtgtcaggaaaagagccctgggcttggagtcgggggatccgggtgtgaatcctgccttgctgctcaggctctgtgttcctcacacgacttcagcatcctggcctccacaccccggtctccagcatggggatgatagttctgcttcctttgggcatgagcagagataaaagcgatggtcatgatggtggtgacccacgtgactggaaagtgtccacaccttaggccagcacctcaacccacaaagacagtgtgatggggacaccgcagctcggggtgggggaaaggagtgtgacttgagtgaggccaccagactgcaagtgacaggacccgtcctcgaacccaggctggctgtcaaccccgccctcttccgccaggccgcaggagtaactgtaaacactctttgtacatggtgtgactcagaaacaggggactttattctcctgtgacgaaagtaacaaggcctgaggttttgcaccagccctattggctcccttcaagcttgtggctgactaaaacacccagatcctttgcactcaggctgttgtcggatcagtctgtggtccccacgtccacccggcaggcttcatgcctgttaagattcttctgctcacttgtcccccagctcatccacatctccctgccatttccagtggcctcaggagcaaggacaacatttcctccaaggcctgttagggctgaggactcggtctggaattggaagctctggccgtactgggcctgccctcctcagggtagcagtcaggtgctttccacaaggcatctcctccccatccgctccaggccccacccatcccacttgcctcgttcacgtgacttgccccatccccatgggcatctgagtttgcagccccagctccagctaaactcgcccccagcccatgttttcccctttgttgccaagggccctgggaggcagcagtgggggcctggccagagaccaaatggtcttattcctgccaccaagtgtcccatggattcctggtctggggcctcattggaggagaaggtggggctccctggttcttggtgactggctgagcccctgtggctcccaggccccctgctttctttctgaggctcccagatacctgtttgagcttccaacagggatgcgtagggagcttgggggcctacaagtaccagaatccattgcgttcccattctgaaaatcagaaatcaggcccatgcgaggcctcgggctctgtcccctcatgccctacagtggtcgacaggcttttcccacttttcgagtccccagcaatcacttgttcaggccccaaaaagcgcagtgagttctgttttacctcccacctacatcttgcctcttctccctctgccaaactagaaaacgcacatgtcattctagacccaaggccttaggcaaaccttctcctcccccttaccccctcccacatttttttttttttttttttttgagatggaatcttgctctgtcacctaggctggagtgcagtggtgtgatcttggctcactgcaacctccgcctcccgggttcaagcgattctcctgcctcagcctcccaagtagttgggatcataggcgcccgccaccacgcccggctaatttttgtacttttagtagagacggggtttcaccatattggtcaggctggtttcaaactcctgacctcactcaggtgatccgcccgcctcggcttcccaaagcgctgggattacaggcgtagccaccatgcctagcctccatcttttctaaagggtcccaggtccaggaaatcccaccccttgttcggcgtgtggcctccaacaagcttcctcgcctctccgcagttgcagttctcttacttgtaaaagagggcctggccaccctgcctgactggcagcctcccaccaagtcacgtgaggtagaatggccgtgaccgtgttagggttgatcagccgaaccctggagtgcacagtcctccaagggagccgtcctttcctcgggtcagccctggagaagctgcagccactagggggtgcgaacagggacgttcccgggagtgttgcatgtaagggaactaaaggggaagcttgagaaggactgaaatgtgggtggagaggactgcggagtgaactgtgcctccagtggccagcaggaaagagggagagcagcgtcattctcgccatgcttgttgaatcccttccgtagcagggaggatccccagggttttatgggaactccgtcatttctgtggggctggattactgtccccattttgcagatagggaaactgagtttgagctccaaggtgtgctactaagaaagcaagttacagaatgacacacccggactgaggctgttcaagagagttccatgagaagcctactttgcgttttccattcatggaagatgaaaaatgtctggaaagaaactggtcacggtggggactctggagaggagcttagagcggtggacagagccttatctgtaatgcttttatttttgtaaatattcacgtgttgcttgtgaaatgtaaaattagtaattaaaaaagtgtgtgtggcgggggaggtccctgcaagcttgatatcactccagaagtgtccctcggcctcagcaggccgcaggagggtgggagcctggccaccttgaccctcccagcacctctgagtcctcggatgtgaggctgggattcttcctgtgtgggctctggcagatagggagtggaaaatgctggcagttttctccaggtgtgacatctcgtcccctgaccccagcttccaggcagagatggctgtctagtccctcatgcaagccccctacacctctgcccagcatcctggtggagttatttttctgcctgaggcccagagagaagaaggcatgttctggggatcccagagtgacttagggctggaaaagcctgcagtcccctcctggggccacctcccattgttcttgtagacatgggagacagtgtgcaaggcaggctgggatgctgggaggcagagggtggcagtgctcctgggttatctccctgcctcccttgggggcatgagccactttctcatgtctgttgcctcagtttcctttttttagatctagggtccttgttccgttgcccagactgggatgcagtggtacaatcagctcactgcagcctccacctcctgggctcaagtgatcctcctgcctcagtcatcccagtagctgggactacaggcttgtgccaccccacctggctaagtttttcttttttcttttttttttttaatttttgtacagacaggggtctcgatagttgcccaggctgatctcaaactcctgggttcaactgatcctcccatctcagtctcccaaagtgctgagattataggcgtaagccactgcacctggccctcagtttcctcttctgccaaacagtgtgttgtagaggtttggatcaccgtgtgtcgtagaggtttggatcaccacatgtcgtagaggtttggatcaccgcgtgtcgtagaggttcagatcaccgcgtgtcatagaggttcagatcaccgcgtgtcgtagaggttcggatcaccgcgtgtcgtagagcttcggatcaccgcgtgtcgtagaggttcggatcaccgcgtgtcatagaggtttggatcaccgcgtgtcgtagaggttcggatcaccgcgtgtcgtagaggttcggatcaccgtgtgtcgtagaggttcggatcaccgcgtgtggttgaggttcggatcaccgcgtgttgtagaggtttagatcaccgcgtgttgtagaggtttagatcaccgcgtgtggttgaggtttagatcaccgcgtgttgtagaggtttacatcacagtgtgttgtagaggtttagatcaccgcgtgttgtagaggtttacatcacagtgtgttgtagaggtttagatcaccgtgtgttgtagaggtttagatcaccgtgtgttgtagaggtttggatcaccgtgtgttgtagaggtttagatcaccgcgtgttgtagaggtttacatcacagtgtgttgtagaggtttagatcaccgcgtgttgtagaggtttagatcaccgcgtgttgtagaggtttagatcaccgcgtgttgtagaggtttggatcaccgtgtgttgtagaggtttagatatgtggggtggcacataacgaccattctctgttcagaaagtcttttgacaacctctgtgaagaggctggcggtgacctcagggttctcccagcagaggcctaaggtcagacctcaggaagaacttcccagcagagtgaggcatttctgtctccactgagactctggggaagcaacggctgatgggcttcctgtgctctgcagggcaccggcagaagctggaggaccagaccaagccgttccctgaccgctttggggacctggaacggctgcgcatgcgggtgacaccgagcacacccagcccccgaggctcactcagcaccacaagccacttcagcagccagccccagaccccaatccaaggtacggcacggagggaggggctgcagcggggtgaggtgggggtggagggcctcgatgtggtccaatctgccccagaccaaaagcctgtccgaagatcagtcactgcacccccttgttttgtagaggagctgctggtgctcattggcacctgcagacggttcctgtgggctttctgtgtgctagccatcattcgttcactcagcaaacactgacattactgacacatgcctggtgcctggccccagggatctgcataccaggagttcactgtgcctggggaaatggggttaaccccatagtgcccctattaaaattggggcatgacttgtccaaggagccgtgacagactcgcccctgccatgtacagtttccccacccctgccccacagcctgcgatttttcatctgaaagtggattggggcggatgcctccacccagggctgggatgacattcaaatgacattactgtactcacacaaactttgcacactgttaagtgacattccaaccctagagaggcacatagcattcctgggaaaggtctcccaccctgcccagagcatcctcccaaacaggaggagctgaggtggaagggaagaccgagctggggtctccatctccactgcctagacggatacagcaagcacagttgcagccaggcctcaggcaggtcttctggagtatcgaggtgcctggcgcatagtagccgctcactaaacggctgccggctgcatctctcctctgttctctcagtcagtgagctggggacatgggaggctgtgtgcacagccggcccttgggctaagtggggtgccaagggtgcttggtggccgggtggacagaggcaggcagctggctgccgtcacggactgtgcccattctttctcaattccccagagcctggttagaaccccttggcagatgaatgaattgagaggcctaagaggttcagagccaccctcgggtcacacagcccatctgtgaccaggtccacagtctccacagtacctgctcccaagaactttctgtacttctgaggggacagataaaggggcctggaacagggctgccaaccggtctgcctgccccacccccttttccggtgccacgctgaggtgggggccgactgggtctctctactgacattgttccaggcatagtgctgcagccaggggctggatgcaggccttcagtgtgaagagaggacccctccccttctggcctgggctcaggacttttggccttggtcctgctgagacgccaaggttgggagaagccccaggcccagcctctctgagcccaggagctagtgcatttgagactctcagctctcgagcccaggagttggaggtctgctctcaagaggtagcggaaggagccctgcacgctgtgctcacgcccacccctgccgcgtagctgcctctgcttctgctacccatgggccagcatctgtcgaggtgcagtagcctgagagccagcctttctctgccatggacagagccaggccaggggatcggggctcagcgggggagccagaatccaggaggtggggtgaacagtggcttcctgtccaccagcccccatggaaggagagcccacatctgcccatccactgctgggtgggcacagcttgggaatcaatgcctggccccacggcaggcacagctgctgcttccatcctgggctgggaggaaaggagcccagcctgtgtggggcagtggctgacttctgcttctctgcctgctccctcctgaggcctggcccagtccctcgctagccccccacagcactgggccacaggcagccaggcatctccatcctcaggcccatcccctttgggtgagagaaagggcctcggatgaccaggacagggcgagcatgaactctgcagtcagctggaccaggctaggaattcaggctctgccaggcattggctgtatgatcttagacaagtcacttaaactcagcctcagttttctcatctgtgaagtggggagaaggaggtccctgacaaagaggggttgctggcagacctaggcttgggaagtcactctcacaggccctcctccctctgccctcggactccctcctggggatcccccttgggacaccccaccaccacttccctcggtgcctgttaagtgctttgaccctccaatattggtcactggcaagcagtgcagagaccccagcacctcccataccccagccccagcccccagccgcagccgcccacaatgggggcttctcacagctgaaagggctcattcagccaccatgcagcagcccggacaatctggagaagaaaataaacatttctttccactgttgggattggccactcgacagtgccccgggcagctcgggtttcctggggctgcgaggccgcagggtgggggtacaggagctccaaggaagctgctggggggtctgagggagtgctgagggcaggtacttcccccaccaccccggaggaggggtggtggccctgaggaaagaggctggaggggatggtggcaggtccagggaggcccagcccagcgccctgcagcccgcgtgagctctgaggggcacagtcctgccgttgtatcctgcggtccccatttgtttccttcgtcttgagaatggggttcccatcaggcggccagcacccacttccaccccacccatctcagctgtgctgacgtgcccagcacctgcaacaggacctctccccccgaggggctccccagatgaaaactggcagccaggtgcctcggaggctctcggcctcaaggggccgggacagccaagtgacctactagggaacatcccagatgtcccagaaggcccccgccacccagactgctgtccccacatcttcttaccttaagccaggagcatcactccgttcggatccacgcccagggccagagtacgctgctgagggaaacataccccagctgacttgggaagaccccaaagccccgagaagttccaagtcccagccgaagtcacacacacctcaggctcatagctctccgtcctcagccaagcctcggcgtggcaggcagagcccactccggctagcaccggcccttatcctttggtgggtgacacagaggggttgctgggctggacagactgcacctctggaccactgctgggggctcatccacctcccccggctgccagagtagaagggaggccctgcaccagggcctcaacttggcagggccctgaatgagccagttctcctgggtacccagagtaagagacaccacagccacagtggccttgcaaagcctcatggacccctgctctgtgcccagtgccattctaagtactcgatgtgaattaactgaatcctgatgaactgttatcgtctcatgttttatatggggaaactgatgcgcagagaggttaagtgacttgcccaaggacacaaagctagtaagtgtccaaaccaggataactgtccggctccagaagccacacagtaagccttgatcctgtgctgcctcaaagacgggacagctccctctcaagtacgtgttggggctcaggaccagaggccctaggattgtgtgccaggtccaatgtgctgtgtgaccctgagggaagtgcctcaccctgtctgggcctcagtttccccatcaagggtgttagactcaatccctgagcccctttgaatgctgaggttttgggggtctgtgatgacaaaagttggggacagaggatggaacacccttgccttggagcccattgagaagccacattcctgggggagcaggggcagagtctgggctggacactgtgaccaggttggggtctgggtccccaagtttgtctgactgctgtctcactttgctgccaaggcaggttagggtggcatccagtcactgtgtggccacgagtcggctccagagacacaggcccagggtgaggtggaggccagagctcctgtgaactcagtgcccacaacccaggtgtgagcgcacagaacctccgcgtgctgcacctgggcaggagaggcacgtgtgtccccagcagaggccttgtgatgagaaccagtcctttctctgccacagagactcagtcttgctctctctctgcctccattttcttgtcttcaaaagcgggttccaactcccagtctcacacggtcattggagccctttacacatccacggccttcccagctgttaacatgggccggtggggagaggaacctgcctgggcagggctgctgggaggcctgagctgactctgccctcagccccaccaccgcatcctaggcctctcctctgcgaggctgggaaggaggatttaaaaagaagaatagaccccctcctctgttctgttgctgctgtgggggggctcccatggcccctcttggcccggggcacgctccaaccagcttcccggcaggtctgtgttcggagtcctggcgggggaggccccgggcagcctagggcaggaagaggagagccaggtctagaactaggggtcccccagatgggccttgggaaccagagcccaaggtcattcttcaggaagccctcctggggttgtctcgagctggaactgacctcttccctgctgtcctccaggcacctcggaactgaacccattctccgacccccgccagtttgaccgctccttccccacgctgccaaccctcacggagagccgcttcccagaccccaggatgcattatcccggggccatgtcagctgccttcccctacagcgccacgccctcgggcacgagcatcagcagcctcagcgtggcgggcatgccggccaccagccgcttccaccatacctacctcccgccaccctacccgggggccccgcagaaccagagcgggcccttccaggccaacccgtccccctaccacctctactacgggacatcctctggctcctaccagttctccatggtggccggcagcagcagtgggggcgaccgctcacctacccgcatgctggcctcttgcaccagcagcgctgcctctgtcgccgccggcaacctcatgaaccccagcctgggcggccagagtgatggcgtggaggccgacggcagccacagcaactcacccacggccctgagcacgccaggccgcatggatgaggccgtgtggcggccctactgaccgccctggtggactcctcccgctggaggcggggaccctaacaaccttcaagaccagtgatgggccggctccgaggctccgggcgggaatgggacctgcgctccagggtggtctcggtcccagggtggtcccagctggtgggagcctctggctgcatctgtgcagccacatccttgtacagaggcataggttaccacccccaccccggcccgggatactgcccccggcccagatcctggccgtctcatcccatacttctgtggggaatcagcctcctgccacccccccggaaggacctcactgtctccagctatgcccagtgctgcatgggacccatgtctcctgggacagaggccatctctcttccagagagaggcagcattggcccacaggataagcctcaggccctgggaaacctcccgacccctgcaccttcgttggagcccctgcatcccctgggtccagccccctctgcatttacacagatttgagtcagaactggaaagtgtcccccacccccaccaccctcgagcggggttcccctcattgtacagatggggcaggacccagcacgctgctggcagagatggtttgagaacacatccaagccagtccccccagcccagcttcccctccgttcctaactgttggctttcccccagccgcacgggtcccaggccccagagaagatgagtctatggcatcaggttcttaaacccaggaaagcacctacagaccggctcctccatgcactttaccagctcaacgcatccactctctgttctcttggcagggcgggggaggggggataggaggtcccctttcccctaggtggtctcataattccatttgtggagagaacaggagggccagatagataggtcctagcagaaggcattgaggtgagggatcattttgggtcagacatcaatgtccctgtcccccctgggtccagccaagctgtgccccatcccccaagcctcctgggaggatccagccaaatcttgcgactcctggcacacacctgtctgtaacctgttttgtgctctgaaagcaaatagtcctgagcaaaaaaaaaaaaaaaacaaaaaaacaaaaaaaaaacaaaacagtttttaaaactgattttagaaaaagaagcttaatctaacgttttcaaacacaaggtctcttacaggtatagttccgtgattatgatagctctgtgattataagcaacatccccgccccctctcccccccgcggacccccagctgcctcctgagggtgtggggttattagggtctcaatactttctcaaggggctacactccccatcaggcagcatcccaccagcctgcaccacaggctcccctgggaggacgagggaaacgctgatgagacgctgggcatctctcctctgtggctctaggacatctgtccaggaggctgggcggaggtgggcaggatgtgagaggtggggagtactggctgtgcgtggcaggacagaagcactgtaaagggctctccagccgcagctcagctgcactgcgttccgaggtgaagtcttgcccctgaattttgcaaaatgggaaagtgggcgcttgcccaagggccaggctgcatggattctcacatcagagttctctggccctagaaaggcttagaaaaggcgtaagggaactcataaaggctagcagcatgcggtattttaactttctgcctcggcctctgtggatgcagaaatctgccctacaaaatgctcttcattggttgtctctgtgagagcactgtccccacccaacctgtcacaacggccagaaccatacaccagagacacactggcaggttaggcagtccttctggtgatcctattccattccctcctgctgcggtttctcttggcctgtcctcactggaaaaacagtctccatctcctcaaaatagttgctgactccctgcacccaaggggcctctccatgccttcttaggaagcagctatgaatccattgtccttgtagtttcttccctcctgttctctggttatagctggtcccaggtcagcgtgggaggcacctttgggttcccagtgcccagcactttgtagtctcatcccagattactaacccttcctgatcctggagaggcagggatagtaaataaattgctcttcctaccccatcccccatcccctgacaaaaagtgacggcagccgtactgagtctgtaaggcccaaagtgggtacagacagcctgggctggtaaaagtaggtccttatttacaaggctgcgttaaagttgtactaggcaaacacactgatgtaggaagcacgaggaaaggaagacgttttgatatagtgttactgtgagcctgtcagtagtgggtaccaatcttttgtgacatattgtcatgctgaggtgtgacacctgctgcactcatctgatgtaaaaccatcccagagctggcgagaggatggagctgggtggaaactgctttgcactatcgtttgcttggtgtttgtttttaacgcacaacttgcttgtacagtaaactgtcttctgtactatttaactgtaaaatggaattttgactgatttgttacaataatataactctgagatgtgtggaaggagtccagtgcccggtttctagggctatgcatggaggtggggtggggtgggggagaggatggagacctcctgctgttgcccaggaggaacaggaacagagacacccagcaccttcatctccttgcttccaacttcttcaggaatggccgcagagaccaccctggccacaggacagccggtgaggcctgctcctgtatggctgggaccccaggagagcatcaaataggtcttcaaagtgccacaacccttccaccaatcatgagcgggctgtgagtcttcccagccgtgttgggaggaattcctatgcctgttcctcagattcacatttcgggagggggcagaggcagagggagagtccaagtgccttggtgagaacccccctctgaggctcgtgtttcaagatctgtggcaagctagcagcagtggggattgggagtaagcggcaacttcagtgcccccattttgcagatgagacaactgcggtgcaaagaaggagtgtcatcaaggtccatgtctccctggggttgtccatggctgaactgggaccacagcccaacaatggtagcatgggtgtgatggtgtggggacctggcttgacagcccccctcccaccttgccagcaaggaggcctggtccacttgggatttgtaccaacacacagcccagagcctggccagttgggatttgtgaagggaaatttttacaaaacagaccttatttttgagtgatgcccaccgacttcaaaaaccactcccaaagctttgccctgctcagtttggttggtctgcctgaaactcagctcccaacaagaagcttccatttccctagcccggcatccccttttacccaaaagacagcaggtccatctctggacaggacctcagccgtggctacagaacttctctgttggtctgctctgggcagcctctgccagggttggtcctgaaacggcatctacatggccaaaactgtttctatttatttggggtcactttgtaggggatggtagcactcctcaccaggcacactttggtgccacagcagatcggagaggagctgtgccctccagagttcctgactcaaatctccatcacctgcaccctagcaggcacgaaccagcacacccagcttgccaaggggaaactcaaggtcccgagaagtctcagcttgcctgaggtcccagggctgcgggaggaagtgctgcagtagccacagcagcctgcaggtggcaatagggggcggcatccctgggcagcaggtggagagagtggacatcatcccctttggacaagggtgaggagaggctgccttggttacagcaagaattcaggtaaggtattaagaagaacttcccaacctcaggtgactcattcccgaaagggccagctaaaggtcttgatgtggggaaggttttcccttcccgagccgtgtggcagtgggaggtccctgtccctctctgagtctccctttttggtcatacgctgaatgagcaccggccgtgtgccaggtgtggagtaggaccccacaccccataatcgtctgctttgggacagggtgtacctggcttgaaggcagggttgactttcatagttttacaaccctggcctcctggaccctgggcccagccccacccatgtcccctgagccaccagcaagagcttaggtcatgtagaagccagttcagattgaggaagccatttagttccacagcctgggagcccctggactccagaattccgctttggaggctctaggagtcctgttgatctgggctggactttgagtccctccagtttcttcagcccccacagcttgaggttggcccagatgggcccaatgatggacccagagagccggctgtggcctgggggctcccagaagtggcctcctgtggggtgaagtggcccagatggacccgccttgccggcccctaggagcagccctgccactgttgggctgtggccatggggatggctttggcttttacactgagcaatggatgtcctggcagtgaggctacaggccagagatgacacattcccacgttagggcctggtgagggcttgaggagatggcgcggggtggggccagtgccgtgtgtaggggagggcagggctggatgcagacccagccctgcctccctcctcagccccggcctctcctctgctccagactgcacccccgcataaatgcagccccccagcatggcccagagggcagctctcagctgcaccaaacaacccagcctggccacgtgagtagagaatacacctcagtgggtcggttcattttggggtcgtaaatgaaatgagctgtcaaatgggacgggggcaggagggaggccagagtgaaagaatgaactgttcctggcagaaatccaaaatgcccctcattcctccccatgagggctccagagctgggaggggtgaggggccacatcgccccgacatccgcagccacacctgtgtggtccagtggctggggaagcctggggagccggatcccgcgcttcctatttttagttttgcagctaagagtgcgctgtgtgttttatatatttatattcacccacagaaagggcctgccctgggcctggcccaggggacctatcatgggaaggggagtgcggcagccctggagccggcctggactaccctcctttgtgcccaccctgacggctggcagcaatgtgggctctctggtgtccaaacacaccatttgggccacaccaccccactcagctcattgggctgggtgtctttgaggccttggccagaattcattcactcattcaccagacacagagccccaccccaccctcaggtgccagacaccaagaacaaggtgaacaagtcacagccatggcctcagggatctcacagggcagacagacaggaaagcaggttgtgccagcccagtgtggatcagggcaaacaagccaagctcctcagagaaaatgtctctcccccgagatcagatggaaagatgagtaggaatggatcaagcagagatgtggcaggagggaatcccatgtgcaaaggcctggagaaccaggtgtcgctgagctgggaggatggtggggcaagtggcgcaatggtgatgggaggtgggagaggatccatgtcaggggtcagtggcacgggggagccaagcggagatgtatgtgttggatgggagcaccatcatggtgcggactggggatgagggtccagagacctgttcacaggctactaaaatagtccaggcaaaggagaagcctgtgcagaatgacagagggaggagctaagaggtatcttagacatcattagcaccaaagtcacaggaagggcaccatgccccaaacctcaggtttgaatgtctctcaatctctcagggttagtggcatttcatgtgccactgggggcaaggtcttaacaatagtctttattatcacccagttggcaattgccccctccctctccaccacttcacaagtgaagccttatgtcctgcctcagtttccttatagaaccatgtgaccataccagaggccacatgcagcctctcctctcagacttgtgggtccaggacgctcagagtccggccaagctaccccactctccttcatggtctgaaaatataaagattatgagactctccatctgcggttcctgagttctatatattacattttaagtaatatttttagtttttatttttagacagggtctcactctgtcacccagactggagtgcattgcagcctccaactcctgggctcaagtgatcctccctcctgccttggcctctcaaggagctagaactacaggtgtgcaccaccacacctggctaattttttttttagaggcagggcctcgttacgtttcccaggctggcctcaaactcttggcctcaagcaaaccttccaccttggcctcccaaagtgtcgggattacaggatgagccaccatgcccagactaaatgacatttttaaatgacacaaactaatatataatcatgagagggaaagtagacagtccggattaccaacaaacacacgagaaaaatgagccataatccccccctccaaagataaccactgttaatatttttaggcttttctcccccattcagatctttatttcctataaatatataaatactttttagaaataaacatttttctagccagacacacactgcgtatacaggttatcaattaatatagttaaaaatagagataaaattaatccagaatgaaatcaatgcaaagatgggattatggctgttttctgttttcttctttacagttttctaaaattagcacacttgttcagggtatagcatatcaaattctagacataaatgtccaagcagaggagttcaaaatcatgcaaggactacctcatctgtcattagctgaaacaccacctcttccaggtagccttccctgataccctcatactaggtttgatgccttctctttatctctggaataataaaaataataataataatagttaatacttactctgtgccaggcactattctaaatatttcaccattttttaacccagcccattgaggtatgtattatcattctccccatcttacagatgaaaaaaaactgagaaacaggttgggtgcggtagctcctgcctgtaatcccagcactttgggaggctgaggcaggaggatcacctgaggtcaggagttcgagaccagcctggccaacatagtgaaaccccatctctactaaaaatacaaaaattagccaggcatggtggcacatgcctgtaatcccagctactcaagaggctgaggcaggagaatcacttgaatccaggaggcagaggttgcagtgagctgagtttgtgccactgcactccagcctggacaacagagtgagattccatctgaaaacaaaacaaaacaaaactgagaaacaaggacagaattccacctgatcctgacgaaggcagagcagtcgctgaaaatattaagtttcctaccaactaaaagtattggaggctcaaagtaagaatcaagttgactttaagaaaaaaaaaatatgacatttctacacatacttgcttataaagattgatcaagggggaggaaaaaaagaaaaagaaatgagaaaatgtctttttaaaaaaacagaggccctttctctgcgtctgagagggatgcctctacctttctgagttgtgattctaagatttcacaaagcatgaaatcaaaaaacagaagtcactgtgactgtctctgaatctgtctggaaacccccagcccattcttccccgcccaaggcggggaacttcatgaacgaggcctccccggagctaggtccgagcctcttcatggcaggctcacccccctacccaaatatgcccacagtgggaatatctgcccaggcatcagtcttgccccgccacaaacaggttctatttctttttccatgaaaacaactccgtcctaaatcactgacgcctgaaattaggaaaatacaaggcctatattataataaaactattttaacacagtggggccccttcggtggtgggagcggtggccaaagactctgcagccccttccatttgtagcccctggaaatgctcagagggatgagaaatttggttttcattagcggcgaatgtgaggagctctgtcgctctgaatggacctttgattctggctggtggtggactctttccagggcctggtgagttttgttttgttttgttttgttttcatataaaatgggctaggcccttccagcttatatctccctgtactacatgagaattgggcaacgccccactctcttgacttctaaagtcaacagctggggccggcaggagaggcacccaggaccattcgcctttattgactctgaggttttattaaaaatgttatgtttccttgaggcctgtgccagacccaacaagcagactggccagtgagcagctggcagaggccagggggtttgcactgcctggaagacaacccaccttgacctgccttctcccactccagtgacccccagaaatggcctctgccttggaatctccacagaaaaccctatttcttcccctctactttgagcaaaagaacattggcctgctcttttattcattcaacacacattggttaggcatctactacagtggcgggtgcttgggatgcagctgcaaacaagtcacacaatgtccttattcccctggagcctacaccctaattggggagaaaggccataaacgaataaatagatcacatggctacagacagtaatcagtacacaaaaaaataaaacaggagaatatgatggaggaagactgggagttggaaggcatcattagataagatggtcagggaaggtctctcagaggagctgactgtggactacataaacatagccaggcatagtccagtttcacccactgtaccagttgtggcatcttgactacagcagatcaacactgtctctggaatttggtatgcagctaccaatttggtaaatcctttcttcctgatatccaacagcagagaggcactagagcagtttacatggcagggacagcagagcaccttcatggtccagcctcaggactccctcactccatcctccatcatggtatcatttaattgactctctgttccacatggctggggaggcctcacagtcatggcagaagacaaaggaagagcaaaggtgactgttgctatgttttaccaaagagactggtggcattttgaacttgagagagatgatttagggcatctggtgggagaaatttctaggcagcaaagtgttcaagaggtgacttgggtactgttaaaagcattcagttttattcattcacaaagatatggtttggagttggaacttatgtttaatggggaagcagagcataaaagtttggaaaagttgcagcctgatgatgcaatagataagaaaaatccatattctgaggagaaattcaagcctgctgcagaaatttgcataagtaatgaggagccaaatgttaatcgccaagacaatggggaaaatgtctccagggcataacagagactttgtggcagcccctcccatcacaggcccagaggcttagaaggacaaaatggcttcatgggctggggtccagagccccactgctctgtgcagcctagggacttggtgccctgcatcccagttgctctagtcatatctaaaaggggccaaggtacagctcaggctgtggcttcagaggtggaagccccaagccttggcagcttccatgtggtattgtgcctgtgggtgcacagaagtcaagaattgaggtttgggaacctctgcttagatttcagaggatgtaactggatgtctaggcagaagtttgctgcaggggtgaggccctcatggagaacctctgctagggcagtgcagaaaagaaatgtggggttgaagcccccacatagagtccccactggggtgctgcctagtggagctgtgagaaagggccatcatcctccagacctcagaatggtagacccaccaacaggttgcactgtgcatctggaaaagccatagatactcaacgccagcctgtgaaattagccaggagggaggctctaccccatgaagccacaggggcagagctgcccaagaccatgggaacccacctcttgcatcagtgtgacctggatgtgagacatggagtcaaaggagatcattttggaactttaatatttgactgccccactggattttggacttgcatggggcctgtagtccctttgttttggccaatttctcccatttggaacagctgtatttacccaatccctgtacccccattttatccaggaagtaactaacttgcttttgattttacaggtgcataggcagaagggatttaccttgtttcagatgagactttggactgtgaacttttgagttcatgctgaaatgagttaagactttgagggactgttggaatggcatgattgattttgaaatgtgatgacataagatttgggaggggctagggagggaatgatatgttttggctgtatcctcacccaaatctcatcttgaattgtagctcccataattcccatacgttgtgggagggacccagtgggagctaattgaatcatggaggtggtttccctcatactgttcttgtgatattgaataaatctcacgagattttataaggagtttcccctttaacttagctctcatcctctcttgcctgccaccatgtaagacattccttgctcttctaccatgattgtgaggcctcccctgccatgggaactgtgagtcaattaaacctctttcctttataaattacccagtctcgagtatgcctttattagcagcgtgagaatagactaatacacccaaggaatctcttaggtcaggtttccctagaagcagatcaagaggtggggatttttgtggggaggactttcaggggaagtggaaagagggaagcaggacacagcagagaaagaaagttaatctatgacatccctgggctggaggccagcctcattctggtctcatgagggcctttggagcattaattacagcactgacttgtcccctccagatagcagactttttgtgtcctcaggtaagtcagttggcaagacttgccacacccccaaaggagcataacctccatggtgagatgtctactgtttggcagagagcaattctccagagaagggggcagatgtgagcagtttgcagccaatgctcacacaatgttaacatgacggacctgggtggtagcgtggggtgtcaagatgatcaaggacactgcagtggatgctgtgggtgagcctctcaacagacccccttcactggacagttgctcccatgctcctgctgctctaaacctaaggaggaaaaatggcaagaacccaagatgctttaataaaatatatggctgggcacagtggcttacgcttgtaatcccagcactttgggaggctgaggtgggtggatcacctgaggtgaggcgttcgaggccagcctggtcaacatggtgaaaccctgtctctactaaaaatacaaaaattagccatgcatggtggcgggcacctgtcatcccagctacttgggaggctgaggcaggagaatggtttgaacccaggagttggaggtttcagtgagccaagatcgtgccactgcactccagcctgggtgacagagtgagactccatctcaaaacaaaacaaaacaaaaatgtatgcacaccagagagtggaagataaagcctctgaaaattcagggtcccccgtattgatgaagatcttaaggaacctgtgatctgaggcatgccaagccatcccctctcagaaaaaaagacaagttgctgcatttgcacctctaccatacagtaggatgaaaaagcacccccccaccccaccacgaagatatgtccatgtcctaatttccagaacctatggggatattaccttatttggaaaacggatctttgcagatgtaattcagttaaggatctcaagatggggaggtaatcttggatgatgcaggcaggtcctaaatgtaatggcaaatgtccttataagagacatacagaacagaggcacatagggaagaggaggaggccatgtgaccacagatgcagattggagtgatgcagccacaagccaaggaatgtctggagccaagagaagcaggaagaggcaatacacgggcctcgtgtattgcccgtgtcagccctgccaacatcttggtttcagacttctgatctccccagctgcgagaaactgtccttctgttgttttatgcccaccttctttgttctccttgaatttcaaagcagcatataccacacttgggaatgctactctgacctatttattaggcaattcagaaagctttcagttctgagacaaagcaaaagagaacgctgcataggtccaagctgcagtgtgagctgc

SEQ ID NO: 1310 - DNA, 3809 bp, Homo sapiens
gccgctgttatgcgtattcccgtagacccaagcaccagccgccgcttcacacctccctccccggccttcccctgcggcggcggcggcggcaagatgggcgagaacagcggcgcgctgagcgcgcaggcggccgtggggcccggagggcgcgcccggcccgaggtgcgctcgatggtggacgtgctggcggaccacgcaggcgagctcgtgcgcaccgacagccccaacttcctctgctccgtgctgccctcgcactggcgctgcaacaagacgctgcccgtcgccttcaaggtggtggcattgggggacgtgccggatggtacggtggtgactgtgatggcaggcaatgacgagaactactccgctgagctgcgcaatgcctcggccgtcatgaagaaccaggtggccaggttcaacgaccttcgcttcgtgggccgcagtgggcgagggaagagtttcaccctgaccatcactgtgttcaccaaccccacccaagtggcgacctaccaccgagccatcaaggtgaccgtggacggaccccgggagcccagacggcaccggcagaagctggaggaccagaccaagccgttccctgaccgctttggggacctggaacggctgcgcatgcgggtgacaccgagcacacccagcccccgaggctcactcagcaccacaagccacttcagcagccagccccagaccccaatccaaggcacctcggaactgaacccattctccgacccccgccagtttgaccgctccttccccacgctgccaaccctcacggagagccgcttcccagaccccaggatgcattatcccggggccatgtcagctgccttcccctacagcgccacgccctcgggcacgagcatcagcagcctcagcgtggcgggcatgccggccaccagccgcttccaccatacctacctcccgccaccctacccgggggccccgcagaaccagagcgggcccttccaggccaacccgtccccctaccacctctactacgggacatcctctggctcctaccagttctccatggtggccggcagcagcagtgggggcgaccgctcacctacccgcatgctggcctcttgcaccagcagcgctgcctctgtcgccgccggcaacctcatgaaccccagcctgggcggccagagtgatggcgtggaggccgacggcagccacagcaactcacccacggccctgagcacgccaggccgcatggatgaggccgtgtggcggccctactgaccgccctggtggactcctcccgctggaggcggggaccctaacaaccttcaagaccagtgatgggccggctccgaggctccgggcgggaatgggacctgcgctccagggtggtctcggtcccagggtggtcccagctggtgggagcctctggctgcatctgtgcagccacatccttgtacagaggcataggttaccacccccaccccggcccgggatactgcccccggcccagatcctggccgtctcatcccatacttctgtggggaatcagcctcctgccacccccccggaaggacctcactgtctccagctatgcccagtgctgcatgggacccatgtctcctgggacagaggccatctctcttccagagagaggcagcattggcccacaggataagcctcaggccctgggaaacctcccgacccctgcaccttcgttggagcccctgcatcccctgggtccagccccctctgcatttacacagatttgagtcagaactggaaagtgtcccccacccccaccaccctcgagcggggttcccctcattgtacagatggggcaggacccagcacgctgctggcagagatggtttgagaacacatccaagccagtccccccagcccagcttcccctccgttcctaactgttggctttcccccagccgcacggtcccaggcccagagaagatgagtctatggcatcaggttcttaaaccaggaaagcacctacagaccggctcctccatgcactttaccagctcaacgcatccactctctgttctcttggcagggcgggggaggggggataggaggtcccctttcccctaggtggtctcataattccatttgtggagagaacaggagggccagatagataggtcctagcagaaggcattgaggtgagggatcattttgggtcagacatcaatgtccctgtcccccctgggtccagccaagctgtgccccatcccccaagcctcctgggaggatccagccaaatcttgcgactcctggcacacacctgtctgtaacctgttttgtgctctgaaagcaaatagtcctgagcaaaaaaaaaaaaaaaaaacaaaaaaacaaaaaaaaaacaaaacagtttttaaaactgattttagaaaaagaagcttaatctaacgttttcaaacacaaggtctcttacaggtatagttccgtgattatgatagctctgtgattataagcaacatccccgccccctctcccccccgcggacccccagctgcctcctgagggtgtggggttattagggtctcaatactttctcaaggggctacactccccatcaggcagcatcccaccagcctgcaccacaggctcccctgggaggacgagggaaacgctgatgagacgctgggcatctctcctctgtggctctaggacatctgtccaggaggctgggcggaggtgggcaggatgtgagaggtggggagtactggctgtgcgtggcaggacagaagcactgtaaagggctctccagcgcagctcagctgcactgcgttccgaggtgaagtcttgcccctgaattttgcaaaatgggaaagtgggcgcttgccaagggccaggctgcatggattctcacatcagagttctctggccctagaaaggcttagaaaaggcgtaagggaactcataaaggctagcagcatgcggtattttaactttctgcctcggcctctgtggatgcagaaatctgccctacaaaatgctcttcattggttgtctctgtgagagcactgtccccacccaacctgtcacaacggccagaaccatacaccagagacacactggcaggttaggcagtccttctggtgatcctattccattccctcctgctgcggtttctcttggcctgtcctcactggaaaaacagtctccatctcctcaaaatagttgctgactccctgcacccaaggggcctctccatgccttcttaggaagcagctatgaatccattgtccttgtagtttcttccctcctgttctctggttatagctggtcccaggtcagcgtgggaggcacctttgggttcccagtgcccagcactttgtagtctcatcccagattactaacccttcctgatcctggagaggcagggatagtaaataaattgctcttcctaccccatcccccatcccctgacaaaaagtgacggcagccgtactgagtctgtaaggcccaaagtgggtacagacagcctgggctggtaaaagtaggtccttatttacaaggctgcgttaaagttgtactaggcaaacacactgatgtaggaagcacgaggaaaggaagacgttttgatatagtgttactgtgagcctgtcagtagtgggtaccaatcttttgtgacatattgtcatgctgaggtgtgacacctgctgcactcatctgatgtaaaaccatcccagagctggcgagaggatggagctgggtggaaactgctttgcactatcgtttgcttggtgtttgtttttaacgcacaacttgcttgtacagtaaactgtcttctgtactatttaactgta

SEQ ID NO: 1311 - DNA, 1248 bp, Homo sapiens
atgcgtattcccgtagacccaagcaccagccgccgcttcacacctccctccccggccttcccctgcggcggcggcggcggcaagatgggcgagaacagcggcgcgctgagcgcgcaggcggccgtggggcccggagggcgcgcccggcccgaggtgcgctcgatggtggacgtgctggcggaccacgcaggcgagctcgtgcgcaccgacagccccaacttcctctgctccgtgctgccctcgcactggcgctgcaacaagacgctgcccgtcgccttcaaggtggtggcattgggggacgtgccggatggtacggtggtgactgtgatggcaggcaatgacgagaactactccgctgagctgcgcaatgcctcggccgtcatgaagaaccaggtggccaggttcaacgaccttcgcttcgtgggccgcagtgggcgagggaagagtttcaccctgaccatcactgtgttcaccaaccccacccaagtggcgacctaccaccgagccatcaaggtgaccgtggacggaccccgggagcccagacggcaccggcagaagctggaggaccagaccaagccgttccctgaccgctttggggacctggaacggctgcgcatgcgggtgacaccgagcacacccagcccccgaggctcactcagcaccacaagccacttcagcagccagccccagaccccaatccaaggcacctcggaactgaacccattctccgacccccgccagtttgaccgctccttccccacgctgccaaccctcacggagagccgcttcccagaccccaggatgcattatcccggggccatgtcagctgccttcccctacagcgccacgccctcgggcacgagcatcagcagcctcagcgtggcgggcatgccggccaccagccgcttccaccatacctacctcccgccaccctacccgggggccccgcagaaccagagcgggcccttccaggccaacccgtccccctaccacctctactacgggacatcctctggctcctaccagttctccatggtggccggcagcagcagtgggggcgaccgctcacctacccgcatgctggcctcttgcaccagcagcgctgcctctgtcgccgccggcaacctcatgaaccccagcctgggcggccagagtgatggcgtggaggccgacggcagccacagcaactcacccacggccctgagcacgccaggccgcatggatgaggccgtgtggcggccctactga

SEQ ID NO: 1312 - DNA, 94381 bp, Mus musculus
  misc_feature (2681)..(2700): n = a, g, c, or t.
  misc_feature (11224)..(11290): n = a, g, c, or t.
  misc_feature (28032)..(28051): "n" at positions 28032 through 28051 can be any base.
  misc_feature (37054)..(37178): n = a, g, c, or t.
  misc_feature (44115)..(45641): n = a, g, c, or t.
  misc_feature (47999)..(48255): n = a, g, c, or t.
  misc_feature (59012)..(62394): n = a, g, c, or t.
  misc_feature (63574)..(63720): n = a, g, c, or t.
  misc_feature (70645)..(70664): n = a, g, c, or t.
  misc_feature (85078)..(85097): n = a, g, c, or t.
  misc_feature (93428)..(93447): n = a, g, c, or t.
caaaggtttttctgagggaaacgtggaggtaaaatggagtggccaattatacaggcccttaatgaagccaacttttcaataacccaccaacaggttcccgaggaagaatagcaattttctgtatgcactcgtgatcctgcacagcagccagagacccaagatttgccgcagagtgaggctggttgtagccattcaatgcctcttcaggttgggttttgtggttgttgtatgttttaaaggcggctacgttgacaattgtctgaacctcaggatacagtatacctataatggtccacttatcgtactaaactgcgtctctgataaatttataggacatgggccctctttctttctttctttctctttttctttttctttctctttttcttcttctctttctctttttcatagtcgggtaggggcagtgaagtttgtctgccctttgcacagaagggaaccccgtgtcgtttgaagtgtggtatgtcagcagctcggattccacgggagaataaaaacatgttcttcaaaggtgtcatgccaggttaattttattcatttgtaattcgcaccccagtgaagacaaccacgagcacactttaacagcccccatattttcagaggagattttttttctcttattcaaagatttttgtatatctgcttgtttcttgtttggagggggaagcctgctatctgcatgagccctggctttggcaaattttatctagtcttcagggtgtttcataacagaaaaatagagtcaactgttcagtcttggggttcagtcctgggagctggcccgagagacttggaaagattaggattcgatggttagatgcacccttcagcttaactccaaaggacccagcagctcttccttggccagaggaaagatcagcattcgatgatgcatttgacagtaatttcaggtgaaatggatccatgtaaaacagtctacttacggactccagtttcctacagcagcaaggaggttttgaacgcctaatcacacttgattcctgatcgatcctcctcacctttatccatccattttgcactctctgtcgcttgctgtgataaaatactttccaaagtaaactttcagtaccatttgcttttggttaagggtaaaaatgcctgatgctccaagccgcgcctagcgcttctcgtcagctagggggcgctcgctgcccgtgtcatggctgcggtgccttggccgctgtgcctgggaacccgcgtccatcagcacatccggctgcggcggctgcaacagcagcggctgcagtttgtgtcgctgcaaaaatgtcttaagcgtgaagttgtaatattgattttcctgcagagatttgtgcaggacaaaatgagaatataagtttgagaaatctattttcaagccattggcatcgatttgtaaacccctccttacctggcaggtggggaggcggttttttcttttcctccaatttccttttctttttaaacaattaaaattgttattcctgaatgagtgtttttctcccccttggtctgtccatggtcttgacattctaaacattttgttttgttgcttaagcattcacagtccacctagggagtctgggaagagctgtcatcattttaggggtggcccatcttagtgttccccgggggtggggtgggggaccactgtgaattgttgctgaaggggtcgtggacccaagacaacctgatagatggtgatcctttcggctccgatttgataacagccctcaatcccatcttctccaccgcgagtccacggaactaagggtgcaagcaccctttccctaacgatatagcataattcaaacagtgcgggtgattttgtttgcaagcagtgtgtgcttgctggggccagtgcgccttgcacctcagagagttcccttcatagatggatgtcacgatgctccaccgctcccccaaacatgtgatttagtgccgggggatatgtatgtgttgatggtggggtttctagatctacgatgtcttagctttagagtttgtgagatgcacagacagcgcagtgaactggagtcgtctgcgcgagttcagtggataagctgaagagcttgccctgacacaggaaagtgctttattctaacctgaaagagaaataaattaggtcagacaaaagccttagctgtcatcggctggaggaagagggccagccatttatctgatggtgtctctacttcatttaatgtttgcgtctggccagttgtaagcataccgtggaggcaaacacagggtaactatgaggaatataggacctcgcaatcttgggtctgggcaacggtttgtagcctacagagaactgttttttgtttgtttgtttgtttgcttgctttgttttgcttgcttgtttttaattcagtttatgggaagccccaatcatttgccttggaatttggggtccttcccatactgtgattacacaccaacacagacattcaattcgttaaaaaaaaaattatcaggggtgataggacagccggcagctagacgttttcctttgagagcctcttttttcatgaaggaaggactctttggctgcctggttgggcctttcttttagcttaaactctccaaggattttggtccccaagttaatgctgatgtcacatctggggaggagaggtgaaaaatgaactctttttttgggnnnnnnnnnnnnnnnnnnnntgcttggttttcccgggatgtgctgaaaaaaaaaatggctggaagcaggctgtcagctgggcatagctctgtgccctccctcatcaggagctagggagagagggggaacacagcagcctcttggttcctgtcagaatggtgctagattgtgagcagagctgtgttccggggactctggatggtgttttgacatatgcaagtcttttgtgtagttgctgatattctagaattttgttctctctctctctctttctctctctctctctccctctctttcattcttcgtggcagctgataatttgcttgggtgtggaattagccagctcgaactatttactgcaatgcaatgccagaccacacaaaattaagtaacttcaaagtaaaaaaaaaagagggtaaaaaaaaatcctctgttttgctgtaactttttacgaccttgttctagtgaactgctaaactacaaatacatttgtgatccacgctaagaggccttgtagaacagcatgctgagggacttaagaaagcaagtgccaatattacttccattaagaagtactcagacaggggcactgctgcaaacgaaagaagaccaagttggagtcatgtttaaatttctaccctggagagaggaggtgtgggaaggagccattgcccttgtaggcttcttgctgtctgagtatctggatccccgtagagacaacctatctccgctgtacccatggaaatcctccccctgtatctttgaaaacccaaaatgttaaacaaaacaaatgctctcatttggccacagagaacgctcttatatcaaatcattgccagccctgttgtggctctgaagatggaaggcacttgcagtgtcatgggcaaatgtgtttaaaaggtgttctaccgttgatggtttttttttttttttaatcctcccttccttattttcaaaaggcagctgttttatttatcaaagccgattgattcattgattcattctcatttgtcccgggcgtaggttttcattttaactttttggtatggtgagggtctatgagaatgcctgagtgtaaattaccttattccttctttagtctcttcttagttttgaggggatctagcctcctgaaccgtgtttgtgtgcagtgggagggaggggcttggactaatcctgtagagcattttagaagatgtttagaggctgttcttaatcagtctgactttcccccaaggtgaggctgttatagggcagtctgtgcggacaggggtcccctgtctgctgtccccatcacaggatttccctacctagagtcaatcaaccaaggctgtataagtgaggatactcctgtagccaggacgtcttcaaggctcagaaactccctacctccaggctgactaggttctatcatgccccacattggtcatgtcagccccaatcctggtcagtttcccagaggagaaacccactctgtcctcacgtcccgacctgactgatttctctccgtctttattccacttgtcagaaatggggaaggtttcaggttgggtgtggtggcgcacgcctttaatcctagcactcaggaggcagaggcacgtggatctctgagttcgaggccaccctggtctacagggctagctccaggatagccagggctacatagagagaccctgtcttgacaaacaaacaaatggacgaacaaacaaaaaaatgtaaaaatttcaatttgagtagtgtgtacacataaagcaggcagggtggcagcctggagtgtgtgtgtgtgtgtgtgtgtgtgtgtgtgtgtgtgtgtccctattcctccagggaggtggcttctggagggtcttaggggaatgcagggaagtgacacctgggacttgcaggacttctaaaccctctgagcgagctgatggcctgtgcagatgtggtgggttagaatgtataggtcttgtactggaccttgttatttaggtccttggaggaccctgctggggacctaaccctttgtggccccaaagggacaatcctctcagcatgcgcctcattctggcttccatctcctctctgggcacttcattatcccctcaggtggagaacttcataaaacctctcttcgtcgtcgtcctagcgccttgcgtcatccagccgtagatcattttttttccccaagaactgactcttgctttctcccagtcagccctcccccagcccccatggcgattattttcccttggatctaataaattaaaaattgatgggagctcagaaagtgtgctctgccgggtgccgtgtaggtggtgttactgttgctgtgtctcttggtgtcttggcccctcctgagtgtccacccagaatagaacaagaggctccctatgcatgggctagctggccaagtctctagcttcctgggtagccggcataaagtctccagtcagaggaggcagagctcggtggatgctgaacatttcttgtaaacatgcatgcacattgtgatgggggctgtgacgctggcagtacactgttttagcaacctgtccctcacccccaatccttccttactgtctcctcctaccttattgaaacagtactaaccgtgagttagctattaagaatagagatttggaattgaccagaggcaaaggggagacaggagtccatgatgtaccatgtctgcagcaatgtgtgtgtgtgtggtgtctgtttgtgtgtctgtgtctatatatgtgtgtatgtctgcagcaatgtgagtgtaggagtgtgtgtggtgtgtgcctgcagccatgtgcgtgcaggacttgtgtgtgtgtgtgtgtgtgtgtagcagtgcacacaccccatggcctgaggacagctcatcttttggctggaattccctgaggggcaggtgcaagatagttgttgatggaccagggcaggcagggtcctaggatctgtgtgacagagggactttcaggctaggtaatgccctctgatggaggtttggtggctgcttggctgagccagtgtgaacagctcctctccatttctgtcttctgtcccaaattccttcccagcggagctgagactggggaagtttgccttaggatcaagggatcctcttccacttaacagtgatgcctattattatttgtgaagcctgatttcattgcctctaaatgcgtttaaccagctgggaggaggcccagccttgtaaataaaatgtggttttgttgtaaaagaaaatctaactcttctctctctctctctctccctctctctgtatttgtgtgtatgtatgtatatatatttgctcacgtgccttaaatttaatatttgaaaaccctctccaatcctgtggtctcttacatttgagcaagttgccggctgcatccgtccattcattttcctcctaatgagtcaaacatcttagcaactgctgcccctgttctgatcgaggtgtgttgagggtagtcatggtttgcaggctgcctgacgcttggagcttttcaggaaagcacgtatcttttcaggggaacgcttttcggccttacttgttaaggctgaatttacaggatgaggttgagggagggggccagtatctagagtttgagcttggaatggctgcattcatctgtctcttctctctgtgtgcgtttgggactttctgcctgtgtaagcagtggctggatcctccgaggttgattcggagctgggagatgcaagtgtctgggccagacgtacatcttcagttcagggcaggcaagcagggttcccagagggacagactccttgtactcaggtcttggccaacaggctctgtcccttttctttcttccattattggtacagttcttagaagggacacacagacacacagacacacacacacacatgcacacacattacatgcccagcccatatctgcctgccagcggaaatgaaaccacagcctttggtgtgtctctgagagcctctccctgagctgccaggcccagtcagctgcctggtccatctactctaacacagaagttggggttcagtgggactctgctgcccgagtgaaggtggggaggggggcgttgaccttgccaccttcttcaggagagaatcattagcaacagggacccacacatggcctgggggcggggagaggaaagcccatgcttgacattggcagggccagcctgatgtcacaggcaagcgttttgcttttaacatgggaagagggaggggaggtagtttttacgtttctcctgatttcttttcctcctaactcctttagtagtggaagcccagatctacgttctgagctaagcgtgagctggcacagcttgtctgtctgtctgtctgtctgtctgtgtgcctgcctgcctggagggctttgggtactccagttggcttgcctctaaagggaaccccagcactgcagtgttataaacagtattggagaccttcaaacccaattactggggctcccagggcttactgcaggagggtagtgaaaagacagaccgacagagagaagatagacagacagacagacagatacataaccagatattacagaggaaagaatgctggtttggagtgagtcctggtcagaggaggagtggagctggaaggatactgtggacagtcatatatggcctttactgatctttatactggtctgtgtttctttggagttacaacatggatttgaagttttgtggcctgaaacctcctcacagggaggaggatggagctcatactatgagaactgtccaggtgggtaggcgtgactgaaaaggccaaaaataatgatattattaataataatgatataataatatcaataatatcaataatattagtagtaaggaaggcagactcaattaacaggcgaaatggagccctttgctgtggaaagagagctacactggctggagatgtgggtttattatttttatcaaaggctgtaaggagcagaggccttgccaggcctgctcgaggcgggcagtggatccctcccagggatagcacccctccctgcttagtttgaattctcaatttcaatttcagtttgccccccgcccatccccattttgttttgcttctcagtttatttcctttgtccctttttgtttcttttctgaccaaacaatattttgacacccttctcctatgtctcagtcggtgttcttcctttcctgtgtgccgggcgggcacaatgcatctgtatatttctggaggactctttgcgcagtcctctcctttggctctgaaattatgtatatgtaattggtaattaaaggtgcaagcttttcaatataaacagtattgctcaatgttagattattaaagggagaggaggcaccgaataattaccttttccgtcctgacaagcggtttacgggaaatccagtctctccctcgaaccttcagcttgaaggttgtgattacattttaaccatggcagggtggcttttcataagataaatcggtaaattaattacgtagcattgtcttcgagctccttttaaagtaaactccgatttcttttttcaagtgtaattaatggtttctgggcggcgtggcgaggatggcaccgttacctgtctttttttttttttccttttttctctttcccctcggttgttgttattaatgatctacagacaacagacttaggatttacacacacgccgggtgtttctgaactgccatgttttccggtgcgtgtcttctacgtttaattcacagagggccctgcctgcctccccggtaaccacgggcagagagagactcaggctgtgaatcccattggtggtacctgcccttctccctgcacggctccagctgccctttctttctacatcacctgcctcaggttctacacccggtgttgcacacacactagacccccccctccccagcaagcttatattcagaaaacatagaacagtgactcacatgtagcattggagatgccacaggcaaatttgcttcagttttccacgttggctctggctccttaacaaccccactgccacggaatgtctcttcctctttcccaccctcttcagttcctctgtgccaatcactatccattcctaattgctgaacagcttacaatttatctccctcctcagtggcagacctgtggctgtccccagctcccatgaagacctggccactcgtcttcaaggctgacaccgaagaatcctagccagagtcgcccagaccctgaggggaagacagagcccccttgcccacttcctttgatttattgtggcactttgctgctgagccttctaagggtcccttgagggagtggctgatgtttgaagcatttattagcttcaaaaatatttaggtcctgtgccccttccagaaaaataacataaacaacaaggggggaagtggagtgactgctgaagaaatttaaaaacatccagcccattgaaaagtgtggtttgagagctgccaagaagtgatttttgcagtctgaagaggctgttttctttctcggagtgaaaagaaaaccgaccgacagaaaggctgaggtggggagttgatgagcagtgagaattttacgagggtctggaggtctgagcaggagcgcagggtcgggggtggggagggggcgggagggggcaggaggggaagccagggctgccttttcggcttgcttttcccttccgagtccccgagcacctgcgcttcttcctctgggcaggactggctttccagtgcctgtctgggtttctgttttccagtttggtgcctggccaggactcaggtagaagaatgtgagtaggaagctcatgaatagggaagccctgaacgtgaatgaaagctatggggagaaggctcgtctccagctggagccagggcttgggacacagtgttacctgttaccttcctagtccccagccaagccgcccattggaataatgtggggccgggggttggaggcagcttaaggaaggctgaggtttgacttcccaaatcattgatccagagccagaacctccctgagtgacactcacatacccagaagtgcgagagagttgtcccccagctgatggtgttgtgggcaggcagggtgtgcgtgtgtcatgcgtgtgtgtgcacatgtgtgcagggcatgctctagggagcccaaatcagtgctgttgtgctgacctcggggctatgatggtgaactccggtccctggggggatgtggggagccacagaggctggcagtcgaggggctcgtctctcagtgggaaagggtggaaggaaccagtctgtgatgacctaagcccatctcttgtcttctctgccccttccctgtctcctttctgtctccagcagaggctgaccatgtggaggctaccatcctcgaggaagacgagggtctggagatagaggagcctagcagcctggggctgatggtgggaggccccgaccctgatctactcacctgtggccagtgtcagatgaacttcccgctgggggacatcctggtttttatagagcacaagaagaaacagtgtggaggcctgggcccctgctacgacaaggtcctggacaagagcagtccacctccctcctctcgctctgagctcaggagagtatctgagccagtggagatcgggatccaggtcacccctgatgaagatgaccacctactgtcaccaacgaaaggcatctgtcccaagcaggagaacattgcaggtatgacgtttgcttacctggtggctgctgaagctgcctccctagctgctccaactccctgacttttaagcactgattctcaggaggtccagggcttttcaaaatggcctctgggtcaccatctggggcttcccttttctgagggcccaccttccaggtgactctccggggaagacaaggtgaagaagacctgactgttgtgtgttggctactttgcttttggtgagaaaatgctgacttgtgcttaatccagaagtggcctggagcacgagatggaattttggaggttggcttggccctctcttcgttggtgatattggctcagcccctggctttggagccaggctcggtttggactctgtcatttccaacctggaaacggtggcttcctcatctctaagatggagtccagaaggacccacccccaccccctttgtgtcgattgttgaagaacgcaggtgattctgagtgtggtagtacctgctaggcccttatgcatggcacttgtctacactcttctcttcggactcagtttcccctgttgtgaaaaaaagggggtaggccctcttttcatgagcctgcttcccattttgcctgaccctcaggttttgggaatctgtctgatttcgacttcatcttgccttttgactttgggctggatatcttgagaattagagccctattttcctcttttgtgaacggggaatgaataatcctagcaggccttgtgtgatgatggaggaaggggggctctggaagagctttggcaggagaactctcgtggggggtgtccctctggctgtgcagcagccagatggaaaactgtggagccagtcctggaggagtttgggtcctgannnnnnnnnnnnnnnnnnnnnnnnnnnnnnnnnnnnnnnnnnnnnnnnnnnnnnnnnnnnnnnnnnncattgtatcctcttggaagtgatacaaagcatgggccaggacctcatgtcacctagaggcgctcagagtcactgtaagcccagctccaccacacacctcagttgcttacacttgagctccagtttatccacctgtatactgggagaaactggacagtctgatacccccacaggcataagatgggcagtggggagaatctgtggaccagcttggccttggcttggctttctggtgggtgtcctggcagcgtaatcaggcctggggcagacaggcatggctgcacaccacctccaccattaaggcaaaaagggtgtctcgtcccttgtctgtgttgccaggcataccacttgggatagatttcaagagtgtggggacgcctgcccggcgtctgcagtgcacagcagcctttgaggggtggctggtccctacttcactttcatctgctgacccagcctcaaaatcctcattttatgttgaaggtctttcccaaagagagcctgcggatcaccgtggggaagtttgcctaagaaagcaactaaatgtgatttttcaaaaggcgcttaatctccccacagcttcgtccttatccttccattccctctgccccccacccccaccccgtttcctcccctcgtactgttaatggcccacagtatttttattttatgcgtgacgggagatagccttggtccgtctgctcggagtcggggcaagaggagcgagggaggagtggatttgttcgttctagaagaaaatatgtaaaataagcctttggaagtctaaagagctatgtttgttcaaagcatttaaaatgttattctaatcaaaggcacaaagcactttgcatgccgtgtcagctgcatctggccattcctcttctttcaacccatcccacccttcctttctaccccagggtctcctggtccttcctcacttgggtaccaacttttcttcttcttcttcttcttctttttccccatttaacagaaagaaaagattaaagaataaaacatcagtggctcaaatgtataaagtaatttaatatggtgagagcattaattattttagcttaattgaattccgaggaccccgcagtccttgcagcttggtagacaaggcctgtttattatttctgtagattaacagtaaaggaaacacagataactttcagttatttattgtaaaataaatgtgtcaattcatgtgtaaagcaagctgctcaaagataattgagtctttatattttaagaggggagctaggaatcacgggcccttctccactcaggcacccggaaatccttccagctgctgtccaggcccctggcacactggtctccatgggtcccctgctcctgtctcccgcctgtggcttcagggtcccttccctgctgctctgtgccctgctgctgtctccactggccttgatggtccctggcagccgctggtgagcaggtggctgctgattcttgggactttgctcctagctggccatcatggctgagtccttggtggggtggctatgctactggaatgttctgaggtctgcagccttcactttggtggggcagcctttcctctcagcctgacacttgtagaagcagggccccagcgatgggtagagatgttgttctgtaggtgagagtccccctgtccttaactgtgtctccagggtgggagtggagctggggtttggccagtcatctaaccaaagtgtggttgacccagtccctaccctttccttggcaaggtctttctggagatagctatagtttgtgatctttttgctgttttaaatgacagagcagtggttctcggctttcctaatgctgccacctttgaatatagttcctcatcttgtggtgaccccaaccataaaattatcttttggtcctacttcatagctgtaattatctgcgaatatgtaaatatcttaggcaatccctgtgagaaggttgcttggcctccaagggggttgcaacccacaagttgagaagctctgtgggaggattagaaaggtacagaaaagattccataaagcttgggtcctagaggacattcattcattcatccattcattcattcactgaacacctatgctgttccccttaggagggtgtccctcagggagtatgtgaggaaattccagccctatctttcatgttgctacttggcttggaatcttcttgctgctcccctgctatggaagaggaggtcccggatgcctggtttccagggcagcctagggatgggggtgatcataagcaaagtctgtggctggagatctgacccaagggatgcctgtgatgacaccactcatggaggtgctgtgtgtccctcatgactccttcttgtggcctctccctgcctctgttaagaactctgctcaggcactaggtccgtgtacctacggtgacctgggtcagggatgaggaaatacaacattggtggggagtgggggtggggattgtttatgggagcgatggagagaggaaggggctcacttgtctggggtctggagctgtgtaggaaagacaggatggaaagctaccccactccctggctttcagaatcagcttccttatctgtgcctgcagctaaggatgattgcagcctgcgtgtgggtacctgctgcaggggagggcacaggcatgatacacgtgtgcagtgcgcatatgttggcccctccccaccccggcctgagatcatccaccctggcaatctgcttcccagctccacacactctttggtttttaaaggaatggcttcccgagagttgtggaagcgtcaactggttcctgaggctcagacaccagaaacaatggcagggtttagacagtcgggtgagggttcatgtccacccgtctatctggtgccatgttgtgacgtcattcagtacctcatcctgggaaggggacagggactgtggtgtcccctgggctgaatccaggcacccccagaccctcggctggtctgagggtgagtcactcctttcctcagtttcctcctgcatccactctttagcatcctgcagaggactgaatgaaatgagctccaggatataccacacggcgcaggtcaagccagagacagactgcaggcaggggagagtatgcgcccggcttagcagcgatggggatcccactctctcagtcctggagctgagtctgctcctctctgtggattctacactctcctcagaatttccttagatggcctccaaaggaaattggctttttcttgttatcaccttgtccacaccccaaaggatagccagcagggagggagtctgctctctctctcagctgtcttttccttccccctcaatgaaaaaaaagaaagaaagaaagaaagaaagaaagaaagaaagaaagaaagaaagaaaacggactaaaaagaggacatggctgatcccaaggggctgagatttttattatagatataagagagaatagacagaggcagagatagagacagtccagaaagaacatgactggaccaagtcaggcctgaggagagaaaggaagcaagcgaagaaacaacaaccaagatggcagcctgggccaagagactggcataaccaaaacagctgagttatctaggggccagggaagccaggagaagagaaggcccagtccagttcctgggcaggagtttaaggtaagggttgccagccaggagaaccctataacaggtagggactgagggatgctgggagaatatggaggccagggtctactttgataagttaacaggcacctcagccagttgtcctgggtttgagacctaatgcttctccaagctcaaatgtcagttttctgaaaggtaagatttagggtagcagtgacaggaggttccagatcactatagaggcgacaggtggctatcactatggtgtctttctcagaagcctgagcaggggcccaggatgagcctgcagagccctggtatagacagggcttggcttctggcctcagatgctccttgctggagggaaggggtcctgatgaaccccacgatttacacgctgctctgagaatattcgctgcaggctatgtagaaaactcatagtgaaaaaaaaaatgaagacattactttggatgtgcgagaaagaaaataagtggctcgtgctggaagctggagataaccccacttgcaggatgcctcaaaacacttgcgtttgatctatttggagttgttattttccctccaaattacgattagttaaatccatgtatattgtggcatggattatctctctctctctctctctcttactgttaaatcgccaacgactaattattagttctgtctctgcagtgaggaatggcccatgtctgagggacagagccctaggtgaagattgggggttgggtgcggatggcctgacctcagggctcaggataggatgtctgcacggtggtccaggcagagttcacgccagactcttctttctcctccttgtgtttgatggactttctgacttaaatttcaaacctcccaacagatagagctaatccaatacaagttgaaggacttgctgcagtcacacagggaaggggagtcatacctggctggcctggctcccttgggtagatgtctttagggagagggaagtctgtcattgggctggcagatttgggaggcagcaggcagtacctctgtacttcatctgggatgacatttgaatcccatgctgacgtctggatgtagccaaaatcctcaggcccccaaaacttgacccttgcctgtgaaggctttggagagaggcagaaggcagctgagcaagctgtgaggtgtgaatttccacgggactgggttggaaatggctttttttcccccatttatgaaaatgttttattttatacttattgtcgcaattatttgcaaccccacaaatacaaatcacttgttttattttgtggaactgagggttccagtaagtctagttactcacatctgggagtctcagccctctgtacaactggatgatctttgctgccttccagggtgggcggtttactgtggattttatctgatattgtgtgtctgtacacccagcctctagaccagtagctgttgttacagggttactcagaggaaggttggcctcagaggtgacactggaagaggagctggcagtgccaccacagacttgtcggcttgtctgaatttagctctcatgatcctgagtcaggacagatggccctttgccagacatcactgcccagtcccgaggcttggggccactcgtctcccagagagggtcccatgtcacctgtgacagctcgtgaaccataagaatcaagaatcagagcggtggcaggggcggcctcagctctgagcagtagtccaccgtttaactggacttttcaaacatgggactgttagaagggcatctcccagctcctttagggatgtatctttatttgctgaatggtgcgaattggcccattcttagggaagtagcttgagaaaggaggagagggaagagagaaagagaaacttggctctgggggagaatttaaccacattcactctgttactgtttgtttgtttgtttgacagtagttagcagttgaatagagtatttatttatttatttacttacttacttatttatatagcgtgtgtgatagggttcattgctgctgctgttgttagtcttatacaaagctgggggggatgtgtgtgcccatgactgtgcaaacaagacggcctggccactcctcctgcccatcctgggtcatcttttcatgggagttgaggcttccgttgttgggattttagtttaatgcatgcctgtttagtatgtgctgtgtgccactatttccaagggccctgtaaagaagaaacctccatttaatcttataaacacgtttggtaggagttaacctgaagcccactttacaggtgggaaaaacaagtgcagattcctcttggttctatgtgctttctctatctgtttctctatctgagggattctatctctgtcctctgaacgctgcaaatcagcgactgctttcgttttttgtaggagaggcaacagagccagggtagggcctaagtctgtgggtggttcactgaaacctggcttctgctctgtgccccggaaggagtcttcactgggccatctcctcctacaggacccagtgggtttaaactaagttaggtataggcttatttgctcctagctgggcagcggctgctgcctactagaggccgttctgagaggaagaggggcctggaggagagcgactccacgtgttctgtatatatctgtggttatgtgtccactgctggctgtgttggccctacactaggatcataaccaccaggtggcttcagggtccagggagagggagggtcagactggtgggcagggatctgagacctggagggagtattcttgtgtggccttgactaggcccattctctttctggttcccctgtcttctaagctaaaatatgagaaggggtgttaagtgggggtggggggtatggagaggatcaacagtacaggggagtggattgctgagaggaaaaggatggacctcctgctaagcctcataccagggtggtggtatccaaggcttcccacacagaaaactcagacctggatcctggagtagacccgtggtaaactgtttagagtgcttcccaggccccggcaaccccccagtccaaaccagccccacctaaggacttgtgacatagctgtcatctgtgagctagagccagggggctgtttccattgaccttcaggctgttagtgtgaccttacaggaacagggcagctgtgggtatagggaccagccccattgaaaggcagagccatgttaaatggctgcagtcccagtgctcgggctgcaccccagtgatgacacaaattagtcctagttagcatccaagaagaataaacctggtttccctcgaactgtctgagtggcttcctttcagctttcccaagacagaccagatttctggagagggtaggggtccagttagggacggctcttgaggttagaggccaggacggctcttgaggttagaggccaggttaggtcttgggtttagggtgctagcaagggtctggattcttctcccttaataagagataggtgtgtcctctcttaaccttttcccatctccagcaaatggctggaaaaccgtagcggtgtcctagaccagaactaagttcttacttggagttggagctgggtctgccccacccccaccccacccgagttcaaagctagccaattaaggggcccaaacagtgcggtcttccctgcatcattggcttgtaaaactttccctgccaaccaggcgactttattccctgggaagggggaaaaaggcatgtaattttcctgacctggccttttgctttggggaaaatgggaaagaaagcgattttcgtaaacagtcttgtcgagcggcaaaggaggtcagagtctgtagactgcaaagcaggggtctggaaagtggcccttggttgtggtagcggtccctgaggtttcagggtgttttgaggcctaacgggggactctggggtggggatggacatcaaaatcttccccattcggactttgaacttcctcaggcccttgccacaaggcaccactaatgcaatttcccttgctcccggaacctgcaacttgaaagactcatctcctttcccgcctccggccgccagcagcccctcccccacccggcctcaagtcctccctgtcctggtccacgtggtgtgcaccttcagactctgtcttcctggagggcactcggaagtttgggtccactgacaccagttcactcagcaggagaacacaatggcctcccttggagccagccgtcccgtgctatggccgggcacaaggcgcgatgtgcacccctacacgttggtgactgcacccgggcctcccaggggcccgccgggtctgctgaggacctccgacgcgcaggttgctttcgggccttggggctcttcaggtcctcttcgggccattcctgcccgccctccccgccgtgcacgttgattgcgccctgggcgggaggcgagcggggccggggccatgcataattcccgggcttaatggagcagctgcccgcgcggggcgggtgcaggcgcagctgaccctgcagccgtctggcctcgcggggcaggcgcgctcctttcttcccagtctgcttcggccggggtcggggaaaggggtgggggttgggcaagccgaaaggccactcctggggggagggtccgtccttccagtttccattcttgcaacttttgctttgggcttgggggtgggagcatcgagtcgtagccgctcggatccgctcctactgaagttgcagtgcgggtttccgcagagcgcgccgaagtcccagactccttttttccccttctttccttttatgtgccccttcctccacccctacctctaccccggcaccttggcggccccaagtccagccgcagtccagcaagcacaccgctggctccccgccagcctctttcccgggctgcaggagagggatggaggcggggacccaaggtcaagggcgggaaggccgcctgccttgcggccctttgtgcacaggccgcccctccccccaccgctctccccctctgcccaccgtgactgcgccaagtcgagtgacccctgactagggggattgtatttcagaagctgctggaagctgccattggcctcttccctgaagccgccactgcgaggggcagatctcacagcccttgtgacttttgtcctggctcctggggccactcagggaccctctcccccgccctcacttttgcggacgtcgatcagatgggatcttaagctcaccttggcctaaggatccaggtgagcccggaaggccggggcctgagttctctcctgcaagcttgagttcctgcagggcagccaggcttgccccatagtgggagatcaggacctcttgtttctttgaaacactcggggacaaaagttttctcaattgtgcgggaatgggacccgccactggggtcgatcggaacgcataggattactgggaatagagtcagctccctaatcaacctttgccacttctcttaccacaccgctagagagaatttgtatgcaaatgttatcttgctagaatttctggtcctgtgtcttaaaagttggcctcgtggttgaagctctcccagagctggaaaaacagtacccaaaaaccgtgtgttgtttgcctgtgaatttgccttacctgagacatcgtttgcagcataggattgggcccaattctctgttctccatttttcagaaataggtctgagctagactgaatcgatacattataacagtaggtaggcaaggtggtttaaaaaatgtgtgtccacgtgcacttaaagtttgggcctgatggtaggctgtgccttctgccctgtctgggttctgtgtcaataataccttcctggtattttgagagaaagttgatcttcaaaagaaaaaaacaaaacaaaaaaaccaaaacgcacaggtttagctaatccaaacttggagcaactggcttttctgatggagtctaaaggtacttgtcaatttatttgttgaaaagccttggggaggagtaagtccttctctggaacggaaacccgccagtcctggacaggaagggtttctctctgcccgaacttgctcctggatttctcagacgtccatttatgacagttccaacaagacagaaactgcctttggatatctgtaaatacggctaaagatcacaaccctgccttcagagtgggctgggaggaaaaggccagttctgtgtcggattaatagttatgtacctgggttcctttacagaaggaaagatgaaacaccgtgtgtgtgtgtgtgtgtgtgtgtgtgtgtgtgtgtgtgtgtgttcttcccagtcaagggagatgagcatccagtgtctttggaggctaggtgtgtgagagagaggaggagggttcacagttcatacttaatggccaccaccccaaggagaaggccagctaaccacttgtgctttccttactttccttactttgacaactcaaaaggaattttaaaaattatacatgattctccctcacctcgatttgagttaagccttaaggcctcacagtggaaggctttcctctagggctgatgcatcgagcacccccatccccgcccctcttctatcccccctcccccatccttcgaggtaagggtgtgtagatctttcttgcctcggtgccagtgttagagtgacagagcgctgcctggctatgaggtcctgagccctgagctgtgtcctcagggcacaggtggcttggcttggctttgttcaggagccgtgtgtgggaggtgtgcatagaaatggagccctccgtcagctggatctccttgcagttcagccactggggttggtagctgaagcggcggcgcctgcaacagcacccctgcccacccccttcactttcactgcttggagaaatctccgtgttcctgtaggctttcccacaacgccgctccccttgatggcactgcttaggcatttgataaatatttgttgcttttggagcatcaggtgttacctcaaggtttaggcactggggtggagtctgtctgggacctttgacgcacagcctggcttatccttcaactgtccagggccatccagtccctcagctgatgcctgtatctgtagaatggggatgtgttttttttactaaccagtctccatctatataggagcataagcgagtggagcgaagctacggctgatttcatagacatcataccagcgagactgttattgtttgggccctgggggcggggtgactaatttgcaaagaggaaaggaatccaacagctgcttgtatagggtgttgtttttaatgcgaagaggaagcatttgggggctttggggagaggcttacggcataccacaaggaaacgcccctcccccacctccattcacttcagaggcccttctctgtagctccccacttccagctccttattttttgggaacgtgaagagattcattatcttaatacctagtggtgttgctgttaccctgacctgaacaccccagaacatgtcctcttcccctcctgatactaggttctggccgcggaagggtagggagcgagatgggggtgagggtgtgtatgtgtgtgtgtgggtataggatacagacttgggtgaaatgtatacagcaggcagccttcaaatgtgtagtcttgctcaatgcaggtgaaaaggaactcggatctggctttcctttctctgccgcctcaaagctctcagaaattagcatctgtacccattgagtccgcagctggtggctatgaaatggtaccttccttcactagggagaagccggtctccagtggcctgcagggggccaatgttttaccttttttttttttttctttcttcagtttttatattcaaagaagcttggtttcttttccctctgccaatgctgggtgacccgaatccaagttttaataataacctcttgctggacccgaaggctccaggctaattctgctctttaggtctgctgaccttgctgtgcatctgatgtgtttgtcagcttcggtttgggatggggtgaatgcgtgtgcaccctcagagttcctgttccacccgctggactggaggtgggtgggtgggggatcgcagatagaagtagaagactagatctgtaccgtaccggagggtaggcttgcagccaggcgtgtggcacctgtaattgaatccggacctgcgttccgtgcaggcctgcaaggatgcgcaagggaggtatcgaggttctaggctctctgtgtggctgaatcgggcatgaaaccgtcttctgactccgtggagcccaaatggtgtgtggagaagccagggagcagcagagagcctagaagcccgtgcacgttctgtttgcacgagtcggctcttgcatcttttgttagtggcggttccttaattaacccgcggattagggctgccttcttttgacacgtacatatattttgggggtataatattcttgttctcctcaaactcacaaccggaaccgctcaggagcctccccagggagctatggcctcttctctccctcttgtcttcccagcttttcccttcctgttcccctcctacccacccttcccttcaacccaagtgggcttgtagctgagtggaggacgggcgtgctacacacagctaaataaatcatgtttacgcttggcgttcttggtagtgaaaaagctgttggctgtttccacttccgtatttctcagcatttgcttcctacctgtttttgagtccatgcccagaaatagtagttttgtcaaatgaggggataatgccagccagccttccctgctgccaaagaagctgatggattttgcaaaaacagagtgacgtttttttagtgacaccgatttccccccctgccccctcaaagaaattagggtgtagaataaggggtatttaaaatgcacatggagcaggggagggaaggggaggattcctagctgcttctactggggtttgtagcaggcaaggttagagaaggaaggtctgggtttttgttgttcgattctctcagggcagcaggcacccgtaggaggtgtagaggctgttctgagcccggaggagagctgagtcaagctcttttcagtcccaagacttcattttctcagatttggagatacggtgcaatgaattttttttttctttccttctgttcagttttgggtctgtttagttccggaggctttcagaatggtacttgccgaattctttctctgaggtaccagtaaggaatgtcaccctgggcccggggtgggagcctgtctgcacccaacttgacagtcagtggttctgtacagcatgaggtacgcaagcctcccgcctctgcctttaacccgtgatgctgttttaggggcatgtgaaaaagtcactctcgtgatgggtcctgtctgccaggcagagggcttcctgggtaatcaaagccaactgcaggcttgtggattaaaaaatgaaaagaaacgatttcaaaaccaagcaagtggcagataaacactccgcttctggaggaaggtgggacctgatttctctggaagattcctgcaggaattctgtccatggtcaggcacatcagccctgttgcaaagatggccaggaagaaaaaaaaaatcacaataaaatcaaagtaggcatgctatgctttcccacaatttctgatgtaaatattttgtagcaaagatggtatttccattgaggactgtgcagccagcatctttaattacattaaatagtggcacaagtctcagctgaacgtaagcctccggttaggtccgctgccgtgggctcgctagattgacttgtaatcatcaatattgccggtgttaacgtgataaccacgtttattaaatttatcccacgaagtgttaatttttatgtattttgttgtgcacacaccccacatgacctctggtatgttagaagatgaaaatgaatttcatgtcaaaaaaaaaattaaagaggtggttgtcagactgctttgtcccccttaaaaggaaatgggtgattttttttcattttttaaaatttttacttatttaattttttttttttttttggccatcaaatgctactaggttgaaaagcaggctcacaatatgtgtattaaataccatccacgtacagaaaacggaggtaaagagacgacttggttgaacgtaattacaggcctgctccgttctttagtcagtgacatttcagacctagcttagaaacagaaagagacagaaagagcctgcccttatgtgaggcaaagcattcaacccacattctgtgtccgttcgaaagaggcacaaagagatgacagggtggaagttagctaagtctagaggagagctggattaaaaaaaattataataggggagttcaattgttcgtaactgacgcacgcaatacaaactaagcgtgctgttgagggctagcagggaacctctttttagaattgattcctccccccaccaccacctgaactttctctttaccaagtttacttctattccgtctgaaacaagaaaccctgctaacccagaggctgggagatcacttctgtcttggtggagttttagggtccggtctgtagaaggttcagctccacatgtgtgcagcgtgctccatgctctgggcctgagtcactgcgtgaaacccgtgttggtcccttcctgtcctttcgttccttttttttatcggcctgtgctattttctttcctaattctccaggatcctcacggttcagacgtgcatctcctctctcctcattctgtgttttccccaagcagaagctaaggttagagctcctgacaccttctaatcataacggtgtcctgaactctgcagcttccaaacccatttggtatgggatcagacttttgatgagagacaagttcattgttttcgggttaccagtgtcaggcccagtggatgctgtctaggatagaggagtccttcgtttaaaactcccaggagtgcccaaatctgacaattcatttcctgggttattgccctctggtcacatgacttgctttcattatggatttcctcccaactccgcctcctgagctgtaaaggaaaggaaacacagagacttaggggcacatgagcaagcttgtcgctggagtctggtcctaactaagttttatttgtgaatggactgaagggtcctgacctgtaagtctcaggttctttttttcttggaatgcaaacagtgtacttagctgttgacttccatttttaggcggtatcttcatgggctctgagcccgtgcacacacacgtggtaaactgtttgttctggaggcaaaaccgagatgaagtttctgaagttcttgactgactggaatcagagggccgactctgataagggctgatgcagccacacagcttttggctaaaaggcctagcgtgggaaacagggactttctttgctaggcattggctatttttataggtaagattagagactcttgtcagccccagctttgtcctggcccctgtagaccccaggtagatgccttagcctgcccatgtttctgacacagatgtatgtgtgtgctcctggtgcgtgctggcatctctagcttctctctctctctctctctctccatcacagatgtgctcacccgagtttctctaactagtaaaacacatggccttcccctctggtgtccctaggccatgtcattctcagaatcctggaccctggtttggcggggtatgcctgccaagatcacagtggatggccgctgcttactgttctgcgtgcagcagcctgaagccaggctcaggctttagcagccattgaatgtggctgacatgcattccagccgttctgagagctccaggctccctcaagagaagcaaaagaagaggttctagtttcaagtttcctcagcaggtgcccatctgggggctggaaccgtgaggctcaaaggactgactgtctggcttctccacctcaccctgggtagatctgaggagaggctttagggtcacctgacaccttcctgacatgtggactatcctcccgctctgccctcagagcctttggaagctgttggaagattctggaacaggtggtgtagcctcacctgtctttggctttgggtacagaaaggggatctgcttgccccaggggatttttagcagctccttgttttgaggaagttagaattggcagcagtggaaagaaacaattgctcctgggccttgggaagtgatgctgtgtggaccagctttgattgctagatgctgccgcccgagaggatggtctctcttccaacgctggcacggggcagaactcgggttttggtgtgccctcacagggtgcaaccctttctctgtatctcttaacctttccctggaatgcctgtcagggagttaaaacggtgtggctctttgtcagttacagggatgccagatgagggaggagcttgggggaaggcggcctggctcaggatccaaaagaagtgctgctttctcttagggtgcccctgagcctttcacactggctgcaggagagatgcccagctgtgcgcgtggggcttgtgagtggtgtccccggtggtcatttcaggaagaggtagtaacagtcctttcaggctcagtcatgagcagttgcctgtggcccttcaggctgtggcctgacatattcttccttgtcatggacacacatagaggccttccctgagtccagtcacaagcagtggatgatgggaaaatgagacaaactctcccatctgcatccaacattcggtcaccacctgtaaggtcaccaacccttgagcgccttgagtccagggaaagggtattgtgggtttgaacaagagggggcgtcctgctcagatggaggacgtggaagtgagagctgggagccggggagccctcaaacttttccccagagtttctaggttgggcagttgctgtgagcctggctagccttcccctgacttgctttctggctctgccttggaggcctggcctggcttctgggttttcattgttgttagagcactgggtcctctctcctgcttcgttttgtctctgctttcttatttcttacaaatggaagaacaaaaagaacgcacttgttgagcttctgcgccccagacctgggtcgctttgacagtgagtgacagagaggctctcttaggatcatttctagtcnnnnnnnnnnnnnnnnnnnnatttctagtcctccggcctcagctactcccccacccccaccccccaccccccacccccaagcagagtgggagagaggttagtgatggcaggcccagaccttgtctggggagttacacagggcctgtttccattaaggtggcaccccacccctttgaaataggaaattgccaacatggatgtcattggctgctaattaggtgaattttaactgcaggatcattttaccagctaataccgttatgatgtgcttcctcgtgacctgtggtggagcccttactgtacgagctcagcctcagcagcagacatctaggagttggttgctcagcttcctctgagtggctgctggctttctctgttcctacttcgtgtgttcacaccagggccagtgagagcagaccctgagatgcccaggccgtgggcaccagtgcccctcatccctatgtggcacggtcccccaattcttgggcctctggaacagaccagaagcttcgtattatgatttgtgcctatctacatggtaccaccacggggcatcatgcttttcaagtctaatctgccctcacctccatcttctctctctaccaaaccggaaaaagaatcttaatttcctgtcgggctgggaggaggcgggttagagtcaggataatgactcttaaatatgagcaatgcgtctggttccatgttatttttcctctaccctcttaatacacagcattttttatcatccttaagacaaagtagctggcaaaatatttaagtgatcagaaacaaatgtttttatttgcctgcgtgcgaattgggttatctgcctatcttgtttacgaaatccggggctgccttcccgcacagtatgctcgcctctcgaatcttccccggctcccatttccatatttctgcgtgcttgttctttgttaatcacttggcaagcgcttatttgaatattaaaaatttctttaatcatcaaacgcaggagcacagtctcatgaatattcatattctccccccctcctcagactggattctagttcattaccccgcagtaaaagccaaacagccatcaatcgctctcattactggctctggcgttttgattggctgcctgctgcccatagaccttttttttttttttttttttttttttttaaatttcccttctcctatgagctgtcttatacctgccaacaactttaaaaaaaaaatcaacaatgcaagaataaatttctctggttgaaaacaacttagcaaacttgtcaaacagcccttgtagcttgctgggccctctcgggacaccagaaccacaaacctccctcctcagtccaccctagtcccaccaaaaaacaaaacaaaacaacccaaaaaaacaaggagaaagggggtagggaagaaatagaattaaataaataaataaaaaagagaaacttgagctcagagagatgaatatttgtcaagagagttgacgtaagtttcatttgcataatgactttgtacttctgcattaataaaatttgcatatgaagccatgttaattactcctgatcatgctttttgcattcatgcatagtaattttctccgacttgtgagaattaatgtcttggcacgagggggggaaggggcgcggggactgtcaggttccctcgccagagtccctcgctcacacgcgctggcgtggatgtctgtctccttctttgatctctgactcatttctgcactatcagtaggagttctcgccttaaaaaaaaaatgtatccgttgaaaggcaccagtagggagaaaaatagacttctgtacggtatgtgccaggccacctcttggggtaggaacatgggatctgtcacctcccagttgcagagtggcggccctgggaaggctgcaccgggaaggcttggttccctcaatcggggctgggcggttccaggcattttttgtgtctacaggctcctggtggtgggcgtgttgctgcttagtgcgcatgtgcagggcatggagcccagcatctgcagggactgcttgcaagggaggtgggcttcaagctcccttcaagtgcctcacccccaggagggcaccaacagtgatcttgtcctctgtttggactttagccatcataccagaggccggtttgggagaccttttgaatattccttcgtaggtggcttaaataccaagaagtcagtctgaccttgactttggagcaccgttttcacgttttttgagaggggcaatatatccccaccccataggaatgttttatgcttgcatggcataatacaagtatcaattttttatttctttttccctaattaaaatgtacttttatgataaaactgaggcagccagggtttcattaagctgtccggatcctacaagaagctgagttagagcctacatccctcccccacataccttgatacgtatgggtctgtttggactggcttagactgcaaaagaaaggtgtcttttaaaagaagatgtgaaattgtagtgtgcgtgttcttgctgcgtctgtgtgtgcagtgaaccgtggcacacaatgaaggtcaggacagttgtgtgggttagttcttccttcccatctttactcgggtcctgggggaaaaccctcagctgctgagccatctcacaggccctggacttctggaacttctgggaacaggacccaagtccccatgcacactagaaaagtgctccagcgctgacttccccacagagagctttttaaaaaagcatcctgcgaggcttatagggtgtcttccttgctggagcaggcttccagctgtgaggaggactggggaggggtagggcagaaagttccaggtctggaaataaatgtaaggatggtagtggccacgtttactaggtggctggctctggctgcagagtgccctgacagtccctttaaaaacacagtgactagccaggtgtggtggcgcacgcctttaatcccagcacttgggaggcagaggcaggcagatttctgagtttgaggccagcctggtctacaaagtgagttccaggacagccagggctatacagagaaaccctgtctcgaataaccaaaaaaaaaaaaaaaaaaaaaccaaaaaaacaaaccaaacacacacacacacacacacacacactcacactcacacacacacacacacacacacacacacacacacacacacacagtgactgagacagagagagtgaccacttgaggtcacaggctaagaaatggcctaggaggaatttgaacccatttttttctgtctctgtccgtctttctgtctttgtctctgtttcagtctctgcacccctcccccacaggctgacatctctcagtgggtcaggtacagagtctgttagcagatctcaggagctgtctgttctagatccaaggccgggcatcccttccagtggaaggctgaggctgcaaagtgggtcagggacaggcttagagacatggccctcacctttgatttccttttaaaatgaaggtgcacctattgtgaaacttattttaattcgctccatttgtggctttggatttttatgtacgggattgcgtagccatcactactgtttaattgatcacacccccagaagaccacataacctattggttctcagtctcccctccccccagcccctggtaattactactcagtctcctgatgtttggctgaccagaagctcgccacggcattatagcatggtggcttctctcttggtttttgcaggagttggatttcaggctccctctgcgtgcaaagcttggagataagctgtgtctaggggggacttctagtggggctgagattgctctaaaagctctacagggaccctaccccctcctgcccttggagcagatagccgttagtgagggtctcacacccaatgagggcctgtggccacctgtctaacccaagtgttaccacctggtgtgggtgtgtgacttcatcttgacagaccctggttcaggccaggggcgtccttctagaaggccgtggaggcttgcgatttcctttttgatcctcggccattcttcccgtcagcgtcgactgtgaggagctcctgtgggcattcgcagccatgaggtgtggtgctggctgagttatggcctttcgtagaatcagaagcctctcgctttcactaatggatgggctgaggtccaggctgctcgctcagacttcctccattcccatgtggccattggatacagggtgggtaccctggtcactttactccagctgcagctgtagaggtgggaagggagcatggccaggctctggagaccgtgccacgttcatgctgcagagtgcttgatcgtgagtctcagttcctccctgtggagtggcaggtgctccttcctggagatgactttcaaggaccttgagctctccgcggtctaaagggacgaatcccacagggattcaaggtcattagaggacagggtcaagtacagtgtccgatgcagtgggctttgaggcaaacactggcctcccatgggtaagtttggcctcaggttgtacttgcaggaggcccataggacagctgtgatgtggctttttgctcttgttttggtactgcaactattcttgggcttattgaccaggcccatttggggctgtgtgccagggcagaaacaaccggtgccttgtatgagtatatcactgcctcagcagggtccagcagggtcagtgctggcacaggcctctgggccggacatcacagtgcccgagctccaagctctgagtacccggatcctgcatttacatggaagcagtgggatttttgaggaggctcgaaactgctacggtttgctgattcctgcacttctggcctctgttggagtctgtgcaatgagtgtcctacgtccttgtgttcaggagcgtgttagggacccgatcagagaagagggggcaggcacctggctctctgagagcctgcgtgattctgtggcggggtatggagtagtgcagatctgcaggtgccaggaggtgagttctggcctgcagtgcagacctggtgaggcttagctgcccagcatctttgttgatggtttcttcttcttcttcttcttcttttttttggtctctctgatgcttctctgttcaattatttacccagggaatttgggcttcttcacttgtggttttggcaagggcttcacacaaatgttttgccctggtggtctcttaaccaacgtaagataaatggccaaatcaaacgcaggcctcgctggcagtggaggctcaatgtggggccgggtggaggcaggacagcatcctcaccggccctgttcattgctgtcactggctgtccgagcagggagtggggactcattcccaaaccagggtggagacgttgagacgtgtctgggccatgctaggtttcttgtggtaagagaggaaggagaagctcagggcatcctgggagcttccgaggcttgggtgctgcttgccagggtctggagagaagccccaggcaaccagctaggcaggaggctcatcagtgtccaggcccttggaggtagacctgaggtggcggaggcctgactaaagaacctataccggcattagtctcctgcctctttcaaagaggggtcgctcatattttgagaccaaatcctcaagcgaagcccactctagtttgttctgaaagatccttttaggggatcttaactgggagtggggccccgacgggccttctctgtgtgccaaccccttgcactagggccctcaaaggcagccctctcggcccccagaaacaatttggcagctgcaggtgtagcccctgctaatgtcctctgtgcaccccttctcgcttgcccctggaccccagttgtcatccccgtagggctggtgtcctcggggccgaaccctctcagaggctgtactgtagccctgtgacccggggccccctcttgtgcctcaagtcccttgtgcagtccagggcaccactgaccagtcttttctattgttttttctccagggccgtgcaggcctgcccagctgccatcgatggcccccatagctgcctcctcttcccaccctcccacctccgtgattacttcacctctgcgtgccctgggcgttctcccaccctgtttcccgctgccttgctgtggtgcacgccccatctcgggcgacgggactcagggtgagggtcagatggaggctccctttggatgccagtgtgagttgtcaggtaacagagccgctgcggtgggggaggtgggctcccgggatggcgggctgtgccctgggccgagccggggacccaaggtggggtcccagggggggatgtgccccccatcccccactcaaaaagcttttcggggtgggggatggcaacagaagtgccaaagatgtcaactgaactgtaacctgtgtcggttcccagggggtcaaggggccgtctcccccgtatatcccccaccctcgaattctgagagtctcactcccagaatgcactgcccgacctccaaatttcatctctttgggctgtttagccgaagtttaattggataacacttaacatctgaagttttcttctgccccttgcctctgccgccctgccacccaccccagacaagggtgggagaggattcctgggctgtctgtgtacagcgctggagccgttcaaagtgctgactttctctttgggacaatgtgttgcccattaacttagagggaaggaaaaaaagtctcaaagaggagccttttaaaaaagctgtggccacgggtagccgtgaaagattgtgggcgtctggggcagggggctgtggaggtcagtggctctgggtggaccccagagttgtcccagttacctctgccgttgttggaggcccgtgagaccccgttacacaaagggcatccccagccaggtggcgacacagcctgcgtagctcccctgctctgactccccacaaacatagacttctgtggcttagggtccccacaaggtcgaggggagaaagccctcccccccgcctcatggtggggcctggtttgcaacacactgtggcttaaggggccaggatgctgacacaggctcacgtggcaagcagctgtggcctggtttccgtggccagggccagagctgcggcgctggggtacattcagtttgtccctgccacacggccaggcacgttgcagcctttctcttgactcaagctgtgtgaaaggaaaactatttttattgggcaagttttgcttttcattgacgctgtctcagggacctttcttattgggagctttggttttgcacaagaagagcagcccctgatccaggatgaggcctccctggtcttcctgccagtagggtgtttctgcagtactggcccatactcctgctatggcaggtggctatgttgttggattgcccatccaagtctgggagctctggttccttccttgagtgcataaagcagagaccaaagtcacccaggaaggaactgaatcagcttgctaggaagctgacttcccttcctggtcagccccgaggtgactgaggcttcttgtagcttggaagatcctgttcaccaagcttggggtacctgctgggctgggccttgctctttggcttcctgttatatggggctgcaaccctgcagccctgtactcaaatagtgggggcctgcactatcaaaattaagcctaaatgcatatggtcaggttgtgcatgtagaagcatgacctctttgtcccacgtgctacaggggcaagcttaatcttcagctggccctctgtaggaactgccaaatcggagttgcgagtctttcctgtgcccatgagtggaaggggcaaaggctagggggctatggctgagcctctttggaggattgcgctaaggcttggggactagttcctttagcccagtggaggtcagataaggtctgcagggccttgtcagccaggggagtctggcatcagtctgccctcacacaggctacttgctttcttagagtagagcagctgtctgtcctgaactaggcatttggttgtgtgtcaaggctttaactcccacattacagacgagcgtcagagcctgaggtctcgaagctcaaaccggctcattccttagttcgctggcggtcctcaggcacagtttgtaagccacatgtggacacaggcagagtcaggtgtggtgggtccctcgcctacctcacagctcacagaatgggctttggggaccatgtcctgaggctgatgggagggaaggtaagaacacagaagtggctcccatacggtacctggttcaccttgaggtgcagaggctgccatagagttcagggctctggggcatccggtccacgtgtggcgattgccgtgcaggggaggcgagaagcagtgagggtctgagccctgggacctctcctggaccggctcctgagggacctgctgtctttcttcttcctgtactgttccttgtcattgttctgccttgttagcatcgcctgtgtgaggctctaccgctgtgctgtgttttcagataaattttgacacattcaagtatcctcttccagtgggttttgtccctttggttctgttcctggcactgggctgtttgctgaagtgtttttagtgcctgtttaattagtagctgcagaggaggcataaaatcgccaggaaccctcgaggaaggaggggctgtaaagacggaacactgcagtactcactgcgctttgtcccccttctgatcagggtgctttgaacccatctcttcaaattaactcaggaagcctgagtttcacacaggttaattgcatgcccacgaacacactctgggttatttatagaagggtgtgatttcacaggagagaaaactacccggacaagccaggccctgccaggacccttcccccatgcttcctgcagatggttacagctgcgagaaggggacaccggggcccatttcttatggattccacagagatcctatgtggtttttgagtcaggtgctccaggcaactaaaaggtcttcccctcagaggtatcaaggtagctgtgtaatcaannnnnnnnnnnnnnnnnnnnnnnnnnnnnnnnnnnnnnnnnnnnnnnnnnnnnnnnnnnnnnnnnnnnnnnnnnnnnnnnnnnnnnnnnnnnnnnnnnnnnnnnnnnnnnnnnnnnnnnnnnnnntatgcatgtatatgtatgtatatatacatatgcatatacatacacacatatacataatatgtatgcatgtatatatatgtatatacatatgcacacacacacacacacacacacacacacacacacacacacacatgaatgtaatattgcaaaataaggctccgggagtgtatctgtggattagaacaggttggggtgttgtgggtctgggcccggctagggccccaggctccattctgtcctcaatccttccctgctttgagacatcatgataaaaaaagtggccttcagaatatatcagactgtgttcatgagtgaattatgtagctaggtttgtggccttacccaggtcattcattcctcgtcctttcttttcctctgttctctcatctgtgaaatggacgtaaggatcgggcatgctctacggctgtctgaggtcatttagggcagacattcagaacgatgctctgaatctaatgaacccacagacgttatgattcatacgcaagcagtaggggtttcgcaatctgatggtgctctgtgtctggcactgggtgggagcttcccttaaaccacatccccggtttccatgcttaaaagcgtttagcctcttggctggctccgccgtgcaccagccttaggaggtggaacgggaactgagaaccttcattgcatatttagaagctgtaaatggtcatcagccacagtgattaatgcatgtgcttggcgaagttcaaggtctcacgcaagaacacacagcatccaggctcggggaagtggaagtgtttggatttaatagagggagtcacttgcagtcattagtatatgctggaatcacagggcaatcttgtaaagttaaattcaatttacttttctactgaaattgtgcttgctgtgttatttaactagtctggggtttcttggcttgggttaaagggacaataaagataaaagaatacctgtaagtaaataacagggtttaacgggagaatctctcgtcttctcctccttcagttatatcccagtgttcgccctgtgttgatttttatacccggagccctccaatgggatgcctcggatcagaccaccctagctgtggaggcttggtgcaattaatacagtctgtctggaaagtggtcttatttctggaagttttatgttaatgatatggtctgcacgctgcacatttcataccagaatgaagagcgagctggagtttctttctgggctgggtttgattagcagcggaggttccctgggcagccgctctcccagaggacagagattggcagtcctccccagtcctgccagggcactgcttggtgggtgtggtgtactgggtgctggggggagggcgtgtcgttcaagccttcctggggaaggaggggccgtgtgggcgcagtagggaggtgtgtgtgtaagcctccagagggaggtgacagatggacttttgagttcctctgcactgtaatgcttttttttttggggggggggtgctttctgcgtttaccacgtccccgtgtcaatggggctggctcagtggaattattgaaaatttagagagccctactgggattgtagttcagttggcagagtgtttgcctagcatgcatgaagctctgggttcagaccctagccccacactgtgtaaagcaggtgtgtggtgccagccagttactcacacttgggaaacgagagcaggggggattagaagttcaaggtcaacctctactgcacaacaggttcataggtcaggctgggttatgagagaccctgacttaaagacaattagttagtcattagtcacttgtccctttgcaatgccaatatgacaaagactttggtagtgtggccccatgactgacatttaccacgtgttccacaattcctggaggttgtctcctaagactgactctggtgtttgcgttatctcaggatggctccgccgtagctgctttctttctgggcctgcccaagacctgcacagtgtcctccctgtcttgatacacgtcagcagagagctgccggccccctggaggttgacaaggatttgacagactgcagaaaaagaccactgttcactgtccatatagcaaatctcagccttcagcaccaacaggggccagagcggttgcagtgggctccggggagggactgcagctggccagcggggtgggactcaccggggtgactaccttcagatgaaagaggttccagcgacacagacgttactacagataccatttcggcctctgccggcctttcagaaggcagagctaaatcaaagaattctgttcaaatctgtacaagatgctgtttttctgccctgacaggagaggcatttggaagagcagtttctttttctttctttctttcattctttcttcctttttttttttttttttaatagctgtcttaaaaaggagtttggctgtttagcacagctggtgctcattacgttatggactggcaatgaaatagcatgtgtaattaatttttaatgcagcgctgggtgcagcactttcaagcagttagtggatgtgaaggcccagcactggctgtggacatcagagacctcggagccaagcagccacgggctcctttcaaggggatttgacattggcaggagaggctgctcaccaccctccgtgcggaggggagctcgctcagaagtgggtttgttttgggtgacccaagggtcaagccaacccttaccgagccaggattagggggtcctgattggacatctcatctgacccttttggtatccagacggataaactgaaccaggctggaggaagacaccggaaggcacaagtggctggcagaactgacttggctctatgtctcacagtctctgcccactagactctctttttgagacagcagcttttgtatcccaagctgaccttgaactcatttttttgtaacagtatcttctgatccttgtaacagaaggtccttgatctgctgatccttctgttaacttcttaacttggaatgttgggatttcaggtctataccgctatgccctgttctatgtagtgagtgctaaggactgaaccctgggtttcatgcaacctaggacaagtggagaaactgaggcacagagaggaggagtgagctctacccctggtgccacatcactagtctgcatcctggtctaccttgagttcacattgagagctagtgagggacatcctgttatccaaaggagatgcttaaaagccaacttcttcgttgccaccagattcgatgtcctgggcaccgggcttggcagcaggtaacatttttgacagcaatgaaccccaagtaattggtcttgggactctcatgaggtttttggcctctgctgtgggccacacccctctgcatgttcctgttctgagactgcatgtgggcttggcttgcctgcatggttgctgtccagtctaccctgggaactgcagcatggagtcttgtttggattaggcactatgattcacaggtaccagatcggggacctcctgggtcctgttctctgtgccattgagtctgaatgcatggccctgggctgcccactcctcctctctgtgccccagtttctccacttgtcaaacggggcacaagtaacccctttgggaagactcggagacacttctgtcagggtgtgccagggcatgagggagcaggccatatgaccttggctactgtgatgacctagcattcatggaagggggtggggtagggggtgggaaagagccgttactcttactgcttttggaactagctgctgctaatccacaaaaaaaacctactatgtgccagctctgcccctcgccttacatcctaaccttatctttcctccaagaacgggtaacccctcgtcccactggggtacccactacttagctaagagttacaggccacccaaccgaggtcacacagcacaaaccctgcagaattaaagaaaggtgcaggctgggctctgctgggtctccaagctgtgctgcctctgtctatcccctccgtcctcccattgggctgtggtggctgcttatacctgcctatcagatgcacaacatgctggtggaacagcagctgcacttagacatggtccctaaaagggtcctctgggttctttatttcactgaccaccatatttgtgtctgaccctggcctagacatgggacccttgggtgtgtgagaacaggtgtgtgcctgagactcctgacgtggaaggcagggaaggctgcccttccgttctgctgggccatggcagctttgatgtgggtcttcatgcatgactggacttaagggggacacgaggaagaagagcatggaagagacagcgaccctgatgaggaagggacgcacaagacagttttggcaaattgccctaagacagttttttgggtttctggtgtctgggtgggaatccggcctgccccaggctttgtgctgcctgcctctcttgtgtttgtggtagggcctgcaccttgaggagtgcagaacactggtgggcatcctggggtctgacatggtaaggtgggtcatgcagggcgggtccaaagtcaagccctctagggagaatggcttgctttcttcatctgggtggagcctgtccctcagcactgagggagaactgagtttgctgttgtggagtggcctgggtgacaccttgaacattgctgtggcacaaggacatgaggatgggatttcctttcctttcctttcctttcctttcctttcctttcctttcctttcctttcctttcctttcctttcctttcctttcctttcctttcctttcctttccttcttttttctttgtctttttccaagacagggtttctctgtgtagccctggctgtcctggaactcactctgtagaccagattggccttgaactcagaaatccacctgcctctgcctcccaagtgctgggattaaaggcgtgtgccaccactgcctagcgatgaggggatttctaaaagtcataattataggtaagaattactgttttgaccacccgcccacccttacttctagagattgaacccagagcttgctcaggtgacccgaatggcccatgttttctaaatctgtggctggggcagagggagggaggtgccaactggagatgttttactgtgacgccgagtagctgaaaccatgaaatctggtttatctaagtcatgactggccaattgaatccgaacaggagagggaagaagccgtagggtccccccactgtgaggtgttccagtctgctttagatcttcgaggaaccgtggcctggctagttctgtggtcctctctctggacattatttaataagtgttaggaaagggcacattacctccgtgtgtggtcacaggtgacagaggcagatttccctttctcatctgggtccttatacctagcggcgtgtccccagacacggtcaggctgttgtctgcagtcccaatgtgcatgggtccatggttctggccttctgagttttgaattcagacagtcggtagggacactgacatctcagatgtagcttgattggtacagaacagggtgtctgatgatagcttccctgagtctgggtgccactgcccttcttgtcacgtctccctggcaggtgcgggtagggagaggtgcatgtgacttgtgacgctcctacggggccctggataataagaccatctgtattttatcgttcttgtagaaggggtcagaggactccagtcttctccaaggagattaatgcaaaactgaacttactgtctgcagaaaccggcagatgggatcggttcataaaactggacattaattattgcctttcttaataaggtgatgacccgctgatggggtgaagcttgccccaccgggtaggtgtatgtatgtatgtgtcggtgactcagggtgagtttagtctggacttagttaatttagacttggtctctttgctctgaattttcttgggtttttatcaactagctcatttattctgtatttaatcataaaagagaccatcgattgatggcctgtggtatgccatgggcttttttttttttaattgtgttttgagacagggtctcatgtagcccaggttagccttgaacttgctgcttccatctccttagtgctgggtgtgtgttcccatacccagtttttgtggcgccgggaatcaaactcagggtcttctgcatgctagacaaacaatattcccagcccctagagaaaggaatgtcacaatagttcaaagataggatctaaaatacctttttttaaaaattgtgggtaaaatatatgtaagatttacaattttgatagatggtcactactttgctgctgccgttgccaccaccgccaccaccaccaccaccgctagagccttcatcttgctaggctatcactaagctacaaccgtagccttgatttgaaccatttttaagtatgtgctactatgtagccttcacctccttacatctctggaactgtctcctctcaaacaacctggtctctcattgaacaatagctccacctctcccctcccagctcctggaacccaccattccaccagctgtctctttgattgacacagggactttgtatggaatgcagtgtactgcatccgtgtgtgtgtgtgtgtgtgtgtgtgtgtgtgtgtgtatttggctcattcatggtgtagcaggtgtgaaattgtctttccatattaggactgcgtgctagtcccttgtgcgggtggcttgtgtttgctctttttgctcttccattcatccatcagtgggcacctgggcagcttctgtcgttgcctgttgtcaaccctacagatgtgtgtacatccactcaagggccggattttagttcttttgggtgtgtacccagatctcgggatcgtaagtgactctgtgcttattgtttattattgttgttgttattatttattattattaactaannnnnnnnnnnnnnnnnnnnnnnnnnnnnnnnnnnnnnnnnnnnnnnnnnnnnnnnnnnnnnnnnnnnnnnnnnnnnnnnnnnnnnnnnnnnnnnnnnnnnnnnnnnnnnnnnnnnnnnnnnnnnnnnnnnnnnnnnnnnnnnnnnnnnnnnnnnnnnnnnnnnnnnnnnnnnnnnnnnnnnnnnnnnnnnnnnnnnnnnnnnnnnnnnnnnnnnnnnnnnnnnnnnnnnnnnnnnnnnnnnnnnnnnnnnnnnnnnnnnnnnnnnnnnnnnnnnnnnnnnnnnnnnnnnnnnnnnnnnnnnnnnnnnnnnnnnnnnnnnnnnnnnnnnnnnnnnnnnnnnnnnnnnnnnnnnnnnnnnnnnnnnnnnnnnnnnnnnnnnnnnnnnnnnnnnnnnnnnnnnnnnnnnnnnnnnnnnnnnnnnnnnnnnnnnnnnnnnnnnnnnnnnnnnnnnnnnnnnnnnnnnnnnnnnnnnnnnnnnnnnnnnnnnnnnnnnnnnnnnnnnnnnnnnnnnnnnnnnnnnnnnnnnnnnnnnnnnnnnnnnnnnnnnnnnnnnnnnnnnnnnnnnnnnnnnnnnnnnnnnnnnnnnnnnnnnnnnnnnnnnnnnnnnnnnnnnnnnnnnnnnnnnnnnnnnnnnnnnnnnnnnnnnnnnnnnnnnnnnnnnnnnnnnnnnnnnnnnnnnnnnnnnnnnnnnnnnnnnnnnnnnnnnnnnnnnnnnnnnnnnnnnnnnnnnnnnnnnnnnnnnnnnnnnnnnnnnnnnnnnnnnnnnnnnnnnnnnnnnnnnnnnnnnnnnnnnnnnnnnnnnnnnnnnnnnnnnnnnnnnnnnnnnnnnnnnnnnnnnnnnnnnnnnnnnnnnnnnnnnnnnnnnnnnnnnnnnnnnnnnnnnnnnnnnnnnnnnnnnnnnnnnnnnnnnnnnnnnnnnnnnnnnnnnnnnnnnnnnnnnnnnnnnnnnnnnnnnnnnnnnnnnnnnnnnnnnnnnnnnnnnnnnnnnnnnnnnnnnnnnnnnnnnnnnnnnnnnnnnnnnnnnnnnnnnnnnnnnnnnnnnnnnnnnnnnnnnnnnnnnnnnnnnnnnnnnnnnnnnnnnnnnnnnnnnnnnnnnnnnnnnnnnnnnnnnnnnnnnnnnnnnnnnnnnnnnnnnnnnnnnnnnnnnnnnnnnnnnnnnnnnnnnnnnnnnnnnnnnnnnnnnnnnnnnnnnnnnnnnnnnnnnnnnnnnnnnnnnnnnnnnnnnnnnnnnnnnnnnnnnnnnnnnnnnnnnnnnnnnnnnnnnnnnnnnnnnnnnnnnnnnnnnnnnnnnnnnnnnnnnnnnnnnnnnnnnnnnnnnnnnnnnnnnnnnnnnnnnnnnnnnnnnnnnnnnnnnnnnnnnnnnnnnnnnnnnnnnnnnnnnnnnnnnnnnnnnnnnnnnnnnnnnnnnnnnnnnnnnnnnnnnnnnnnnnnnnnnnnnnnnnnnnnnnnnnnnnnnnnnnnnnnnnnnnnnnnnnnnnnnnnnnnnnnnnnnnnnnnnnnnnnnnnnnnnnnnnnnnnnnnnnnnnaatagaagctaaaaatagctggacacacatttgcctataatctatttttttttaagaaaacataattatttttgtaaaccagctctgagaaaacaggagtatttttagcctgtgtcttctaggatactggacgtcatcctaggaagagcatgtcagagcccaccagagtgtggtaatgtcagcatgtcgggcagtgacccctggggaaacagggtttgaggagccccgtcctcagccctcctttgctgagagaatggttctcgagagtcagactgtggcttctatggctgatggcggctggggacatcctggtttcacctggacaggtagctgtggcactggccaattggtagctggctaagctcgggtttgggcaagggagagcttgtggtgagactagcctggcctgctacctcagcagacctgcaggagagatgagggcttgagggaaaagtgttccaagccttcttatggggagccaaacattgcctcatgtaatctccccgtttttcccactgcctctgccagggtcaatgggcctggcacaatgtctgtaataaagagctctgtgtgtgtgtgtgtgtgtgtgtgtgtgtgtgtgtgtgtgtgtgtgtttgaatctctgtgtgcctgttaacgcgtgtttatgttggtgtttgttgtttgtaggtatactttgagagtatgctcttaggagatagcacctactgaggcccctcctacctttctgtctggtactggatgtctttggtacaggcgtgtaccgacatggccgggcttagcattgcagcctgctgtgaccttggtgtgagtgtgtctctgaagatagattttcttccccgtgcttgctggggaactcactgtaccgaggccaagacatcatggtcagttcagagtgtggccacccatgagcatgcatagggagaccaaaggctttgaagtggatgttgggttctcaccctggctgtgacgagctgtgattgcgggtgggtgagccaggctgtttcctcatctgaaacgtaggaacagtgccaaccaagtgttccagtcaggcacgacaataggacacatgcttaccacgggttttacgctggcactcctagcctgtctctgagaggaaggcagtgccatcattcccactttacagatggggagactgaggcacagagactccagaaatgttcccgttgagtctttcccagttgtgatacactccctgcctcaagcagcagccggctttgtgtcactgttacattttattgttgttataactgtaattatcatacccaagatcgttacggcagccgtttcctgggtggagatattcctctcgctgccccagccaaccttgacttctagccatgttcttcctttctgggcatctcgtctttcatccacggactccttctgctgttgttcccgacgcatgttcatttgaggtctccgtctttctgctctaattgagataatgaacacagtcctccacccccagaatgggagcagaaagtcaagtgcaaagtgacggttgccatttgctgacctcccctttctttctctcttagtacgcgtctctttacgaagggattggctggatgcaaacagctcataacctatggatttatggagacagcgagagctggctttataagctcggatacctgcagtcagcgtcctgtctctttaagccgaggctccgacttgccgtggtattttacagtgcctggtttcatttatgctggagccagacttactatgtgagcgtcgtccgcatgctggaattagtcttaagcttgcttctgtggcgttgccaaattccatgtttgtgttttatttagaattcttttcacggccagccgattctgtgccggcacacacaggcactgttgcgccccatggagaaaataagcaagcttgcgttttctttggcagaggccgcggccacaatagactgtggtctctgaaacattttttaaaagctattttaacccataacagatgcataaagtcggctcaggcatgccagttttcttagttttaattaaaaaataattacagtctaatgggatgttagtgacacatttggatgaatggtcggtgacattatctgcaacttataaattagtgcctctcccttggctggggcagggctggggaagatttggggaggtacatttgcatatctgttcttaattgcagggtgggagatgggagagtagcatcccctgggttggagacttaggggcagggacagagaccttggtcagtggctctgaaacccagcatgtgtgacacaggcatctggtaatattcttcaagctccatctgacagaactcacctgcaaagtcctcacatatggnnnnnnnnnnnnnnnnnnnnnnnnnnnnnnnnnnnnnnnnnnnnnnnnnnnnnnnnnnnnnnnnnnnnnnnnnnnnnnnnnnnnnnnnnnnnnnnnnnnnnnnnnnnnnnnnnnnnnnnnnnnnnnnnnnnnnnnnnnnnnnnnnnnnnnnnnnnnnnnnnnnnnnnnnnnnnnnnnnnnnnnnnnnnnnnnnnnnnnnnnnnnnnnnnnnnnnnnnnnnnnnnnnnnnnnnnnnnnnnnnnnnnnnnnnnnnnnnngctcagcctctctgtgggtgctgttcctgcttatcctgccctcctggatggaacagttcccggcagctacagtgtgtagcttgtctctctccagtagttgtggggagctgtgtcatcctaccctgggagatcaggaaggttccctttatctgtgcctttgtgcctggccctgtaggctgcttctttggcgacaattccaggggcccctgtgcttcattaccaggcttctttcataggtaccacccgatgtgttctaaggggggggggggcaggacttgccccaggccactgggctgagccaggacctgcctgcctgacctaactcctcactttcccattgaaaactgcacggagccacaccctgtggctcccaacaaggtcgagaagactggctcggagtctttatttttactttccgggtggtggaggggggcgtggtgttagtgtcgctggtggctcttcctgttgtccggggtctaaaatgagtgtttcttagacaatgttttcccgagcccaaattcctcccgagtaaaattaagttcttctattaaaagcgtgagtcacaccagcccagatgagagtggttttgacgttcctcgaatttttttggaagggaaacatcacattcatgctaatccttgcaattaaacctcatcgctgggtaatccgccagacgcttggtaacctagccctctgccgtccgtccgcgtacggtgcctttctctcctttgctgttgcctgcccagagtttcttcctctgttctgggctcatcagattccccgagcatggtcttgggtatctaattgccacagatgattaatgtgtggttgataaggctccatgtctggctgttcatatgaattctaaggagatgggagttcatttctgtctctgaactgggtgtttgctcccccactaggggttttctgctcagatcggggtggaccccaggcatccctgacgatcaagagaagacagaagggtgtcactgggggtgggtttggacccgctttggggaaatgtagccaggctggtaaggaattggataatactgtagccatgatatcaactttcctgagctgtgtgtttctcttactgtgacctctcaggtttatgctcagctactgctaaaggtctcactgactctgggtcctttccttgcgagttcctgttactgccaatgagatctattccgtcagcctgaggaccaacctgggtgttcctggttcctatgtgtctaggtcgatgtttggctgcagtggactgtccctggttgcttctcaagcccaggtcaaagcagaaacccagtgtgacagacagcccaggtcagatgcagtggggaggctgtttctacggtgttggcttcctgttctagtcctggaacaaaggttggcatagttgaggaatcctggcccctggaaacatggcagctgtcaaatgaaccggagttgtgtctccacagctttgggtgcagtctttgagttctggagactagggggacgtcttgattttatgtctcttttctcagagagctgctgcagctcacctgctgctcctgtgaagccttgggtaggaggttctggtgtctgacacctaggggagacaagtcaggggtggagagggtgagtgtagaagccggtgactgcgatggatgggaaaggctttgggtttggaatgggatagagtgtggtttctgagtttggaataacacttctcattgggatgtggggagcggggtgggcagggattcgagttcatttacttgtattaaaggctgaggcttcctcttttcacgagtaagaagcaaaagcccgagaaagtgatgagaaacagcccggaaaggcagttcgtttactcattaaatcttctataaaataaataaggatttagcatgaagggcccagctgcagggtgtcctggagggaggaggggacaagtccgacatgaacctcactatgggaatggaccagtaggcccggactgtgtgcttctgctccagaggccaggtcttagtcctggaagtaagaacaaatgggtatgagtgtccaggaggggtgtgtgcacacatacacgtgtgaaagcttgcgggtacattagcagtttacatgtgaacatataacatgtgaacatgagtagacatgcttttatatgtacggacatgaataagcaggcatgtacacgtgagcacacgtatggaaacgtgttggtacatgggtgcgcaagtgcggttatgtgcatgtacatgcaggtatagatgtatacatgtgttcctgttcatttgttaatgtgtgtacatgtaggtgtaggtgcatgtatgtgctcatatgcacatgtgtttgtacacacacacacacgcacacacacacacacatacacacacacacacacacggtgtgcacatgtgcagtcaaatgcaagtgaggtctatgtgtttgcatgtcttcatgtacaatatgtacgtgcacgtgtgtgtgtgtgtgtgtgtgtgtgtgtgtgtgtgtgtgagagagagagagagagagagagagagagagagagagagagagagagagggaggaatgtctccacttacctctgaggacctgtttgaggtcagctgctgtggcacttaaagaggggatccagagtcagaaatgcagagagtcagaaagaagtgaggtgtaggaacagcacccgaatgcacaaccctgctgtggctcagtggagttcagctgtgggctcgggtgggtgtccacccctgatgctctcacgcccgaggcagagtggagtcgggagaacaagatgagccttggtccgacctggctctgcccctttatagatgggcgactcttcactttcatgttccagcctcagtttccttttctgcttcaagaagatggccatgttaccatcagcctacatacagtgctcagggtagggctgacatatgacaggttccagcaaggcaggttatgactgactttgttgtttggcaaatgtatgcggggtgaaggtgtctcctgaaggtgtctcatccatgacaacctgacaggcctgcagcaaccctgaagccgaggcaggatgggatagccgggaccctgggcttggctatgtctggaaacctttttgttaatggcgttcttgtgccccagtggtaaggccgaccctccctctctccatctggccagagcgaggccctcgctaagctgcttcttagtattgtcgggttctctccaaaccagagcagggagggtccccgtcatggttgacttggggaggtaggcttctccatcctcagctcaagctgctcggcctcatttggaagcctcttagacccggacaaagctgggcgacgtgcaggaaggtggatggatggactacgagacctggaaatggtttctccctggagaagacgtggacagtaagcatgcctgccgacaagaagtctagaaaagctgcatgcttgccccagcagttgggtgtctagtcaacccgccctccgctgttggtggtttcaggcattcttttggaacagcgcaacagccttcctgtttttacagtcctggctttgtctctttctttctcttgaaaggagcagggtgctgttatcatggggtgtatttgggcatggtaagcatagaacatttgtgtctgagtggctccttgtaccaagacaggcattactaggtgatcacacggtccctgacctggataactcaagatgagaagcaagcagtcagtagtaattgatcatcctggccaggagttgaagcctgtcttctgtactggcagggctttcctgaatggagggagaggctcattagataatggcttccctggtgagagcctgtgtgtgctggagtcagactgccccccctccccccagccttgcgtagatcatagaaaggaaggttttgacctgaggtcccaccttggatcaggcagcatggtggatcagccagtaccaccttagggatctcatatttcacagtgctagggatgtcagggtcccctccaggtggctcttggctgcttcggaagtaggcgttgtctcatcgaggctgtcttgccccagcctgggaacaggcggccaggcatcttgctgagatggtggtctggcatagtgcctgttcttcccttgggggtcccacgtgttcccgggtgctctgttggaatgacatccagggtagggcctatcctcatactggcctaaccctggctgtgccttgttctgtcacatggcctctgtggtctctgtgggtttccaccccagggccatggcctgttctccagtcacccaagaattctctgctgatgtcagcagaggctgtgtgtcaacaaggagtcttagggtccactaggaatgtgagttgagagagggagagagagggagggagggagggagagagatgggggagagaactgggaacctccttcttcctctggtacgtccatcatttcggttcaccccttctcttcaggtcctgctgaggtgaaggctacttctgtcttagagatggataaaaatagaggcttagaaggccacggccctcccgagtgggccagcgctgtaatgcctggcctattctctctggccagctttgccatacagtgtctcctctgacagggcatatcagagtgtcttcactctgccctgtgtcccagcagtacctacaatacccttgtcctttgggggtttcagtccctgtgtctgtcctggctgcagtctatcttctgtgtatgtatgtatgtggctgtctgtgagttcatcttctgagggccagggaccttgatctctgtgtctctgacatcaacattgttcctgggtcaccaaaggactgagttcttcctgctggttggtggataacaaagaagctatttgattggtgctttggggctgggctttcagcctctttggacaaagatggaggattggtggggctcctcactgaggtatataggttccaggggccagctcagtaccccacaagtctaggcaggatgctggtgatggcttgtgtggataagtacctgttctttgctgggtgtagcgtcccattacccctacctgctcttaaagctgtggagtcgctgtggaggccaggactctggccctccattctccaagccactcttctggtagactttacagctggccctttggaatcccatcagctgttattggatggctgagctctgctctttggcgctccttgttaagccacatgctgtccagcaggcccaggtccttgctcctgcttcaccttgggaaagcaccgctgagcagccccagcacaccccaggacctctctgatcaccttatatggaagagtgctgggtgctctcatgcttgcacatgcttctgcatcatctcctgtccctgtctctcgggataagccttggtggtaaaggccagtgaggagccgagtgatggagagccatctttagaaccttcttgcccagaagtaagaaagactctgggagcaatgagaatgaagagttcaaagctcccctaattctgtgtaggattctaagtctagaagaatcggccaggcaaagattgtgtggaaggaaagaatgaagggcccttgtctgggtgaactcacatagtgagtgtgctgagatttagcctggtatggggaggcctaagagccggggcagccattctgttctgttctgtgaattacttctgtagccgagctgtggtggcgctcacctttaatcccagcacttgggaggcagaggcaggcggatttctgagtttgaggccagcctggtctacagagtgagttccaggacagccagggctacacagagaaaccctgtcttgaaaaacaaacaaacaaacaaacaaacaaacaaacaaacacaaaagatttacttctgtaataagtggaatagaagtttcatgctttatgaagcatcaaatgataggaaagaatgggttagaagacatgacagggggagggggatttgttgtcaggcttcataacgagagtgagaggggaaggggctaggagtaggaccagaatgtattatatgtgtgtatgaaattattgaaatatagattagttattttaagaaggggaaagaggtaggagatggctcggtgtttaagagcactagttgctctttcagaggacccgggttagattcctagcactcacatggcaactcacaatcgtctataacccctgttccaggggatccagtgccctcttctggcctccactggcccagagcacatgccgtgctcagacatacacccaggcaaaacacccgtacctataaaatcataatagatcttaacatggaaatcagaggttgatagggtatggcttagtcaataaagtgtttgtagcactggagcacagacttgagttctatccccaggacctgtgtaagtatcaggcccagcgagcagatcgctcttcccaatgctgcagagctggagacctgatcattgggatgggttgaccagatagcctcctgaacccgtgctccagctccatcgagaggcatcacacacacaccacacacacacacacacacctcttccttgacagcagttgaaatacaccctgaagtagaggctgtggctctcttgacccacaccttgagcctcctgcttctttgagggggtgtgggaatgtctgggggctgggggttagtgagacaaccgatcctgggtgtcactagctgaaccccattggctcaggtgtcccttccctaggtctcaccctttctggtgaatgccagcaggccctcactgtcttccctcaggatcctctgtatagggctgccctggcatttgtcactggtgtctgggatctgagctgctctgggagtagaggggaaagccggagggcctgaggaccagtgtttcctttgcttcaggggagtccgactgtagggcaggaagctgctggccgtcttccttcctaattcccatatttccaccttcctgccctcactcgatggctggaagaagtgcagccatgtccagcatccctgagagttggcgccattcctcctagggatggggagccttgagcttggggagcctacccaggaaagccaggcaggcaggcaggaaggccttcaccccgctgtttcttctccctaggtgctgctatggccagcccggctgtcagctgcacttgactgaagtacagccattgggtggaacgcagactttaaatgtacagaccagtccaatcttttaccattgcaaaatgacattctgtcacgcaaagctttcccaggagttgcaaactgagttatatgaaaaaccacactcacaaaaatctcatgagtttgtttgtttgtttgttttgtcttgttcgttgttggtttttgtgtgtgtgtgttttggagacagggtttctctatgtagccctggctacactatgtagctagggactcactatgtagatcaggctggccttgaactcagagatccatctgtctctgcctcccaagtgctgggattaaaggcatgcatcgccatgccctgcagaagtcttagaatactttaagttcagaatgctttgggttgggtggcattcataactaactacccttggtcctgtgctgtccaagggccttgggttgcatatacctgctagaagtgggatccctaaagagaaggcgactcagtcactgggggtcccaggaagttggttgttaggggctgagaacctccggacaccctgctttgaagaactagcccaggataaagcacagtcacagctagcttcgtggctccctgggccaccagcaaggtccttggaggctttctggattacctggggtctgctctgtccctgccccaagagaagaagctgggaagcaatcagaatggtacctgcctgcagcggtcatgtgaccaggcccgtgggcaggtgatctgcggcctagcacacctgtcccaacgtgctctcaacgagggcagaggctacagcacactgaccacacgcagtgggcttcatctgggcttcggacctggaaactgtgcttgtcttccgtggccgtaggtggctaggttttcggggtcctcacggctttgacattttgaatgtgagatgctggcattcttccgtagtcatcctcggggacccgttgaacctcagttctgtttaaagtgttcctttaggtctccgcctgtgtgtggcagaaaaagagaaagcttctagactcttgtcaagttctgggcctccctggcagctaagggatttattcaaccgtctgtgggctcggcagctggtggtgggtcactgtgttatgctagcagagagtcccaggagcactgtgtgggactgtgcattctatgtggatgcgccgagttccgaggtcccccttttttgagtcttccctctggttagcccacctcactcacagctattgggttttgcagacaggatgagctcagatgtggccagccagagggggaggtgatggtcacaggatttccagactcgctgccatctcccttcatttcagaaccccttaccctttccatctgtagaggtgaggaacgggaggcactaaggctttctggatgctgctgacatccaggggtttgacgtgctcaagtaggattagttacacggcaggtagagcctgcttccttccttgccccatagctctctatcttttcctatctcaatgtcttacaggtgccttgtttggggggtgttccctttcctaatgtcccccacccaattcattacccgatccaaagatgcagtcagcaggcatttgtgcagtagccaacatcaaacaagcaccggatgagtggatgaactgctgtgtcagggtcttctcctgcatcccccagtgtccagggcagagccggtgcctgggaaactcttgctcaatgaatgcgccagcaaagaacccatcttccccgccttggtcctcgggattccagggtgcacgccctcttccattaacctcattgacccaaacgttgagaaaggaaacccatggacgctgcagtctcttctcatcctagacccacattatcagctgccggaaaagcatctgtgagatgcagggaggtctcatgctgggagcttctctctctgtcgaggctgagcctgtgccctctaaggccgcagacacaagaacagagcctgtggagaccggggagtggttcgtgagataaggcatggctgggcccagcctcataccgtccctggcctagtaggggcttgaagaggctgtcatttattctgtcagagtggcgcaggcattggccagtgagggtagaggtgatcaggagtgggccctgcctgggaacagtgcctcaggagctgccctttccctagagcccttgagtgggaggtgctggcttgctggtgccttagaggctctggcctgccttcttccctaagcagagcccaggcccaacactgagacgcaggcttgtcatgcctagctctagacttatggttgtcaggctcagttgccctgtgcccataagtgttgatagacttgggttccagtagcttagaggcaacctctcccttctcctcaggccccttgagctacatgggcctggaagagactggcccttgcccttctgcctagtgaacccctagccttcccctggtgccctcttaggctctcttctaggatggagctacttattggtgtcttcctggtgcaggcctaggcttgtcctcttctctatcctgaggtatgtgttgggtagatctctaaattaccacccatagctttctctgatggaaactccggcaggtggtcagtggagacgggagactactgcccctcctttctagatgagtttaccacagagggaaaaataacaatagtagtctccccccaagttccctccttgatgaaaggggatcgatcacaaggaggtatggtttgtctctgtcagccagaccatggttgctgtcccctaggagagacacatctctgggtgtgcctgagagtgttttcagagagggttcagttaggaggtcagacctatctagaatttggcagcactgttctgtgggctaggacttgggagtgaatgaaacaggggaaaggtgctaagagccacactcatctctgcttcctgactgtgatagcatcatgtttttctaccatggcggactgaatgcctttgaccgagagccaaaataaactcctgtagctttacttcagtgagtaaaggatctcatgggaggccaagcaaggagctctggggtgtgtgtgtgtgtgtgtgtgtgtgtgtgtgtgtgtgtgtgtgtgagagagagagagagagagagagaagagagagagagaatatgtgaggccaccgcttctccctggcacccgctggggtcctttgtccatgtgtaggtcctggtgggcagggggcactgtgctgtgccgagcagcagcctggatgtcatcaggaggtctgtggagagtcagagcctcacagtgacggggacagagacctctcccactccacaaagcaccgtggaggagatgccagagcacagagttcaagggaggggagtcctgagacccatcatcaacagcgatgctcttacttctgattctcatacttccggtgccttggacagaacgcagaggggagggtccagccagccaccggcaccatctaaaggcaaacacattgatctagagcggtggttctcaacctgtgggtcgtgacctcacccccccagtcttatatcagatatttacattatgattcataattaccaaaattatagttatgaagtaacaacaaaataatattatggtnnnnnnnnnnnnnnnnnnnnnnnnnnnnnnnnnnnnnnnnnnnnnnnnnnnnnnnnnnnnnnnnnnnnnnnnnnnnnnnnnnnnnnnnnnnnnnnnnnnnnnnnnnnnnnnnnnnnnnnnnnnnnnnnnnnnnnnnnnnnnnnnnnnnnnnnnnnnnnnnnnnnnnnnnnnnnnnnnnnnnnnnnnnnnnnnnnnnnnnnnnnnnnnnnnnnnnnnnnnnnnnnnnnnnnnnnnnnnnnnnnnnnnnnnnnnnnnnnnnnnnnnnnnnnnnnnnnnnnnnnnnnnnnnnnnnnnnnnnnnnnnnnnnnnnnnnnnnnnnnnnnnnnnnnnnnnnnnnnnnnnnnnnnnnnnnnnnnnnnnnnnnnnnnnnnnnnnnnnnnnnnnnnnnnnnnnnnnnnnnnnnnnnnnnnnnnnnnnnnnnnnnnnnnnnnnnnnnnnnnnnnnnnnnnnnnnnnnnnnnnnnnnnnnnnnnnnnnnnnnnnnnnnnnnnnnnnnnnnnnnnnnnnnnnnnnnnnnnnnnnnnnnnnnnnnnnnnnnnnnnnnnnnnnnnnnnnnnnnnnnnnnnnnnnnnnnnnnnnnnnnnnnnnnnnnnnnnnnnnnnnnnnnnnnnnnnnnnnnnnnnnnnnnnnnnnnnnnnnnnnnnnnnnnnnnnnnnnnnnnnnnnnnnnnnnnnnnnnnnnnnnnnnnnnnnnnnnnnnnnnnnnnnnnnnnnnnnnnnnnnnnnnnnnnnnnnnnnnnnnnnnnnnnnnnnnnnnnnnnnnnnnnnnnnnnnnnnnnnnnnnnnnnnnnnnnnnnnnnnnnnnnnnnnnnnnnnnnnnnnnnnnnnnnnnnnnnnnnnnnnnnnnnnnnnnnnnnnnnnnnnnnnnnnnnnnnnnnnnnnnnnnnnnnnnnnnnnnnnnnnnnnnnnnnnnnnnnnnnnnnnnnnnnnnnnnnnnnnnnnnnnnnnnnnnnnnnnnnnnnnnnnnnnnnnnnnnnnnnnnnnnnnnnnnnnnnnnnnnnnnnnnnnnnnnnnnnnnnnnnnnnnnnnnnnnnnnnnnnnnnnnnnnnnnnnnnnnnnnnnnnnnnnnnnnnnnnnnnnnnnnnnnnnnnnnnnnnnnnnnnnnnnnnnnnnnnnnnnnnnnnnnnnnnnnnnnnnnnnnnnnnnnnnnnnnnnnnnnnnnnnnnnnnnnnnnnnnnnnnnnnnnnnnnnnnnnnnnnnnnnnnnnnnnnnnnnnnnnnnnnnnnnnnnnnnnnnnnnnnnnnnnnnnnnnnnnnnnnnnnnnnnnnnnnnnnnnnnnnnnnnnnnnnnnnnnnnnnnnnnnnnnnnnnnnnnnnnnnnnnnnnnnnnnnnnnnnnnnnnnnnnnnnnnnnnnnnnnnnnnnnnnnnnnnnnnnnnnnnnnnnnnnnnnnnnnnnnnnnnnnnnnnnnnnnnnnnnnnnnnnnnnnnnnnnnnnnnnnnnnnnnnnnnnnnnnnnnnnnnnnnnnnnnnnnnnnnnnnnnnnnnnnnnnnnnnnnnnnnnnnnnnnnnnnnnnnnnnnnnnnnnnnnnnnnnnnnnnnnnnnnnnnnnnnnnnnnnnnnnnnnnnnnnnnnnnnnnnnnnnnnnnnnnnnnnnnnnnnnnnnnnnnnnnnnnnnnnnnnnnnnnnnnnnnnnnnnnnnnnnnnnnnnnnnnnnnnnnnnnnnnnnnnnnnnnnnnnnnnnnnnnnnnnnnnnnnnnnnnnnnnnnnnnnnnnnnnnnnnnnnnnnnnnnnnnnnnnnnnnnnnnnnnnnnnnnnnnnnnnnnnnnnnnnnnnnnnnnnnnnnnnnnnnnnnnnnnnnnnnnnnnnnnnnnnnnnnnnnnnnnnnnnnnnnnnnnnnnnnnnnnnnnnnnnnnnnnnnnnnnnnnnnnnnnnnnnnnnnnnnnnnnnnnnnnnnnnnnnnnnnnnnnnnnnnnnnnnnnnnnnnnnnnnnnnnnnnnnnnnnnnnnnnnnnnnnnnnnnnnnnnnnnnnnnnnnnnnnnnnnnnnnnnnnnnnnnnnnnnnnnnnnnnnnnnnnnnnnnnnnnnnnnnnnnnnnnnnnnnnnnnnnnnnnnnnnnnnnnnnnnnnnnnnnnnnnnnnnnnnnnnnnnnnnnnnnnnnnnnnnnnnnnnnnnnnnnnnnnnnnnnnnnnnnnnnnnnnnnnnnnnnnnnnnnnnnnnnnnnnnnnnnnnnnnnnnnnnnnnnnnnnnnnnnnnnnnnnnnnnnnnnnnnnnnnnnnnnnnnnnnnnnnnnnnnnnnnnnnnnnnnnnnnnnnnnnnnnnnnnnnnnnnnnnnnnnnnnnnnnnnnnnnnnnnnnnnnnnnnnnnnnnnnnnnnnnnnnnnnnnnnnnnnnnnnnnnnnnnnnnnnnnnnnnnnnnnnnnnnnnnnnnnnnnnnnnnnnnnnnnnnnnnnnnnnnnnnnnnnnnnnnnnnnnnnnnnnnnnnnnnnnnnnnnnnnnnnnnnnnnnnnnnnnnnnnnnnnnnnnnnnnnnnnnnnnnnnnnnnnnnnnnnnnnnnnnnnnnnnnnnnnnnnnnnnnnnnnnnnnnnnnnnnnnnnnnnnnnnnnnnnnnnnnnnnnnnnnnnnnnnnnnnnnnnnnnnnnnnnnnnnnnnnnnnnnnnnnnnnnnnnnnnnnnnnnnnnnnnnnnnnnnnnnnnnnnnnnnnnnnnnnnnnnnnnnnnnnnnnnnnnnnnnnnnnnnnnnnnnnnnnnnnnnnnnnnnnnnnnnnnnnnnnnnnnnnnnnnnnnnnnnnnnnnnnnnnnnnnnnnnnnnnnnnnnnnnnnnnnnnnnnnnnnnnnnnnnnnnnnnnnnnnnnnnnnnnnnnnnnnnnnnnnnnnnnnnnnnnnnnnnnnnnnnnnnnnnnnnnnnnnnnnnnnnnnnnnnnnnnnnnnnnnnnnnnnnnnnnnnnnnnnnnnnnnnnnnnnnnnnnnnnnnnnnnnnnnnnnnnnnnnnnnnnnnnnnnnnnnnnnnnnnnnnnnnnnnnnnnnnnnnnnnnnnnnnnnnnnnnnnnnnnnnnnnnnnnnnnnnnnnnnnnnnnnnnnnnnnnnnnnnnnnnnnnnnnnnnnnnnnnnnnnnnnnnnnnnnnnnnnnnnnnnnnnnnnnnnnnnnnnnnnnnnnnnnnnnnnnnnnnnnnnnnnnnnnnnnnnnnnnnnnnnnnnnnnnnnnnnnnnnnnnnnnnnnnnnnnnnnnnnnnnnnnnnnnnnnnnnnnnnnnnnnnnnnnnnnnnnnnnnnnnnnnnnnnnnnnnnnnnnnnnnnnnnnnnnnnnnnnnnnnnnnnnnnnnnnnnnnnnnnnnnnnnnnnnnnnnnnnnnnnnnnnnnnnnnnnnnnnnnnnnnnnnnnnnnnnnnnnnnnnnnnnnnnnnnnnnnnnnnnnnnnnnnnnnnnnnnnnnnnnnnnnnnnnnnnnnnnnnnacattacacaccaattaaaaatggcgataccacaggcatttccagggatagaggaagtgccaagagggacaaggatgaattcagagtctgcgacatgacggtgtagctggtataggtctgagaaaaaaaatggcggcttcctgttctaacagcactcacactagtatttgtttacattttctctcggatccttgtctatagcttttgcacgtcaagacacactcgtcctttgagaaacagaaaactcagtgacccccccccccccatccccaaagttccagtgacttttgctgatgggaaaagaaagtttcaggctgggcaccctgtgccagcagcctgtgccaaggctgtggtttcattagctcttgcctccctcttcccagaaaaccattccgcccttagatgtaatgggatgtgctcaagatatcagtgtcttggctgtgattgatcgattcccaacacagttccacacccctgtgtcctgggaggcaccttctgcttactggtgttatttcgtgccctgctgggggctccagatggggaggcaggaccctcagacccaacctatcccagggtgggggacgtgactgtctaggtgaggctgggtctcttcatgctgctggtaaattgatgacttcctattctcctccaccaaactgttccccagcccctggctgtggtcactgacacccagatagatgtggtaacaatcctattccgtgtgtggggctgggtgggggtgagagcggctgggcctctctgtgttaccagaagaagctcactagatatgcaggtgatcctccccccccctcccccccgcgaggtcttcatttccttctggaatgcccctcgacacctcctgacacacagaggggctagagtcttgtcacataaagaaaaaaaattactttatttccaattttccatctcacacactcactcattttctttattaggtgcactatggatattagagagagagaaaatgacatttctgccgtgaattcaaagcgcgggcccctgctttgcatagtagcttatactgattggcaggaggggcccctgggtctggagccttcagggtgctgcttggtccatgcctgggtaccctgatgctgtgtgttctctgcccaggaacccatttcttcccacgtaaccgctcctcgctcggttctgtcgnnnnnnnnnnnnnnnnnnnnnnnnnnnnnnnnnnnnnnnnnnnnnnnnnnnnnnnnnnnnnnnnnnnnnnnnnnnnnnnnnnnnnnnnnnnnnnnnnnnnnnnnnnnnnnnnnnnnnnnnnnnnnnnnnnnnnnnnnnnnnnnnnnnatggtaggatctgttctctaaggggtggggactgaacacctccaaaacacccggcaagtgaggtaccaaagtaggtgtctcgtctcctccatccagagaagcctcgtgatcttttagagttgcaggtgtgcactctggccatcttcagggctcagtttcacttgtaagaacctcgggacctcgtcatatcgtcccatttcaccagacacccacatacactctgacaaggcggacatttccctagggtgcttcagacttccagagaccttgagggtggacactctcctgttgccttagcttccggggccgggcatggtcaggaaaggaggctagggggttagctgacaatgtcctgacactgcaagctctctgggagccagctttgggtgatgatggaggacaggttgctgccggttgcagagtgggtcagcccacctggtgcgtaccgacggggagtagggtgggtgggaggggggggtcagggtgtttaaatgctgtccccatctcctttgtgagatctggaaaagatatttgcagccagtaggcacagtgcaaagaaggcgaccatcctcctttgcctgtgtagaggaacttgggaacctttctttcccctggttgcctggttacaagatcatctgtcacgtgttcctggagaagggtgcttggctggggagatgtggcaggcggtgtgtgtgtgggggggggggtggcgggggaggcgccgggagatagtgtctgctgtgggaatcaatgggcaccttcgatcatatcacaatcccattcctattacacaggacagccccactgcccagctgccctctcaaagcctcggaccgctggggcttttttgatgcatgaatgaagactgggaagtgggccaggacttggctcctgggcttcttcatcatttattagctcctagttttaattgtttctcgacttctttccagatatttatctaggagaaattgtcagaccttgccgcgtggtgcggacacgcagggcagggcgggtactgactgcagaatctgaacagcctctctgatgagtccggctggaattgcttgggtacctactgtgtgctatgtgcagtctcctgcccatgaaagactagtcttcctgggggtgcagacaaaggaatagtatttgggttgtgttttgagtgtgcctgtggcagagctcctgggacggaggtgaactctgatccctgaaaggtcgccttatgtcctggggctttgcactctcagactggaatctaaagtggttgaaccttacacgaggttgctaaaggcgcttggaactgctcagcaaccctcaggtgggggcagagcactgagggtgttgagctcacagaagtgtcctggggtggagtaggaccaggtgaggatgctgggagtgccttcttcctctgagctctagcagcagtgggagagagaagtataatggagaataccacagaggaagccagggggactttgggggaggagccattgaagggggaggagccattgaagaccttttcccttctttctatgaactaagctgtgtgtgggtcagagtggacgctgttggtgcttacggttgttttgctgagcaggactcaggtgtaagtcggggagcccaggctggctcactcagcacacgtcggaggacatctgcccttgctttggcagacagagaactcttttcaatggaggagcagggttctagggcctgagacttagatcggccaccttggaagtcattttgcattaggtagtgtcaatttctccttctgcgctctccagggagagattctgagccacggccagctagagtgggaagggcgggctccgttccactagaaaccctgtcaatggtgttcgttaagtaagcctcactcttgtgctttggctccactgcaccccttgggagccatggtagatggaattgccatgtgagcatggtgaggtgcctcatcttcatgactggctgttagcttcctccatgggctattgccatggaaggtagcatgccccttggttaaaaggctggctcgtgagtacatcctccatgcctggacctggctgcctccatcccttcctctaggactagctcccagaaaccctttgagtctctctatctccccctccccaacctccaaggctcctttatagataaggaatttcacaaccaggggcagactaagatgttaggtgggttgcccaggtcactgagctgtggtatcaaattctttacaggtcacatgggctggggttctaagaggctcagagagcagaaatagtgtgatgatgtactgaccacaccccaggccccttcctggtgccactgtctcgggtctgtcctaccataccagcacagggaaactagagagtcaagcttacaactagccttaggctgagcctatgtggaggggagacagatctatgctagcagtgggctctagagacctgtgtgcgccccactgtctcctccacaacaagttggacgcttgtttcgactgtcctgggcttgaccgcagtcattcactttacatcagtggaagggaagtctttttacagtgtgtaagtgcactggggggaggtcgcccctttgcttcttttccaccgtgtttgagaggaccacagagctccagatgcattatgggtcaggcctatgctcagctcccccaaaaacccccgtcttttgagtacggtcagattcccaggttgctttggggccttgtggatgggcagagaccatcctgcactctggggcctgaagttgtatcgacccacatcaggaccaacgaactggatgcatctgggggggcatgaaaaaagatttgtttttgtttttgtttttgttttcgagacagggtttctctgtgtagccctggctgtcctggaactcactttgtagaccaggctggcctcaaactcagaaatctgcccgcctctgcctccagagtgctgggattaaaggcgtgtgccaccatgctcggcatgaagaaaaatttggagtgatgggggagagggggagaatggaagggagatgacttgcccactggcttctcggatagtcagctcaaatccagtctggcttgggagacagagctcttctggaatttgcactcaaattatttaaaagaatatcatcaccaggagtgaacttgggatgctagcaattaagcacttctcctgtggcctggcacttctgctagcagtgggctctaagacctgtgtgcgccccattgtcctctccacactggacgcttgttctgattgtcctgggcttggccacagtcttccactttacatctgtggacgggaagtatttttacagcgtgtaagtgcattgggggaggtcgcccctctgctgccggaacctgagttccaggcgcattgtgccaagcggtggttattatttcccccagaataatgtccttttttttccctctcttgcttttaacgtcctgcccttggcatctgttccaggcattgtggacgaacggagactgtgttctgacaatgggttaaagcaagctcttattgaaaagcattctctacttaattacgtttccttcttctggaagctattttaattttttttttataatcacatgttaattgtgtattagcggggcctttctgattagttgaaaacataatgaaacctttgtaaacaacacagagagagaaagaaaagggaatgtgtgaaacagagcgggtagtgacgagccagctccaagaggcccaaagagcgacatttcttgatgcggcagagggatggaaattgtacctgcaagtcttgctttgaatttgcaagtctcccagttgcagggccaagtgggacaaacaggccagtggtggagagagaggttcacagagtttgcccaccaggagttgtgagatgggacccggtagtcctgccccactggtctgcatctactcacacattcgttaattcaccgctgaaccattctcgcggccaatcacaattttactctggttccctccctccttccctcattcattcattcattcattcattcattcactccatgatagtcttagagcaggagctgtgtctacagaacattgaccggatgcaacccctcacatgccttttctgccgtcttccttacatcttcagtacaggtattagttgcgttgtggctgaggagactagagctcactcattcagattcagctaaggaaaggaagcaagtgagccaggtctgttccccgccccccacaagtgattggggatcctggcatctgttgggatggcatgatgctctaaggagtcagtgagtgagtgtgtgtgtgtgtgtgagtgtgtgagtgtgtgtgtgtgtgtgtgtgtgtgtgtgtgtgtcaggacggagatgagagttagcctgtggctgtcatcagaaagtttgctggtattgttttgttttccacttttaatgggagccttgtttctggacagaaggcctgaatctaagtccctgttgtggcaagccggccccagagccctgctctgttccctatttaaagggctgggctcaccaggttttttttttttgcagttcccaggctgttattagggaagcgtggctggggcgcttcaaatgaaagtgctactgtgtgtgcgagccaggttcaccgtgcgcactccaaggaaatgctgccaagacagtcttatgaacaggcgccaagcaaaacacgcgtgctccgtccagaggagccagctcacttctgcaaatagaggaaaaattgactttctgatttggagtgtttttacaactaagaagaatcacttcagtgattgttctaaaaatagcccggcagcagcacactctggaaggccccgggatggtgagcgtcctttaattgtgccttttatgtaatctctctagatcattttttttttctttttaaatcacttatgcttgcgtggtcatcccccccacctccccgtatgtaactcggagatgcgagagtggtctacacagcagaaaccgtatttttatcttttcggcttcaggaagtgtatttgggttttcgtctcctgcggcagccgctgcatggctcgcagctgagctgccaaatctagggcagctccaccgccctgccctggtggtggcccagctctgaagggaggcgtccctcacacatgggtgtgcttggtggcagtgtcactgacgccgggtcaggatatcggcctgcttttgctgttcaagctgcaggcacctttccaaagcacggaggcttcaaggttgccatcagccctgagcttggccacccaaggggagatgatgcagcctcctgtgcatgcgctgtcttcccctgctgcccctcggaacctctccttcccttctctctcctcacctctgccttcatttttctacgtcactctgttccgttacatgtgggagccagtatggaagctgaagagtccagtgcaggactcctcgtccaccgggctgcatacctggggctgggtcactctacgtgtgtgggaggaatgacctgtccaccatggcctccctggcctttgcctaagagatgcctgaagcccccttcacttccttgtgggcatgacaatcaaaatgtctccagattaatgctggggggggggtctgtgaaattgaacactggtggtctagcctgtcttccaagagtagacaagactgatttctactgccaaattttacatccagagcatattttaacatataatatgattgaccctggcttaagggtgaccttgatgtgtcccacacaggcatcagggttctcaggtggcaagctggctgtcacaggcatcacctatgaacttgtgtggtcaggaggccaggagtttataatcaagttgggtttctctgccatcttcccattctaagcccctaagacaatgctgggagaattggttctctttcttttttagccagggcaagacaaagtctctctaaaacaggccaccctagaacttactatgtagcccaagctaccctttaattcacaatagccctcctgcctcccaggtgttgggatgacagttagaagccagttttcttgatgagtagactttgtaggactgtagattgtcctctggaacttgcttggttccctctttccccacttccttttcctcctctccctccttccttggatacaccccttctccccccacccccctttgcctgggagcagacttggcctgctcccaggcaaagcctgttctaatgacccatacagtaaccacctctaagaatcatgttctgtctttaaattgattcatcactgtgaggttggatagggccaggtgtcaggtgtcaccgcctccctctgggggctcatcttcaagaaatctagaattgggtggtcaatgggttttgtgcccagcttctttggaataccatgtgactactcaagagtgatttcctagtcctagccaaaactctggcttccactggctgctctcagccagctggtcagccagccagcctgagggtatgtagacatgtggaatccaccggaccccacatgccccagggtctgggctttatggtttccggttctctgatacagcatccaggtccagggaccttctggcctcagacctatggttccaggctgtgattccacagccccgccccttccaacctcctttgtcaccgggccagccctcctggctgcccgtgtacatttactcctattctagggtgatggacagggtgctgggtggaccagtgggcacagctggtgtgggttacaggccatgactggacatagatgctaagctacccagcaaccgtactggggctgttagtggttggaggaggatatgttgtaagaatggctgtgatcactgtgtgagattaatttctttccttgttagtgcccgagtttgtgtgtgtgtgttcttgtgtccgtgtccgtgtgtgtgtgtctgnnnnnnnnnnnnnnnnnnnnttttttttttttgtttttttttttttgtttttttgtttttgttttttttttttttttatgtgagcgtgcacttaacttctgtcttcccatggtggcgatgttggcccgcatccgagccctctgattttctaacggctcatctgggccatcggaaactccagtgctgtcgggctgtgcctggtgaggatgaccacagcccggctgccggcagagggctggaggaagcttggcacggaggcagagggaaagctgtgcagaagagccgcaggtttttcatatggaaatgtgaaataatggggtgattaaatagagctgtatattaaagtacatctgacatcagaattaccataatgtgctgtagccttaggctgactactttatttgccatctgcgtcggcccaaaatcccccggggaagcgctaaaatattctgaataaactcagctccagttcttattgagagtaaaataccatttgtggcacgtcgtattgattcgtcttaattgtggtgcaaaaaaagagcagtcaccggcttgatgacttttgtgcttggtgacaagctggctagagttactccttacactgtagttggttaacctgggtcgactggcagccaggaccaggtgggcacctggactgctgcagagagtcacaacgccacccctgtccccgccccaggctgtgggcacagctggggctctctgccaacccctcctgggggaagggaatatggcggaagtgggggggagaggaaattcatccagtcctctgaacctccttctcacacccagcctgtcatctcctgagccacacagcagcaccggcaccagctctgagaggagccgtgcgcctcagcttccatctgggggttagacacactgcataccgaaggaagcagaactggagaggaggggggcgggcacctacccaggcaaagccaagtctagctggtccctgctcagtggctgtggaatgtggcgtttacctcagcccttgggagaggggggagagcgggtggcagtgcttacaaaatgcattgaagataaaaagagtcattgcagggggcttgtgggggagcactctgtgatccacaccgtgcccccccattcacaaggtccagtttttaccctataattgcctatcattatacacaatttaaatattcaaacattctccacaaaccctgggctagcatgtttttattacaaattcagaacaagggaataacctttaacttcagagacaaatgagacaaatttacaagtgcgtatctgctgttttctcgcgctttatcaatccccgtggaccggagcactttcgctataacaccactcagaacaatatacatatattacgacttgtttgtagtgtgtcggtaatgagtcccctctgcattagctaacctatataactcggcgttgaggctctccataacgccaattatctcctcacagctaaacgtacactccattaaaacgagatttactgccctggccatacttcttggggtagaaagtggagatttttgtgggtttaaggaaaggaaggaaggatggagagtttcctgggaaggaagccatgacacataagaacatcctgtgtctcctagaaggatagaaagccgcatggggtgaggttcacttgccgtgtgagagaacggggtgcagacgtggaggctcccacacacctacagggctgtccctgccttttccattcgcttcctgagttcactacattttggccactaaatgatgagtatgatttatctgtttctggcacattctcgaaacccacgccgggtcggggtggcacggaacgacacagccactctggtgagtttgtccatcagcacctcagatctcccaggaggggcctggggagacggcacagttggtagagctcttgctcacaagcctgaggacctgccgttgatttctagaacctatgttaaaaaacaaaaaacaaacaaacaaacaaaaaacaaaaccaaaaaatgccaggcacggtggcatgaacctgtgatctcagggctgaggagatcgagacaggtggtccctggagtgctctggtgagccacttgggcctgttcggtaaaatctaggccagtgagaggccctgtctccaaaggaaacaacctgaatccaagatggctggctcccgaggaaccatcatggctcgtcctctggcctctgcactgacagactttgagtacctcactacacacttgcacctgcttatacaagaacgtgtgtgcatacccccacacgcatgaagaaaagcccactggagacatgtggttcagagaggcctgcgacacgcaggttgcccggggtctgactatgtagaaaccttaggtgatcttccatgaatgtgaaggtttcgtgggaggccagggttctgagggtgaccaactgtagttgtagacactccgggggaaccgtcgtcatttgtaagatcacctgtgccctttgccctgtcctcccccactctctgtgacaaacccctctgttctcaccctcctcggatcagcccctcggtcagcaatttctctttgtttcggggctgggtggctgtttctcccagcctgaccttgcacacctggtctgaccacaaaattgaacggttgaaagaaggctgtgttgggacccatggggcgcatggcgtctgcacccgaacttctctttcactttgcttagaccaccctggccctgaagctgtgggttcacagttctcagctgtcaaatgagaggcttgttgccataaccaacctgcttgagaggcggatagagggctacctcctacgttacaggccttcacggattggtgtttgtttttattgtgcttttgacatttgtgaaattgttgttgttggtggtggtggtggcagatcatccagttggaaactccatggattttctttacctgcatcctttgctgtagtgagatttttgctagacaaatcagttcttgtcttgaatgggcttgaaattctttttctttttctttttctttctttatttttgtagaaattggaatttgttttatattcagctaagttattttctttaacacacattttctgtccttccccagacaggctccaaacctgttttcaagttccgcctccagggtttcccctctgcattgagggtcccatctccatgcgttggactcctttcttctaccagcctgtccttgctttccttcctaaagtcagcattagggtgttctcagagggccttccctagggctcccaagttgctaggactcacctttcttatggactcgatacttgaaccctcgctggaaatcacgtaatcaccgatgtcttgctgactgtggttccgtgaaagcagcccttctcctgctccatggccctggctcacagtgcttcatcagtctctgcagtgtagagagcgaggcaggtggccacacaaggataaagggtactgggaagttgctgcgagcatttgcgtgaaggaacagttttccttcccagacatggtgtgaccttggagacagaactcctgggaacagaccgattcttaatgttcagcatttagtttagttcgggaggcagagtgggtgggcagggccagccctccacccaaggctctggaatgcaaagctggattctgtggggtggctgtggcatcttctgcatgcctctcccacagcaggcagagctgtgtcttccatcatggctacctgccctgcatctaggtgcgttcagaaagtctcccttgcaggcggcctgcctctgccttgctggactctgtctctctcctcacctcagcacctctggttctttcatgtttggcttgactacagcctctagacccacccctaatctttctgcttcttcccttggtatttctgaagtccacttagtcaatttgggtcagcctgacagtattctgggtctaatgcttaactggacaccatgtgcataccccagactgtgagctcctggaggtgagggaagcaagagtcactgacatttccagtaagatgtgtctgtttaggggactatggcaattggtttgccactgtggtgaaggcggtaagcacagagctttttctcccagggcgagttaacacttggtggatgaaaccacgtggtcacctatgtggcacaggtcccacacaaggaaagagaataatattttctcaaaattatatctgcttcaccatttcctacacttgaacctgactacttggcttctctgattgtccggctctctggtgttgacaggggcaggtgggaagattatgcattgcctggtccgagccccttttagggccagtgagagtcaacacttcttttgtgacaggggtcgccagctgtgagtaacgacgcgaagtgagccagatcgggcccggtctgaatgtgaatcccaggttttccagtcagcaggctgtggggattgtgggccctactcacctgtgatgagatttgatttcctttttcctaagaagtctgaaaagactcctcctcgcgtgtggttcagatataaaaagaccaaggtcagagaatggtgatccagcctggtgtccatcattaaaagggcctgacagcatgtggaagctcaggcagggaggaaacagggattccatgaaacctggtggtggcactttctgtgacacataccatggggaaacacacagaacatgttggcagggtgtatgttttctgtgtctcccgagtcacctgctgtgcactcaggaagtagaagataggggaccccatcttgggcaatttaccacaacaaacaacccaggaaggcctcccccttcctaatgagaagtccatgctttcttgctgtccagcaacttgactgcagtgtcaagtctgaagggaacagaagtgtctgcttgcaaaagctaaggaaacgccccagactagattgaactgcaggaccacaggacagagacgttaaagcatacccatgattctcactgccatggggcctgcagtcctagtacttgacaagataagcttggaatccagccacaagatggagtctgaacagtcagtctggcctgcaatacctctaatctcttctgtagatggtcagggtgagcagttatgggtgtgtaggacagaagtcggtgtaatgcagactctaatccttaatgcggctaagcccttggatctttagtcaggactctaaattttccctcagcaccgttcatacaactgtctctctctctctctctctctctctctctctctctctctctctctctctctctctctgtgtgtgtgtgagagagagagagagagagagagagagagagagagagagagagagagagtatgcatgtgtgtgtgttcgtgtgcatgtgcgtgcgctaaatcattaagaggtgacctgtagcccctggactgtgagctgccggaggagcatgaagcatgtagggtacccaggcagtgagataaaggcccacggtgacaggaagaacacatttgttcagtcctttctgtcctggttcccactgtttgagctcccgtgtgtgggtcccacggatggcagaggggcccaggctccctgtatttgctcagggttctctgaagcacagagcagagaggattccgcagtttgcagggagagtcaatggatagatctgtctgtaagactgaggccagctgagcctgtcactaagtgtcaatagccctacatagcctccccacagccaccgtcagagccaccactctatcactcccttctgcgggtcggcacggagtcagttaccacagttctagcctaaagcaactcatcttgactttttgttcccgctgagatggaaggtcaaatacaaagacacacgtgcctcacccctatcctaggcccttgaacttcaggcacttctctcctgagcaacttttctccttacagtgcaccacatagacaccgccacttgccagccggggaacgtcaggcagatctcctcatctcttccagtcctcagtttcttcatctgtaaaatggaactgatggcagttgcagtttctgagctgtgggcgcgatgcacgaagcctgtagtgtccttagctcattgctgcccatggtagagatttcttaccgtctgtcgctacctctgctctactttctgcctcccagagctgaggtccgagtgatgacttgggtaccagcaggatgcttatggatttgtagatggctataagcgctcaaggagccccggttgacattttctctgtgacattgtgaaagatgtttttagtttttgtttttgtttttattttattttattttattttttgagtgctggaagatatggggattggcaagtactctatcactgggacgctgaaatacacctccagccggagggggggcagtttaatttaatttaatttttagattcatttgtattttattctgtgtgtatgggtgttttgcctgcttgtgtgtttgtgtggcatgtgcataccacgcctacagaacccagaagaaagcatcagatctgctagatctgaacttacagacagatagctgtgacctgctgcgcggatgctgggaacggaaccagcgtcctatgaaagagcaatcaatgctcttcaccgctgagccacctctccagccccatggggagggggacagtttttaagtgaacatgagatgtacttgtcacctgaataatggttgtactggttgtcatcatgaaactgtggagagagcactcttagcagttatagggggtgtgcgtctcaggggttggggtggggtttaagtgatgaagcaagacaagaccagccttctgtttgggttcggggtgaggaggatcactgtgagacacccaggggtaccaattactgtcccaggttcagccacctcactgccatgtggtcccttcactaggtctcccaagcagcatatgtcaccaatatgctttttggctctgtaaaatgactcccgtattccaccctagagtgaatgcctgccacagggtagacataatgggagactgtccagggacaatcagtggccttccatgagagggcactgtcaacatggaaccattgacaatgtgacacacgcagggaggcctgggaaggtggtgatggcacggtgattctctaaactgctgtccccgtggtctagcatgatcatgtgatcatgatcctcacttggcttccctcagaggtgttagtgaacaagggtgacatgagctgaggtagcgataatgctgagtgagccgtgcagtgctttgtggtttactgaggagcccgggcggcccagaccagttcccctgcttgatcagaggtgtcctttaacatttgctgcttttgagtcaagctacattactcttcttccaggccttaaaccaaaaggcatccctgaaacactcagagccacatacaaggatgggtaacaaacccgcagtatataacacctactgccacatttatacagcagtgagcggtggatagagggaggacctcacagtccccaggccaagtaggaagcaaggctcagagaggtgacatctcatgtttggctacaccctttagagatcaagttccaagtgttcagtgatgctcctatggggggtggggagtcttgtcagaagagatctggggtaggagtctgcgtttgaaactcctcagacaacatactgaaagaacaaagaaggctcagtgtgtgttctaaagatctatgaaagtaaggagggaggaagcaagaaaagacaccgcagggccctctctgggttctgagctgccccgtgtgatttagtgagacaaacgcaactgacatttctaggtctgtaggccaggattggtgcttctgaagtcatttggacccagcagttagcatcattagctgcagccgctacagcagtgtaaggctagtggaccctgtcccagccattagcaaagcagccaccgcccactgcagggcacgcactgggccacctgcgtgcaggtatctctctgagttcgatgcagcaaggacgggtttgggatgagctaagcaagccctgagtctgacgcaacctgctgtctaaggctcttcttgtctaaaagcaagccatctgtgcctgtgctgtgtctataaaatacttattcagttcctgaatagaaagacgttccaagtggctcgccagagactctctgacgttgttcagttcttaaaagtgagcagccccatactcagggctatttgtaggcgagagagagccatgaggtcgtcacatgtaaacgaacattttattttaaaaaagaagggggtggctggaaagagagttgtcaagggagggccttcaagggctgggggatttattttttctttctgtcaggtactgggggaggctgctgcctatagtgagtgaagcctagagttctgtagagggacacttaggggctctgatgaagatagctctcaccccagggtgacaagtggccctgaaatctgaccggacaagtagtcagccccctttctcctcacagtttaactatggaggtgacatctgggttctagagcatgcaggtcagaatatgtgtgcccttctctctgcttttctaaaacatggaatcggttatggctacctagttacatagtctgctttggacttcggtatttgttggatagaacagtctagaaaaacatgtggccaccagataaagagacaggaagtacttcagagcaactcaaggaaatggagatgctgagaagagatgggccccaacttaagaacaccccagatctcagcaaccatcctctgtaaatccattacttagaatgactggggcccagagaagggtacagaaacacctttaatttgatatgtgacctcctaggacatggtacttcatttgtgttgatagctccaatgtgtctgaaagggacttgtatttaccttcttaagaaacacatacacacacacacacacacacacacacacgatgtgaggaagagtctgaacctgtcttctggccagcattagctaataagctgagtatggagcagtcagggctttggagaggcacggctcctgttagcctaacagtctagtcacaagcatcgtggctacccagaccttgtgaaaccaggctagaacagaagattctcgctagaggtcatgttgcccaacacagacccacccagacaggctgggacagctggcgagagcagtagcctctgttctcccagactgtttctgtttgttgtcgttttgtttagttctgctggagggtctggtgtggaggactgtaccaagggcctcatatgctaggcaagccctgtatcctgagctctctggtggcagtttaaaggatggagtaaggcctggagagacggctttctgtaaaggaatgctgtgcaggttcgagaacccgagttccaaccctaggatgcacataagaaacaaggagtggtgtcatttactcctattctcaggatgggggatgtgggagaggacctccaggacacactggccagccggtccagcctagtctgtgggctccaggtcccagtgagagaccctgtctcaaaaaagggaagatggcgcctgatggagaacaacactggaagttgtcctcaagcttcctcatgcatgtatatatacacacattcatgcacacatgaacactcatgtacagcagaatgaggctggacttccaggattctcttatttccgtccgtccttctctgctttgctcccctccacaccaaacccacagatgcagtatcaggggatgtcgggaaaatccctggcttgcaaaagcatgtcttggattccagggctatttgccctgggcctgctggtgcaatggtccaagtgaatcccaatgctgccccaggttgacacggtacttctctgtgagtcctggccggctggcaaacctaacttagagaggtgcatgctgggaacagaggcttcagaacatacacacactgtgggggtagggggtgcagcgtcctatgaagtgtcgttagctgacaggaagtgaagatgttgtctacccaggattgtagaagccccaggttaggctggtggtacagcaaaggtggtggcttcttaggtccatttccacagccctgtctactgtagggtatggtaacagcgtttgtattggctttgccggggagtttgaagctactgacttagtgtcagtgttgatatctgtttgatagaggcaagtttaaacggaggagacgggcttttcaagactcaggctgccatactatgtgccaggtctgaaataagaggcctgttcctaccgctttggagatgttacatcccatgatggtacacaggcctgtccatgcctgtcttgctcctttaaactattaggaaggttctggcaagtggaatgtggcctcatgtcaaggtcaacagctccagacaagagattcggcttccatattgtggccggcccgattgaccgacaaatctgtagtattttggctcagggccaccagtgtccactgcgatttcttactgatgtcacccgagccagttgtaacaaatcaacacgtgtggctgctcatcctgactgctgtcacatttggtggctgcctttctgtccctgtgttttctggcagaagacaccaaaccgctcttttagactagagtcccatcccccaccccctgccctgcttggggggctggggcgctgatttccacacagtgggtgtgtgaggccattggtaagggtgggtagcgggctcttgccctgtgctaatcttgcttcacctacctgggtttctatcggacagtattttctgcacaacactggcccatgaaacgggaatctcctgtggctaaaaatctcaaacgtaggcaaggtatcatggtgctgtgtgaatgtctgtctctagcattcctggggactgggcttgagtcctcagacacgctaagcaagcattccacgacggagcatcatagccatttttgttaatttttttttctttttttttttaagtttgcaaagcaacagagtcagtagttgccaaggggaggatgcagtggagtgattttcatcccagaggaggcctttcatgacgagcatacttttctgtctgcaccactggagggtggggtattagcattgactatgtggaggctctccaccccccttttgccccagcagtgaattatgagggtggggtctccatgtcaccagtgactgagtcaataaacctgggcgacatggtgaggaggtgacgcttataccctgtctcttacacaatgtagccattgtcactgtctcccatccagcccccaaaatgatgaaaataagaacacctacaggggacgccggacctagtaaatgcaagctagtcccaggtgatccagaacctgctcatagatcccgtgtttccttgccgtcgggggaggctcgtctactgcacaagtgactccaaggattccccaggcctgctcctcatagatcttgttttctctgggtggatgcggtgaagccggtccacccctgtggccatcccagctccccccgcaactgctcacgctcagcctttcttctttatgtttccccaggtaaagatgagccttccagctacatttgcacaacatgcaagcagcccttcaacagcgcctggttcctgctgcagcacgcacagaacacgcatggcttccgaatctacctggagcctgggccggccagcacctcgctcacgcccaggctcaccatcccgccaccgctcgggccggagaccgtggcgcagtccccactcatgaatttcctgggggacagcaatcctttcaacctgctgcgcatgacgggccccatcctgcgggaccaccctggcttcggtgagggccgcttgccaggtacgccaccgctcttcagcccaccgccacgccatcacttggacccacaccgcctcagtgcagaggagatggggctcgtggcccagcaccccagtgccttcgaccgagtcatgcgcctgaaccccatggccatagactctcctgccatggacttctcccggcggctgcgagaactggccggcaacagctccacgccgccgcccgtgtccccaggccgtggcaaccctatgcaccggctgctgaaccctttccagcccagtcccaagtccccgttcctcagcacgccaccgctgccacccatgcctgcgggcacaccgccaccgcagccgcctgccaagagcaagtcctgtgagttctgcggcaagaccttcaagttccagagcaatctcatcgtgcaccggcgcagccacacgggcgagaagccctacaagtgccagctgtgcgaccatgcgtgctcgcaggcgagcaagctcaagcgccacatgaagacgcacatgcacaaggcgggctctctggctggccgctcagacgacgggctctcagctgccagctcccctgagccgggcaccagcgagctgccaggtgacctgaaagcggccgatggcgacttccgccaccatgagagcgacccatctctgggccccgagcctgaggacgacgaggacgaggaggaggaagaagaggagctgctgctggagaacgagagccggcctgagtcgagcttcagcatggactcggagctgggccgtggccgcgagaacggaggtggcgtgccaccgggggtggcgggcgcaggggctgcagctgcggctctggcggatgagaaggctctggccctgggcaaggtgatggaggacgcagggctgggcgcactgccgcagtatggggagaagcggggcgccttcctgaagcgtgcaggcgacacgggtgatgccggagctgttggctgtggggacgcgggtgcaccgggtgcagtgaacgggcgcggcggggccttcgcgccaggcgcagagccctttccagctctcttcccacgcaagccagcaccgctgcccagccctgggctcggtggtcccgcgctgcacgcggccaagcgcatcaaggtggagaaagacctggagctgccacctgccgccctcatcccatctgagaacgtgtactcgcagtggctcgtgggctacgcagcatcgcgccacttcatgaaggacccattcctgggcttcacggatgcgcgccagtcgcctttcgccacatcgtcggaacattcctctgagaacggcagcctgcgcttctcaacgccacccggggacctgctggacggcgggctgtccgggcgcagtggcacggcgagcgggggcagcacacctcacctgggtggtccgggtcctgggaggccgagctccaaggagggccgccgcagcgacacatgtgagtactgcggcaaggtcttcaagaactgtagcaacctgacggtgcaccggaggagccacaccggcgagcggccttacaagtgcgagctgtgcaactacgcgtgtgcgcagagcagcaagctcacgcgccacatgaagacgcacgggcagatcggcaaggaggtgtaccgctgcgacatctgccagatgcccttcagcgtctacagcaccctggagaaacacatgaaaaagtggcacggtgaacacttgctgactaatgatgtcaaaatcgagcaggctgagaggagctaagcgcatacgtgggggacactgcgtgcgtgcgtctgtacagcgtgaccatcgccaaccttcgccaacgggaccggtgaccggactggcctctgcatccccggggcccagggaggcggcagtccaacctaacctgtgtctgcgaagtcctatggaaacctgagggttgattaaggcagtaaaaaattaaaaaaaaaaaaaacaaaaaaacaaaaaaatttgtggagccttttaactgtgcaataatttctgtatttattgggttttgtaatttttttggcatgtacgtgcaggtacctattattattattatttctgtttaaattcctttaaaagattttgttgagtatccatcccttcatttttttttttaataacccagtagtagtctgagcaatgactcgcaagtgacgtagagggaagctatcttttaaattataattttgtgtgtgtgtgtggggggggtgctgcttttttgaaatttaagctaagcatgtgtaatttcttgtcaagaagccaacacttaaatgacttttaaagttgtttgcgttttcatcatttactttgtcctgaaatgaaaagtggcatgtgggatttttttccgggggggaggggtggctttcaaaaccattttttttttttccgggaggtggatgtacagcggattacaatctttaaaattgtagcactttgtcttagcatcgcattggagagttagcactgatgtcctcctgagccacagaggcgtctctgtgtggaattcaactttcatgctatggaaggaaaatgttgaggggggcgtggcaaacgagcctctcccccacttgggaccccgagaatcttttccagggtgactctaggaacagcccccacatcnnnnnnnnnnnnnnnnnnnnaacagccccccacatcctgcaattgtgtgttaccaggagatatgataatgtccttttctgggggagcttggcgtattgggaagccgcctctgccctttgctgtagatttggctgcataaaatgggccgaggatacccactgggtagacagctgtggcctgtagtggcgggaaagaagagactaacaatgttctctcaggcttctcctggcaagatggcttctcttttcagcccccagcctacagataaatcccaggtgtccattgctacagtggtaacttgactgtgtcccaagcagacaactggccctgatggtgaactggagaagttagctgcggggtcgctcatctcacgctgataggcactgtagggcaaaggaatctcacccgttctctcttcccggaggagctggtaagagttctgtccaaggtgccccacgctgcttccgtttctgtgttttgtcttttccttcctccaattaagttgggacatactatacattggacttgttgggatttgatgtttgaattctgttgacccgcactttaaagcttttgtttgcatttaaattaaatggcttctaaacaagaaattgcagcatattcttgtctttggcccagaggtgggttaaactgtaagggacagctgagattgagtgtcagtgttgctaagcgtggcattcacaatactggcactataaagaacaaaattaaataatttattggacagtttctctactgccattcaatttgatgtgcgtgccttgaaaaccgatcttcctatttgagtctcttgagacaaatgcaaaactctcttttttttttgagatgaaaaaaaaaagactttttaaaaagcaaacaagagaagtacattctttagaaacaaagccacatttactttaaattaaaaaaaaaaatcctggttgaagagagaggacgggaaaatgccataagaccagtcaaatgaagaaataaacccagcacagccctggacatctattagcagaatcgttttcagacccccctcccccttttttggggcaacgctgcttagatatggagtggaggtgacttactgctgaattaaaactcacgtgacacaagccgatattgttgaatgaaaaaacaaacaacaacaacaacaacaaaaaacaattcaggaacaatggctgattttttttttcctcctaaatttaaatttagtgcactctgtcttaaaaatacgtttacagtattggatacatacaagggtaaaataaatcgtgtgtatgtgtgttggagcgatctttttattttattttattttcaaagtctgcttaataggttatacagaatgccacaatggctaggtgtatattgttttcttttggtgatggggttttagtatacattatatatattgaaatttcttgattactgtcaaagtggaccagtatttgtaataattgagactgcctgggcattttacaaaatgagaagaaaaaaaagtcctttttcttttccttgaaaccgttacagtaagttttaaatggtgggtctataaaatctgctctgtcacagcaacctgtaaagtcggagttttagtaaatttttttctgccttgggtgttgaatttttattttgaaaacaaaatgtatagaaacttgtatttggggtttaaagggggattgctgcaatgtgtagaaaaagtatgtagagaaagtgcttaatattgttactgctttgcagaagaagaaaaaaaaaatcacacttctgacctgtgcgtatttttctctcccacctccctctggaatggatctattggtcggttcatatgatgtaggctctcgctgtatttttaactggagcttgtaattttttaactgtaagcttgtccttttaaagggatttaaatgtacctttttgttagtgaatttggaaataaaaagagaaaaaaaaaacaaaaacaaacaggctgccataatatatttttttaatttggcaggataaaatattacaaaaaaaaaatcccccacaaaacaacaaacaaacaaaaatcccacccacatttgtatgttaagtcctcttgtatggggtggggggagggttgtttgacaaccttcaagagaaaaagacacagaaagagacatgctttgattcacaagtcattttagttgtatatagtctgtcagaattggcctactcaaaaagaactgttggctttgggctttcattcgaatgccccaactttgcatctggcctccttggtgaggccacagccgacttgatggcaagtccttacttgtgttgagtggagaaaagaaagcccttcctccaagaggcagtctataagatggtagcgcggtgagagagcaagggaggttaccttctccgctgtggctactgcggccaccccctccaccccctggccacgctcaggagcagagagaatcgacagctgcttttgtccttgagcaaacctggatggagcagcgaagcttctgagaggagcagctgggcccaggggagcctctgccactgagactggtgcaggcgggacagaggagagccttgcacgcaggtcctgttcccttggaatgtctgctccattttccccctctgtctctctgcttttctctgcaattccatccgtttcagaccagtgaggcctggaatgaaggaattctgtgccttcccatctatgttccctccgtcctccccaggctctgcctactctttgtggactcctctttaattttcttcctcctttgccccctctccccaaaccctcttttctcttcctttcttctctccttcttttcttcctcctcctcctcttcttcttcttcctcctcctcctcctcctgctcctcctcctcctcttcttcttcttcttcttcttcttcttcttcttcttctttttcttcttctcctcctccttcttttttttttttttttttgtaaagccaagtagctttaagataataaaatggttgtttattggatgagggaataatgatacactccacaaatacctatatcaggaagccattttttttttaatttcaggaaatgtaagaaaccatcatttcaggttatgaaagcgtgattgtgcatctttccaggcagatctttactaaatgcagagtctgtctcactgtttcccatttgacacagttaaaagatgggggcctagtgggaggccaggcctaagtctcagtgtcctgcatgcctgccctacggcccagggttaccctgcccttttgacaccctgcctctctgctacctgggagcctctgtgtggttctcctgtgctcataaaagctagccagtgctcaccagctcacctatcaccagaatgccaggactaagccatcctaaagcacaaggacttgtgtgtctctgtcaactgcagagagaagaggatttttgcttctcttatcaaagagaaaaatcaaccaaccaacctacccgaagcaggtgacccagcctaagggctctaccgcgggtgacccagccgacctcaggtcgggttccacactgccacaactttacccaaagttgctccctattggaacctgccacttgccattggagggtcatgggggggtggggggagaggagactggattactcgaagcaaaatgtgaaccctgaagcgaacacagccttccacctggccctccccgtccgaggtttgattccgtgattttggtgctttctgtgtctgccctgcatagccaaggcacattgatctctgcggtttgcttttgtactggcaaggcggaatatttttattaccttttctattacgtatcgtatgagcttttgttgtttgcctagagggtttgtctcttacagcaagtttggagctatttattattgcttggtatttgtgctctgcttttaagaatgggcacttggttttatttttgtttgtttgtttttttgttgttttttaattatggataaaatgttgagatgacaaaaggtcatttcaatatggcttagtaaaaatatttattgtttcttctctgtacaagattttgggcctcttttttcccccttaatgtcacaatgttgagttcagcatgtgtctgccatttcatttgttcaaaaccaagtttgttctggtttcaagttatgaaaataaattgggacatttaacttgatctccaaaccttgtccttttctgtgtcttttaaaggtgggggatggacagcttatttctaagaggggattgaaggtctctgttttcccttctgatttacgctttaagtccatggccaggaagagagagagagaaaaaaaaaccacttccaggaagcagagaggtttggaaaggctcttagccccggctatacaccatgtgcatacacagtgaggccttgcctcaagaacaaacagcaaaattaaaatgaagaggggaaacggctatgaaaagcagttcacggcagcccagggtaactctggtaatcacggatcttccatgctatgctcccttctcagtcatggtcaagcacctctgccgtgggtttagcagatgctgtgaccatatcctgagttcagttaaatcccgggttgggccacgtgaaaccacttatttatgttttgcctgggaggcggggaatatggtctctaagctctgcattctggaagcagtagccaggtctcaagtctgaggttaacctgggttctaatattggggtccaggccagcttggggtgtatagcaagatcatgtatgagaaagagagataaagagaaagatgggggaagaaggaaagagagaagatggggggaggggagaaaggaaaggagaggaaggaaagaggaagacaggaaggaggaacaaaggaagaaaagtggcaggcagagactcagaactggaaaccagtgtattgggtcccagacagcttctctgtgcacttgagcagctgctcttggctttccaggtcctgaatgagggttcaaggtcagacagcggctctgatggccacaaggggaggattccctcccctcccctcccgccccctcctcttcccttctcttcccttctttatgcaaggcgttaacaagtggaagaaacaatctctggggttcaccagtgtcaagccttgcacagtgaaagagtctggaacttttggttcacatgcagagcagcctgatggaagatgtcggggttctgtaggcttctgggtgtgtctgcacgggtgaagttacgctttcctaactccacgtgagctacatggaaagaaggaaaggtcctcctgggttcctgatctcaaagcgacaagggaattccacctgaaatcacccaccagtctcatcatgagctgagtgctgtgctagtgagtgttcactgggagcgcggaaggaagggagggaaatgtaggagcctcatggccaaggcgctctgtgggttccgcccacggaggctgaggcgaccagacaaccaggacgatgtgctaccctccatcacgtctttagcccaaaccagacaatgtcctcccaagaagcagtcacatgacagaacaggaagaacaatttgaaccgctgcaccggaagtggagcagagcactgcttggtgatggggagcaggagagaagggcaggcccgagtgctttctagagcccaaggaacaagaattcccagggaagacgttttgtttgtttgttttgcttatttttcccacagcctttccctcagttggcttagaaacacaggctttaagccttagtacttcttacccagagggatagtggagctgaaatggtccaatctcttaccttaagaactcagagagtgagctcttttggggaggtggggaggggagaagagacactctcctctttaagccaggggaacaaatgcttagggttgagtcatggaaattgttcagatgaacaagttagcgaatgctcaggcttacaacaaaccgagggccatggggcaaataggggacaatgtagggcaaagaaagggcttgatggagtctcaatcggtttccttggtaactttttatgatctcaggtcagtctcttcccttttctgggcctatagcaaagggttaaggcaacagggctgaaccattttgccctcagacactaaaggtgataccagatgcctgggttccaccaacagagcaagcttgacagcagaatatcccggttgctggctgcgactgaaggtttcccccgagatataaatcctgggatctctgcagtttccaatcgtcccgttgtggtttggggcatctctgaagtttctggacagctttagtcaccccattctgagctgcaaggtccagcaattaaaatgagaaaaattcccttgtctgctttggagataaaaccagaggaacgggactttttatgttaatgtgatggagatacataacgaatctcatgtaactttcaagccgggaggatgaaaacgctgacgctccgtgcaggtgatgccttagccactaattgcctgccctgaatagtcttcaaaacggctccatcggattctgattgcagaccatctaggatgcttaaaagacgtctaaacaggctcaacctggaaaccaatttagctccaaggcagggactgagctgaatgtcatgtgtgtgaacgcagggagggctcggcttgtctcctcgctcccaaggagagaagcaggagaggcagaatttttcccgggctaggtggtgtgggtagcaaaggagtgaagaagagggaggagtggaccagccatgaggcaggagggccaggaaactgtgctgttccttcagagaggaatcaccagcaagatgagaaccgagggagagatggtgcctcttacagagggcaggagggagaaacttcacagcgcttggaagagcagagtcaagttcatagagaagcagaatcccagagatggctggcatccttacaattcatttagcatattcctagctaatccatccatccatccatctacccacccacccacccacccaaccatccatccatccatccacccatccatccatccatccatccatccatccatccatccatccatccacccatccatccacccatccacccacccatccatccacccatccatccatccatccatccatccatccatccatccatccatccatccatctatctacccatccatccacccatccaccatccatccatcttctatattgtttgtaccattgaatctttcaaacacctccattgtcctccacagccagcgtgtcctatcttcctgtttgattcccacagtactgaaaaaacaggaacttctgtggataagcacttcattctccagtaactccatcactgtcttaatctgagagtctgtgactacttagacaccctcagcaaggtgtgaggtggtgagcgacattagtcccttgcctgaggttccagccattttctccctcacctgtgacctagctgtacggtattctgccccagctgtacaaggtcttgggaagtgcgagagtaccttgagtgttgagggttaatagaaatagggaacccatctacgcagctatggggggagtcatcacttatgccagggtcacctacactcctacaagcaacccggcacccatacttctggaagccagttcaggacactcattagctgtccaggatggacttggtgtgtggctttggcgactttaggtgcgttgcaaagtgttacattgctctgtcattgatgccctgcccaagggagtagacagtgcttgtgtctcctaggaagagttccagcaacaaccccaagaacccagtgtcgaaagacagcaggactctgtacctcactcctactatgtggccatcctgcctgctgctctgttctcatcttggcctttaattccagcactcaggaggcagagacaggcagatctctgtgagtttgaggctagcctgatctacagagctagttccaggacagccaagacgacacagagaaatcctgtctctgaaaacctaaataacctgatatagctgtctcccgagaggctctgccagtgcctgacaaatacagaagtgggtgttcacagcctaccatcggactgagcacagggtccccaatgaaggagctagagtaaggacccaaggagctgaaggggtttgcagcctcataggaggaacatcaatatgaactaaccagtaccccccactgagctccctgggactaaaccaccaatcaaagaaaacacatggtgggactcatggctctagctgcatatgtagcagaggatggccttgttggacatcaatgggaggagaggccttggtcctgtgaaggttctatgccccagtataggggaatgccaggacagggaagtgggagtnnnnnnnnnnnnnnnnnnnnatccattcatccccccacccactcactcattcaaacagctactcacccacccacccacccacgtgcttcttcacttcacaaacattgaagacacatgctgtgtcgcagacacggatggaagttaggggcaagtcaaattctcattgcctttcaggaagttctctttcagtgggcagaacaacttatgtatacattcactcatccaactacctgcccacccacctactcatcattcctttccaactctggagttaccacctctggcctacatgtacaggccttgtcatggagtcactccattttggatgggaatgccacgggacaacaggtaaatagggcttggaatgttgaccaataggcttcagtgggaggttggagcaagggttctccatacccaggtctctctttttactatggtttatttttcagatcacattgaaaaggaaattgtatttttgtactctcttataattaaaaacaataataaaaaaaaggaactgtctggcttaggacacagtgtagtttgtgatcctcgggaccttgtctagaacaaggagaaggacttttatctgttcaaatcccaaatggtgctgctgtgtagctcttggtccagactatggaagagtttttggctccaagtgcactgaagactgcaatttccaaaggcttggctagcatctcagtcaatgaaggagacctgggttagggacagtgccacccaccctctttccctattatcatggagacgctgccaagtgctgtgcaagtcctgtgcagtgtggtggggaatgcagaactgctgggttcaaagtgaacctaggaagcccaagcagtagtcagcaggtatcatgcacccaaacatcttccacactgggtgcggccccgccctttgcctgtgttgggactatgactgagaattggctttatcatctgt

SEQ ID NO: 1313 - DNA, 2697 bp, Mus musculus
ggcggcggcggctcagaccccctccccggcccgcatctgtgcagctttccgggcgatgccagaatagatgccggggcaatgtcccgccgcaaacagggcaacccgcagcacttgtcccagagggaactcatcacgccagaggctgaccatgtggaggctaccatcctcgaggaagacgagggtctggagatagaggagcctagcagcctggggctgatggtgggaggccccgaccctgatctactcacctgtggccagtgtcagatgaacttcccgctgggggacatcctggtttttatagagcacaagaagaaacagtgtggaggcctgggcccctgctacgacaaggtcctggacaagagcagtccacctccctcctctcgctctgagctcaggagagtatctgagccagtggagatcgggatccaggtcacccctgatgaagatgaccacctactgtcacccacgaaaggcatctgtccaagcaggagaacattgcaggtaaagatgagccttccagctcatttgcacaacatgcaaagcagccttcaacaagcgcctggttcctgctgcagcacgcacagaacacacatggcttccgaatctacctggagctgggccgggcagcacctcgttacgcccaggctaacatccggggcacgagcaccgctcgggccggagaccgtggcgcagtccccactcatgaatttcctgggggacagcaatcctttcaacctgctgcgcatgacgggccccatcctgcgggaccaccctggcttcggtgagggccgcttgccaggtacgccaccgctcttcagcccaccgccacgccatcacttggacccacaccgcctcagtgcagaggagatggggctcgtggcccagcaccccagtgccttcgaccgagtcatgcgcctgaaccccatggccatagactctcctgccatggacttctcccggcggctgcgagaactggccggcaacagctccacgccgccgtccgtgtccccaggccgtggcaaccctatgcaccggctgctgaaccctttccagcccagtcccaagtccccgttcctcagcacgccaccgctgccacccatgcctgcgggcacaccgccaccgcagccgcctgccaagagcaagtcctgtgagttctgcggcaagaccttcaagttccagagcaatctcatcgtgcaccggcgcagccacacgggcgagaagccctacaagtgccagctgtgcgaccatgcgtgctcgcaggcgagcaagctcaagcgccacatgaagacgcacatgcacaaggcgggctctctggctggccgctcagacgacgggctctcagctgccagctcccctgagccgggcaccagcgagctgccaggtgacctgaaagcggccgatggcgacttccgccaccatgagagcgacccatctctgggccccgagcctgaggacgacgaggacgaggaggaggaagaagaggagctgctgctggagaacgagagccggcctgagtcgagcttcagcatggactcggagctgggccgtggccgcgagaacggaggtggtgtgccaccgggggtggcgggcgcaggggctgcagctgcggctctggcggatgagaaggctctggccctgggcaaggtgatggaggacgcagggctgggcgcactgccgcagtatggggagaagcggggcgccttcctgaagcgtgcaggcgacacgggtgatgccggagctgttggctgtggggacgcgggtgcaccgggtgcagtgaacgggcgcggcggggccttcgcgccaggcgcagagccctttccagctctcttcccacgcaagccagcaccgctgcccagccctgggctcggtggtcccgcgctgcacgcggccaagcgcatcaaggtggagaaagacctggagctgccacctgccgccctcatcccatctgagaacgtgtactcgcagtggctcgtgggctacgcagcatcgcgccacttcatgaaggacccattcctgggcttcacggatgcgcgccagtcgcctttcgccacatcgtcggaacattcctctgagaacggcagcctgcgcttctcaacgccacccggggacctgctggacggcgggctgtccgggcgcagtggcacggcgagcgggggcagcacacctcacctgggtggtccgggtcctgggaggccgagctccaaggagggccgccgcagcgacacatgtgagtactgcggcaaggtcttcaagaactgtagcaacctgacggtgcaccggaagaaccacaccggcgagcggccttacaagtgcgagctgtgcaactacgcgtgcgcgcagagcagcaagctcacgcgccacatgaagacgcacgggcagatcggcaaggaggtgtaccgctgcgacatctgccagatgcccttcagcgtctacagcaccctggagaaacacatgaaaaagtggcacggtgaacacttgctgactaatgatgtcaaaatcgagcaggctgagaggagctaagcgcatacgtgggggacactgcgtgcgtgcgtctgtacagcgtgaccatcgccaaccttcgccaacgggaccggtgaccggactggcctctgcatccccggggcccagggaggcggcagtccagcctaacctgtgtctgcgaagtcctatggaaacctgagggttgattaaggcagt

SEQ ID NO: 1314 - DNA, 2442 bp, Mus musculus
atgtcccgccgcaaacagggcaacccgcagcacttgtcccagagggaactcatcacgccagaggctgaccatgtggaggctaccatcctcgaggaagacgagggtctggagatagaggagcctagcagcctggggctgatggtgggaggccccgaccctgatctactcacctgtggccagtgtcagatgaacttcccgctgggggacatcctggtttttatagagcacaagaagaaacagtgtggaggcctgggcccctgctacgacaaggtcctggacaagagcagtccacctccctcctctcgctctgagctcaggagagtatctgagccagtggagatcgggatccaggtcacccctgatgaagatgaccacctactgtcacccacgaaaggcatctgtccaagcaggagaacattgcaggtaaagatgagccttccagctcatttgcacaacatgcaaagcagccttcaacaagcgcctggttcctgctgcagcacgcacagaacacacatggcttccgaatctacctggagctgggccgggcagcacctcgttacgcccaggctaacatccggggcacgagcaccgctcgggccggagaccgtggcgcagtccccactcatgaatttcctgggggacagcaatcctttcaacctgctgcgcatgacgggccccatcctgcgggaccaccctggcttcggtgagggccgcttgccaggtacgccaccgctcttcagcccaccgccacgccatcacttggacccacaccgcctcagtgcagaggagatggggctcgtggcccagcaccccagtgccttcgaccgagtcatgcgcctgaaccccatggccatagactctcctgccatggacttctcccggcggctgcgagaactggccggcaacagctccacgccgccgtccgtgtccccaggccgtggcaaccctatgcaccggctgctgaaccctttccagcccagtcccaagtccccgttcctcagcacgccaccgctgccacccatgcctgcgggcacaccgccaccgcagccgcctgccaagagcaagtcctgtgagttctgcggcaagaccttcaagttccagagcaatctcatcgtgcaccggcgcagccacacgggcgagaagccctacaagtgccagctgtgcgaccatgcgtgctcgcaggcgagcaagctcaagcgccacatgaagacgcacatgcacaaggcgggctctctggctggccgctcagacgacgggctctcagctgccagctcccctgagccgggcaccagcgagctgccaggtgacctgaaagcggccgatggcgacttccgccaccatgagagcgacccatctctgggccccgagcctgaggacgacgaggacgaggaggaggaagaagaggagctgctgctggagaacgagagccggcctgagtcgagcttcagcatggactcggagctgggccgtggccgcgagaacggaggtggtgtgccaccgggggtggcgggcgcaggggctgcagctgcggctctggcggatgagaaggctctggccctgggcaaggtgatggaggacgcagggctgggcgcactgccgcagtatggggagaagcggggcgccttcctgaagcgtgcaggcgacacgggtgatgccggagctgttggctgtggggacgcgggtgcaccgggtgcagtgaacgggcgcggcggggccttcgcgccaggcgcagagccctttccagctctcttcccacgcaagccagcaccgctgcccagccctgggctcggtggtcccgcgctgcacgcggccaagcgcatcaaggtggagaaagacctggagctgccacctgccgccctcatcccatctgagaacgtgtactcgcagtggctcgtgggctacgcagcatcgcgccacttcatgaaggacccattcctgggcttcacggatgcgcgccagtcgcctttcgccacatcgtcggaacattcctctgagaacggcagcctgcgcttctcaacgccacccggggacctgctggacggcgggctgtccgggcgcagtggcacggcgagcgggggcagcacacctcacctgggtggtccgggtcctgggaggccgagctccaaggagggccgccgcagcgacacatgtgagtactgcggcaaggtcttcaagaactgtagcaacctgacggtgcaccggaagaaccacaccggcgagcggccttacaagtgcgagctgtgcaactacgcgtgcgcgcagagcagcaagctcacgcgccacatgaagacgcacgggcagatcggcaaggaggtgtaccgctgcgacatctgccagatgcccttcagcgtctacagcaccctggagaaacacatgaaaaagtggcacggtgaacacttgctgactaatgatgtcaaaatcgagcaggctgagaggagctaa

SEQ ID NO: 1315 - DNA, 44323 bp, Homo sapiens
aaaacaacacagtggcaatcgtgccgaggggaggttaagggggatcggctgaccacgcagaggaaagggccagagcccgctgtgccagacagggccagggtgaagggaagagtacttaaatccaagaaggagcttgatgctttctgaagagaccaaggaaaataagatgtccacggtaaactgcgtaaccccagtcaaggtgattttctcaacaacccaccaacaggtttcctaggaagattagtaattttccgtatgaattcacgattttgtaaaacaactagagacccaagcaagattcaatgcaaaagttaggctaactgtgttaattccatggttaccttttgaattaggttttgctgtagctgtgtgttttgaaggcagcggtgctcacaattatcttaactccccagggtagagtatatctccagtggtccacatgtctttcagaattgggcctccgataaatttcataagacatagccctctttttttttttttggttagttggtggggggggggtgaagttcctctcccttctgcacagaagggaaccccatatcattagaagtgtgatataagtcagctgctctgattcaatgggagaataaaaacgtgttcaccaaaggtgttatgccaggctgattttattcatttgtaattcacacctgagagaaaacagccgtgagcatattttaacagcccctaatatttttaaagggtcttttttccctacctgaatgatatgatgtacatatgcatatttcttttcttttcttttcttttctttttttttgatggggaggttgctatctgcctgtgcttggccttggcgattttttgtctggcctttgaaatatttcataacagaaaactaggcatttctgaagtgctggggtgaatgcagttgcttttgtgaagccggccttagagacatcgaggctgggttagctggttgggtgtgttgtgtcagtgaccagtgtggagggctaagtgggtcctactcaacccaagggaaggccaactttgggtgcatttgagaataattagaattgtgtctcaggtgagacggaagcacagaaaacagtcgtttacagataccagtttctagcgccttctcagaatggagttcttggcactgtcttatagcttagaacacggcttgcaccagccttcacttatccccttttcatctcctatctcgattgctttgcattctctgttgcttgttgtgataaaatactttccaaaataaactttcagttgaattggcttttggttgatggcaagctgaaacgccgagccgcgcctagcgccacttggcagctagggggagctcggtgcccgtgtcatggcttggcgcctccgctacaatgggctaggaacgggcttccatcagcagcggcggcagtttacgttgctgcaaaataccttaagtgtgaagttgtaatattgattttccagcagagattcgtgcaggacaaaatgagaatataagtttgagaaatctattttcaagctatcgccattgatttacaagccctcacttggcagatgggggcattttctttttctttgattttctttctttcttttttaacaattaaaattgtgagttttgaatgggtgtgttttccctgattcgtccgtggtcttgacgttctgaaaattctgctgcgttattaaggcgctggtgatcgggctggggaggtctggggaaggcgtactgctcatttctgtcttgcatgtcacagacccagggaacagtcgagagttgctgcttttgggagtcgtgtacctaaaacagcttgatgaatggaaatccttttagctcaaattttatgacacttggattctcaattccatttattaggtaatgttcccactgaactaagggaaatagcaccgttccccaaagatttaaaatgccgactcaaataacatgtaaaactttgtttggaaagagtatgtgattgctagagccagtcttgatcacatctttcaccccaaacagttgtcctttatggatggcttttaatgagaggatttctcccctaaacatgtaatctagtgatggggaatatatgtgcttttgatcataggatttctagatttataatgtcttctttcccaagttgaagaaatctgcagactgcaccctgagtcttatgctagagttcaatatatgagcagaagaggttaccctgcgacaggaaagagtgctttattctaacctgaaagagaaataaattaggtcagacaaaagcctagcgctgtcgtcagctggagaaagagccttcactctccagtacacagggccagcaatttatctgatgatttctctacttcatttaatgtttgaatcgagccagttgtaagcatgtagtggcagcgagctcactggaccactcagagatgaagaggcacggtgacctcgaagtcttgggccggacggtggtctctgagctgcagaaaaccgttaaaaatcagtttagcaatctccaatcctttgccttagaactcaggggagtttcacaagctgtaactaaacacagatcatagataagacaatgcaggaaaaaatatatgggggagggaatgggagggggtcaggttcttgtccgttggagactctccttcatctcccatggcttaaggatggaccttctggctgcctggttaggcctcacctttagctgaaactctccaaagactttggcctcgaggttaatgttggcttcacatctggggaggacaaggagaaagtaaatggtctttggggactgtaccctgcaccacatggttgagttattgataccggctgagcatctttctctgaagacggtgttagctgtagatacacttttgtatttattaatggggaagggtacagaagacactaggaatgaatgtctgtgtcatccagctgccgtgagtatgctttgtcactttgcggcactcttttgactcaggccatttggcctgaggtcctgtgcggcactcttttgactcaggccatttggcctgaggtcctgtgtgctctgtcctgtccctactccctgatcccactcagcttccttccggtcccagggagccaaatgtcagggagatgtgctcaggctcggtccccctcttgctccatccctccccaagaaacgccgtgtgctgactgcctcccttgagcaagtatgtttcccagggcgtgggtaaaaagtgccgagagcaggctatttggagacgcgtggaaagagaaggacacatttcttgcgtcttctgcacaagccagtgaggagggtgagcagagcagccttgttttttgctggcaaaagtgacactagatggaggcttgatgaatggtgccacattcacgggatgttggtccagcattttgacatatgctagtcttttgtgcagttgctgaaaatcaagaaattcattcttttttctttttcttgtggcagctgataatttgcttgggtgttgaatagccagcctgagctattttactgtaatgaaatcccagaccacacaaaattaagtcacttcaaagtaaaaaaagaaaaaaaaaatcctctcttttacataacttcttttttatggcccccttccacttattttattgaaatacaaataaatacatttgtgaaatgttctaatgagttttctactaaaacaacacgcagaaatgactcaagaaaagttgagtgccaatattattgtgattaacatgtgcctcagaaatggatgcactgctaagaattaaaaaaaagggggggggcggtgtcatgtttaaattcctaccttggaaaagagatgtcgaaagcactcctgcccttgctatttgctgttggcctcagataatccaaactcctccagctaaagccttgaggtccagtgtcctgtgtggaagcccttcttttcttccgcacctttgaaaaaagcataatgttaaataaaaacaaatctcttcatttgcccacaaagagtgcttttttatcacatcgttaggagcccgttgtggctctgaagattgaaggcatttgcagttttatagaacctgctaaatgtgttgagaaggattgctattgtggtaaatcttttccttttctttttctttaaagcgcctattttatttgtcaagacttttatttgtaaccttttagtaatggctgagacctgtgaatatacctgagtatgttttccttattcacttgttcttttttctgctcttgtgctggggagacccaggctcctgggctcagtttttggggttctggagaggtgtgtgcattattcttttttctgctcttgtgctggggagacccagactcctgggctcagtttttggggttctggagaggtgtgtgcagtgggggagagaaggcggttggactccatagagcaactgaggatatttttcagggagctgcttaagcatcctaaaattaggctggagtcctgcaaacaatctgtacacagggagaccctccccaaacattcgactttcccgcctggagtctgtagaccagaaggtatgggagtgagcctcttcctgcatctaaaacctcttcacggatctggagtttccacctcctggcctgcaggccaggcccaaagtttccgctgctggcggagtcagcgggaccctggtcattttcctgggaagcccacactgggaagcatgttttgcaccggccgccttcccttgctctccctctcacatgtcagaaacggcgatcgaggtgtgtgcctcagctgaggaggggcagacaggacctcatggggtggtggctgtggtatgtatctgtccctccagggaggcagcctttggagggtgtcaggagggtgcagagctgacctggagcaggctggactcctctgactgtctgctgagagggtcgagggtcaggacagagaggtgtgatctgggtcttgcttcctgcttcagactccgcctggctgtgccttcccagggtccccacccccaacttgtgtcctaataacccttcgagaccccctgtggacatcctcctgacaccagcctccctcttatctccatttccttctctgccaggcacttcattattccctccgttaggggaacttcataaaatctcttgtcgtgcctttaagcgtcatctagtcatagattattttctccaccaagaattgattcctgctctctccccctccacccttctcctcccccctccctacggttgttattttctcttggatccaataaattaaaaatggatggcagctcagaaagtgttgtgctccgtcgagtgtgcgtgtggtggcgtttccgtgtcgcctggagtcccagcccctccccaagtgttcacggagaggagatgaaaagatctcttcgtagattatgggtaagcatgggctcgctggcaagagctccctcttcgtaggaagcaggtgtaaagtctccagtcggatgcagagctcgggcggatggatgctgaacatttcttgtaaacatgcgtacacatcatgatggcggttgtgacgttggtggcacacgattttaagagcctgggacccatccccccacatccttccctttcccacccccgtcatcactgaaacaataattctgtgtatgtttctcctggactgtagcttagccattaaagataagagagttggatttgaattaatgcagggtaaggaggagcagcagcccacgtactgtgtatgtagcaatgcacatgtgtgtgtgcaggcagccacgcacatgcctgtgctctggggacagcaggcagcagacctctcggctggagttcccctaagggcaggtgcatgggcagttgttagagatgggccagggagggcggggtccttggcaccctgtgtgtgggggagtcactggccaggtaaggccctgctgaaagcttgcagctgctgggggcttgttggctgcttggctgggcctgtgttaacgatgtctttccatttctttcttctgactcaaattccttcccagcaaagccgaggcatggggaagtttgtcttgggatcaagtgcttcccctttcacttaacaacgatgtccattattatttgtgattgcttctaaatgcatttaccagctgggaggaggcctggccttgtaaataaaatgtggttttgttgtaaaagaaaatctaactcgtgtgtttgtgtgtgtgtgtgtgtaaatacagatttgtccctgcactttaggatttagcatttcagaatccgcctcagccctctgatatctgcctttcgaacaagttgtctgctgcatccattcatttttcctcttaatgagtcaaacatttcagcaattgctctactttattcggctcataatatattgagagcagcaatattctgcagggctgcccgacacttggggagcttttcatgaaagcagagatcatctcagaggaaaacctcatcttggctttatttttttaaggcccgagtttgctggacaaggctgcatgaggggctggcctgtagggtctgggaatttgaaagactgttttcattggtctttttcctggtgctttttcgtctctgggtggcaggttggaccactctgcctgttagaacagaggcctggctctctgaggctgtgcagagccgggagactcaggtgtccatagggcagagaaagaggggtgtcactttgcccttcccagggcttggctttctccttttatttcttccattatcgatacagttctaaggagggacacatgcacacatatgcaggcaccctacacgcctagcttggtatctgcctgccagcggaagtgaaaccacagtctttgggggtgtctacaaaggccttgaacgtgagctttcaggcccacttggtccacttactctgacccagaaatttggggctgggggtgactctgctgcctgatgttgagggtgaccttgctaccttcctgggaagtgtcgcacacagcaggccaaggcacagcgccacagcctgggtggtggggagaggaaaccccgttctttggaatcgggtgaacaccctgtcatctcaggggtttaactttcaacgctgaaagtgggaggggaaggagatattttttgtttgtttcttttcctcccagactcccttagaggcagtgagttggatctctggtctgggacgtggagatcccagctcagaactgagccctggaggcctggataatcccggggctgtctcggggacgccaacagggcctggctcccaggttggttggctgttaggacttgacgcagaaatcagagctgcagcacagcaaacggctttggacaccttcaaactcaattacgggggctcgcagggctgctgcatgaggaaagtgaaaaggcagagactgccaaaaaaaggaaagaataccagatgttaccaaaaataaaaaaataaaaaaaagaggagagaaaggaaaaagtgctggtacatagtcttggcaaaagacgaagctgaggaggaggggtgcttgcgaacaggcacgtgtgacctctgctaatttttaaattcatctgtgtttcttttgaattagaaaatgagtttgaaattatgtagttgaaaacctcctagcagagaggagatatttaggcttgctagaactcctactcaggagggcggacgaggctgaaaaagttaataaaaaagcaaacaaaaaagtaaaccgaagattaaattaaaaaaaccaagaagacctcttcgccctcagaaaggacggtccagctggccatgtggatttgtcgttgtacgtttttatcaaatcttccactgatgcaggagtttgccaggcctggacagggtggtatttaaaatagtaccaggtaccgcacctcgcccctgtttcctttgaattctcaatttcattatgtccttttttgcttttcagctcatttcttttgtgcctctctctctattttttaacaaaacaatattttgacatcctcctcccatttattagagcaccttctgtaaaaatggcgcacaatacatccttatatttctaaagaactgtttttacagtgctctcctttggctctgaaattatgtatatgtaattggtaattaaaggtgcgagcttttcaatataaacagtattgctcaatgttagatcattaaagggaaaaagaggcaccaaataattaccttttacattctgacaaaccgttcacaggaatccagtcttccctagaacctctgttcggtgggaaggttgtgattacattttaaccatagcaaagcatcttttcataaaataaattggtaaattaattacgtggcattgtcttcaaacccatttttaagtaaactcctatttctttctaaagtgtaattaatggtttctgggaccggctttgtgaggactgtttctttaccttgtaggttctttttcttagagagatgcagacaacagatttaggatttcctcgtctgcggggcgtttctgtactgccacatttctgatgcattctgcatttaattcatcgagggctctgtctgcttttctgtaaccacaggtgggatctcaaattgtagtttctcttctcagcgatacctacgtcgctacctattcacacatagttcatacgtgcgcgttgtacgtcttacatcgtcgtatattctgtattcagtttcacacatggactctcctaggccctgcataggctcgtgttcagaaaatagagaacagtgatttatgtgtaggatgggagatgccacagaattttttccttaaattatctgttctttggctctggcacttcaataacttcactgccacggaatgtattttcctccctcccattccttctcgccgttcctctgtggttttcattatccttccctaaataccatacaacttaaaatttacctgcctcctcgggtttcagacctttggctgccctctggcttccctgaagaccccgccactcgtgtcttctctacgactactgacatttgctctcgaaaaattccagcccgaatttgctcagaccccgaggggaatatgaaacctccacactgtccacttctctttatttatgacacttttggctgccgagtcttccaattttcccttgaggaggttgctgctttttgaggcatttattagcttccaaatatttgggtcctaggctccctactccctcccccacaaaaaaaacccaagagaaatctatcggctgctaaagaaatataaaaacatacagtccattgaaagtgtggtttgatatcttccaagaaatgcttttggagtctggagaattttctttctttcatttttctgggagtgaaaataaaatcaacaaacagaaaaggacagtggggagttgatgagtgtgggggaaatctacagagaaatggaagtctgaccgggcctcgggtgcttggcaggagagcctgcttcccgactctgcaagccggttccagcctcccttctgctgcagtgctttctcctaagatatttttttggaacctgacactcacttgttgctttctgagcatgtgggcttccttctctcctaaggacgggcccttagacgcccatctgggtttctgttttctagtttggtgtgtggccaggtcccaggtagaggaatgtgagtgggattcgcatgaatggggagggcatgaatgaaggtgtaagggatgggaggggtggggctccagcccagcagggggaaagggctccagctcactggttctcggccctggctgcccattggaatcacctggggagtctgaaagactattccgatgtttgttcccagtgtaactggtcaggggtgctgcctgcgccttgggatttttcaaaccctccaggtgattctcagatactggaaactttgagagacacatcacgacctcatgctgtcagcagccagggtgtgtgtgtatgcacgtgtgtccgtgtgtgttcttatactacgttggggagaaactggcagaaaataaactagaatgcagtaagatcggcactacttacgtggcaatgcccagggggcacgacgttgctcctagagcctcagtgtgcccatctgtcctgtgggggatgctcaccagcccccaaccccggggaggacctggtgagctctggcagccagcagcagagggggctgcttcttggcggggaaggggtggaccggaagttgggtgctgtgaccgcctaagcccatctctatcttctctgccccttccctttcttctttctgtctccagcagaggctgaccatgtggaggccgccatcctcgaagaagacgagggtctggagatagaggagccaagtggcctggggctgatggtgggtggccccgaccctgacctgctcacctgtggccagtgtcaaatgaacttccccttgggggacatcctggtttttatagagcacaaaaggaagcagtgtggcggcagcttgggtgcctgctatgacaaggccctggacaaggacagcccgccaccctcctcacgctccgagctcaggaaagtgtccgagccggtggagatcgggatccaagtcacccccgacgaagatgaccacctgctctcacccacgaaaggcatctgtcccaagcaggagaacattgcaggtatgggatgctgcgcttgcctggttgctgtggaagccacctcctgggtcccatgccctctgcctgagtgtgctggtgcaggggaaggcccaggggcttccaggatggcctctgggccaccagccggggctccccctttctgagggtccaccatccaggtgaccttcaggaggagacaggcctggggctcggggaggcccaaatggctgatggctgcttgcttttggtgaggggactctgtctcgggggctaatccagaggtggtcagaagcacagaatgaaaatttggaagtctggttggccctctctttgctactgatcttggcttagtccctgattttgaagctagacagttttgggttagagtttgtcttcacaacttggacatgttagtttgcccatctgtgaaatggagctaaggaaacccacctcattagggttgctgtgaggacgaatgagctgttgcatgcggcatgacctggtaggcacttaggaatgggagtgctcattctctcccctctcctttctctctggactcagtttcccatgtgtgaaatgaggagttaggccccctgatctcagaggttgcttctgacattgcccgaccccaggggccggtcccaggcaggggtgtgggaacttgttggagcactgtgcccgttgggggaggttggatatgccctttgacatgctcactcatttgaccactgggacagctggttttaccaccttgagaacaggtctagggcccctctgtccccaggcgtgggtctgctcaccacagtgagttagcatgaagtccctccctcttggccagcaccatggcatgctggagcctcttccagggagccgctgctctctgtgcaaaccagagtgtttgtttctggtttatacttctgagcccaggaggcctgggggagaaaggagggcctggccagcctgggttccctaaaaagcagcagcctgtgctggagcaagatgggcatcagagtttatgcagacgagtgttcaaatcctgatggttgactttggattagccacttcatgggtccgagcctcagtttccccatctgtcaacagaaagtgataatagcagcaggcctggtgtgaggattagatgagcaggggctcttaatcagtcttttgcccgtggcacttctctctcagaggtctcgtctggctctgcggtgtgcaagtaggtggctggctggggaaacgagtgcattgatcgttaccatgcttccatcatggaaggtagcatgggctctggagggactcaggctttcgatgcttctaggagggtgagatggatgggcatgggcactgatcaagacccatcacccaggacgcagtcagggtaatgctgcaagcctgtctcccccacgtctccaaagctttgtgacgctgagcctcactttgctcacctgcacaaggggcttagtgagccctctcttttgtggggagactgtggtggtatgcagagtcctgcagcctcatgccaggcactggggagacatcagtgaaccagattggcctctgggccttgccttctgatgggtgccctagcatgaagtgtctcatacactttccaagatgcaaggggctttgagacatgtccaggccaccggcatgtaaacactggcttctcagagtgctatgtgcacctgagcagcgtctcttcaccgggctgagccatcaggcgagagaggtgctgggtcccttttgtctttgttggtccacattccagggacagttttacctgtagtatcgacgcctggcctcagtgcacatcgatctttcaggggtggccttgctagggagactcgggccgcctatttatgtttccatggaaagatttgctgcttttgccaaaaacatccaaatcctcatttcacattgaaggcatttcccaatgagaggctgcagatcactgtggcaggtttgtttaagaaagtgactaaatgtgatttcataaaaggcaaagctaatctccaaggcagctttgtcctcatccttccaccccctggcccccctgttttgttttttttttttttttttttttttccaggttgtgatactgcagcagcctacagtatctttattttatgtgtgacgaaagatattcttggcctttctgttcagcaacaggacgaatggatttcttcattctagaagaaatatgtaaaataatcccttagaagtctaaagagatatgtttgttcaaagcatttaaaatgttattttaatcaaaggcacaaaacagtctacatgctgtgtcagctgaagacgaccatcccattttaacagcacacatgcgcctgccttctagttcccattcctcctatttccctgcctacttgggcagcaacttttctttttttatttaataaaaaggaaagattaaagaagaaaacttcagtggctcaaatgtataaagtaatttaatatggtgggagcattaattattttagcttaattgaattccgaggactgcagtagttgcatttttgtagacaagccctgtttattatttctctgtgtagattaacagtaaaggaaacacagataactttcagttatttattgtaaaataaatgtgtcaattcatgtgtaaagcaagctgctcagagataattgagtctttatattttaagagggggactaggaatcacgggcacttctccgcccaggcttccggaaacccgtccagctgctgcccacgctcctggcccccgggccggctgtccctccaggcttctgcctcctggccggggctccaaggagtcctccaatccctccatgacctgctattgtccccagggcctcgctggccccggccagtagctggtgagcgggtggctgttaattcttggactctgcctctggctttggctgtccaggctcagaggagtccagggtgaggtgacctcgagggtcctggtggctgtgagggtcctgccttttccagggccagcaaccttcctgatacccaggcaggtccccgctcttccttgctaccaggtgcttctagaagtggggactccagaggcagacccgaagggggttcctcccacccttaagggagatcccagggtgagaactgcagggggattctgtcagtcatcacactaggtcggggaccccatatcagctgtttcctcgggatagtcattctggagagtaattactgttattttttatttttggtaaatgatagagaagtaggaaggtagagggaggaagtttctgaagctttgttttctggagggcattcattcattcattcagcaactgagcacctggggcccatcctccgccctgggtgtccccacctggatccccaggtaaacagcccccagaggagggagcgggcgtccaacatggggataatgggcagagtgtgagctggcagcagccctgctcttgacgtgtgcattctggatccagggctccactccctgctgagcattcgctgtggacggaggaggtccttggaaatttgtttcaggcctctctggggatggggcgaagctggtcagaggcagggtctttagctggtggtctgactcagggcagctatggtgcctctgatacatcgctgcctataggtttacattctttatgtttcttaaggttcctgcctgtggcattctccctgcctctgtgggagttcaggggagcacaggacccatcctttgggggagctgagaggtgttccaggttttgcaaagagcacgtggcgctgccaagccgttatctgggaggggtgttttgaggaggggtgaggagaaaggggctttcagggtgtttggggtttgaaggctgtctgttgctgtgtgggaaagaacacagcccgagtcagagccccaccctgctccctgccagcctccggcagccacttgaccttctgagccgcggtttcctcatctgtcattgtgacatttatgatgagtgcctggcacacggtgggggtaggtgtgctgcaaataggagcttttcctggcgctcggctttccctcctccgccgcattttcaggcgttagagcagcttgcaccggtcttcttggcaatgggctcctgtcagggttgggacaaaccgccactgggttgtgggactaaatccaccatcacaggcagtgtcagcatggagtagactctctcccgtccattctgccttttgttaggtgactgtcccttgaggatctctttgctggcggtgcactctgaggagccggcggggggtttcaggtgagggagcacaggctttggcatctcccgggtggaatcccagccccatcactcactgctggccacctgtgtgagtcacttcacttttcttggcctccgtttcctcgtctgcacctcctttttgggttatgctgaggatgaaatgaggaagcacccacctggcaccggttgggcctgaggcagatgatcaagaagtggatgcttctagaaagccaaacacaggaaagtgtggaccctgcttggcagcatgccgagtacgtgtttttcttggtcaaaaccatgatcacttacctgggatctctctcacggtgatttcctacaggttcctccatataattctcacttgatagtcactgaaggggaggcgcttgatcaccaggaatttggttttgcctgttttcagcccttccataaccaaatgaagctacagagggaggaattaactatcagctgtcactcataggcctgcctccgtaaccctccaagtcctgaatgtcagttttctggagaagtgcggagacaggcagcaggtgacaggaggtggcagatccctctgggcttggaggtggcaggcagccctggctgcgatgtccctgcccacttgatatgtcttcatccacaacctagggaggacgtgggatctacctgggagattctcttagcaggtggggcacagataagggtttggtttggggccccagtgacccattgctaagcaaaatgtgtgagagaaaaggacttctgacgagcccagggatttacgtgctgctttgggaatgttctctccagacttttaaaaataaataaaataaacgtgaaaaaaaatattagcttggctagtgagagaaactaaataacttgcttgtgctggaaactggagataaaccccactcgcaggttgccttaaaaaacttgcacttgatctatttagagttgttattttcccttcaaattaagatgcgttaaatccatgtgtgttgtggcatggattatctttttttattattaaatcatgacagctaattattagttctgtctgcaccgaggaatagtgcagtgttctgtctgagggacatggccctgggctcaggctggggtttgggtgttgggatggctgaacagggcagagtttgggctgggctggtgggtggtggggaagaggggcgctacctggtattcctcattgtgctagatgcttttcttgggttatctcacttaattcttcaaccttgaaatatatatttctaaccctactttgaactggggctcagagaggttaagggagttgctgaaggtcacacagcaaagcagagtcagactcagtcaggcctagtttccttggatagcaaggggtgtggaggattttggggatgggtattctaactctgtctgtctggctggtggggccttgatggcgggcaccacctctgaccccatccaaaatggtctttgaagcccatcccagatatgaccctgtggatacagccagaagtcctcagacccccagggaccatggccttcagtctgtggcttttgtatatactgtcctgtacttcctaatgagggcattggagagatgggtggtgacaaagaatgaagtacagtgtaaattcaggtgcacctgggccagaattttagattttttcccatatatatgattatttcttttattttatattcactgttgcatagacttttcccccataaatacaaattatttgttttattttgtggaattgtggttttgccagggtcttgctatgtgactgtcagccaactgtttgcctccccaggtctcggtacctataactggagataatgttccttgtgttttgggcttgttataaggtttgattcagacaaggtatacatagaacaggttcctgtgggttttagctgttgttgataatggagatcctgccggtgggatccagaggaagggtctggcttcctagcctcctggaaggaccttgctgccaactcttcccttctcacctgctcagtgacttgtctgaacttacataactagttactggcagagctgagtccagaccccaattatctcgagtcaggacaggtgactttttgccatcccagggtgcccacccctgtagcttgaggccatctcccctggtggagtcccagtttcctcagctgagaaagggggtgagcccttcctgtcccactggccttccagggaggcggtggacccacctgccatgtgaactgtgcaaaccagagtcaagagtgtgtgccgctaacatggtgacatcagcaccgattgtagttgaaagttttattggattaaaaaaaagagagacaatactggtcacataaatgggtgtttttttttttctcttaaggtttgaggccttatttattgttttatgtacgtagttccatacttccagcagtaattcaggaaacaggagagagagataaggtaagaaaaagagagaaaggcagctgggctcccaaggggtgaacttaaccaacattcagcctgagttaatattattattcttagtttgtctatttgacagtaaatagttagtattgactaaagtttttttaatcaggcatttgacagcttttttgagtggttgttgctcatttgcatgcttggctaatgaattaaccaccaggtctagaatctgttaggagtgggctctgctgataatctatagaaataaggctgactggctgtcaccctgtgcctttggggtcatcttttcactgaggaaacaaagagatggagtttttcctaatttcatgtaaaatttatttatttatttttgagacagagtctcgctgtcgcccaggctggagtgcaagggcgcgatctcagctcaccaaaacctctgcctcctaggttcaagagattctcctgctgggcacgggggctcacgcctgtaatctcaggactttgggaggccgaggcggggggatcatgaggtcaggtgatcgagaccatcctggctaacacggtgaaactccgtctcgactaaaaatacaaaaaattagctgggcatggtggcgggtgcctgtagtcccagctactcaggaggctgaggcaggagaatggtgtgaacccaggaggtggagcttgcagtgagccgagatcatgccactgtactccagcctgggcgacagaaggagattccatctcaaaaaaaaaaaaaaaaaaaagattctcctgtctcagcctcctgagtagttgggattacaggcgcctgcctggctaatttttgtagttttagtgagatggggttttgccatgttggccaggctggtctcaaactcctgtattcaggtgatccacccgcctcggcctcccaaactgttgggattacaggcacgagccaccgcacccagcctgatgttaaatttaactcatacttactagatcttactgtgtgccagacactattctaaagactctgcagatactaactggtgtaatcctccctatgaccttatgatatgctaatatcagccccactttatagaagaggaaactgaagcccagagatgttaagttatttacccaaggtcacacagcggtgagtagggtcccagggtgtcaactccggcagttatgttcttcactgtggtcataactgtgcctacattccctccacctctctgccccacgagggtggtaaatcaggtattcctttcattttgcagatgaggcaactgagtcatagagaggtaccttgcacagttgtccggtgagtcaccagctcagttgcgcctagagaccaggctcctgggagggagagcattaggaaaaatagctaatgcatgctgggcttaatacctaggcgatgggttggtaggtgcagcaaaccaccatggcacacgtttacccatgtaacaaacctgcacaccctgcacatgtaccccagaacttaaaattaaaattaaaataaaaaaagaggacaggctcctgacttcccagggaggccctgggtcttcactgtgtcatgtcccaggagcccaggcctcgtgggatcctgtgttcttgaactgtggctggtgcaggccctttctgctcctggctgggcaatgagtgatttccactctgaggtcgaatcttggtgatgggacttgggttccagagtggggtgaaagaaccaagacagtaggcacccacctgtcctgcacacatctgtggtttcatgttgactgcattttgggaggagctggcccccacctcgtcatgagttacaggcaagtggccctgttgagtccagagtggggagaggcaggcacagtggactctggctcgagacctaggatggcatcctactgtggctggcatgctgtgtgaccttgagcagacagatcttccccgtctctggggctgagcctgctgggctgaaatgtgagatggagccaccagtggtttctaacagctgcaagagccaggcagaaggtcgtgcatttcccacctcaattcctttcccacccagtagttcccccaactttcctcatttttcacattaatgaggcttaggagtcagttttctctgaagaaactggtggtgaaaatgaaaactgttagattgaaagcttaggtctttctgccccaggctgtgaagatccttatgggagaatttggtccactcaccgtgaggtaaacagttgaagctcagagccccttgtgtgaccaggccctgtccctaatgtccctgtgtggtttggcattcttttctttgtgatgagtgtaccctgaattgtataaacctcgggccctgcaagatctggacccaccctggcccagagcctgctgggggcggccagtgacctctgggcacacagggagtgggagcctcctcaggggagggtgtgatcaggacttgcaagcctcgagttggacccagggaagaagaggccttgctggagaaggcaaggcacccgaggcttcattttattttgtttttgagttttcttgacgccttcttgctggtccgctggttttggtctggagggccctggggtgtctcagaaaggaggagtctgtgctgagggttgggagaggagagcagggagggagggaggagggagcccttgatcagccacaggtctgggaaagcatctgcccctcgctgctcagacagctgggaaactgggaccacagcctcctctgggcggaaaaatagtaacaaaatagcctttttgttggaggtgaaaagtcagactcccccactcctggtgtggagaaaaggcagcagccaagggcagggtgagccccccagcccaggaccgcctgctctgtctctaagccaaggcaatgtttgatcagggctgttttccccccatcccctgccctgggggctgagtgcctgggcagcttccatggccttcaggttgcgggtgtggacacaacctcaaaggtgcaggcaaacaggtgcgtgggtcagcgtctgctgaagatgaatccagaggcacagagccctaggagctggtagccccagtgcctaggctgtgcctctagtgatatggcacagatgaagccatccgtccaatccacaagagtgtccagaaaacacgcgtctacctcctgatgactgcaggtgccaaaggcatcctggaaaggagtggagaaggtggctttatttcaaagcctttttcagggtagagcacacctcctggagagtgtagccagccaaccagggattccaggctcctcccttggggtttgagggcagagactggctgtcctgggctcagagagacaacaactgtctgaattcttctctgttcgggagaaaatgggacaaaccttcagtgactccctgccaccttcagcagctggctaaaaactgttggagttggtaaacccagcaaaactaagttttcctggggctggagcgggttcttttctcctcccacctcaagttcaaagccagccaattaagaaagctaaacagtgtggtcttctctctgcatcattggcttgtaaaactttccctgcaaactaggcgactttatttgttgggaaaacgaagtatataattttcctgacctggcctttgctttggggagaaggggaaagagagaaagaagtcatttccagaaacagacgggccccgaggagcaaaacaaggtccacactccagcgtcagggcagcgtagactgcagcgctgtggtctggaacgctgaaaacagcgtgttgcggggaggcgggacgcgaggctccaggctgcggagccctctggggcctgggtcactgtctgcgaggtggacatcgaagtcctcccaattctgctttcgaacctctgggcgccacctgcctccccgctactgcaattttccggtttccccgacgtttgcaacttgcaagtctcctctcacttccttccatctccagcagcccctcctcaagcttggcctcctcccctccccgcgacggtgcctatcccgagcaaatcatacccatcctctccgccgcccgcaagacagcctcccccgccctgcccgagggggacttcaggcccctccctccaagggctcaatggttggggtccatagcccccttcattgccacacaggagaacacaatggccttccccgaggccaggggcgcagagctccgcgggggcggctgcatctcccggaccccgcacccggcacggcgcggacactttggcaacttcaaaactgcgcgggggcctcccctgcgagcggtgcccctttcccggctggccctggccgggtcgggaggctcctcggcactgttcccaggcctgcgggcgcgcctggcccccgcctggccgccggcctctgattcgcccacggccttgcgcccatcgtccacctccttccctctctctttgacccgcgcccgctgcgcacgttgattgtgccttggtggggcgggagggccgagagggctcaaggtccatgcataattcgggggcttaatggagcagctgcctgagccgggcggcgaggggcgggcggaggcgcagctgacccagcccgcgtctggcctcgctgggaaggcgcgctcctttcttcctcccctgacactcccctcccccactcggcctgggtccgaggaaggcggggggtgggcgagtcgaagggctagctttgggaaggggtttccctcgtgcatccgtgcaacttttgctttggggggcggggggcatgcagtgaatcggagccgcctcgggaccggctcctgaaggtggtggaatgcaggcttcctcggagcactctgcagccctggagtcttttttcccggctcctttcccccccgcccccgtcggtccccagcccagcagcagcccagcgagcacgcctctggccccgggccagcccccttccctggcagccggcggagatggatggaggcggagacccaaggtcaagggcggggagcctgccggccccgggcccctttgtgcgcacggggccgcccctcctccaccagtcgcctcctctctggcccttgggcgctctcccgggtgggtgaccttctcgggcatggggaatgtggaagtggtcccctccccgaaaccgctgcgcgccggtcgggtcgcttcgccggggtggcattcgtcccgggtgctgggggcgcacggggatccctcttccgcccgccgccattgccctgatgagtggcgccgtcttcctcagcccaccttggcgggacagagcgggcggttcccgggatccaggtgaggccgggacggaaggagcctccgggagttcccttgtacaaaaatgtgatcatccaggggcaacagccccatctcaaagtggggatttcgtggggaccttagtttctttccgagtgggagaagagtaagcccgcttttctcaaggacaaaagtgttttcccaattgtgtgggaatggaaccctccactggagtgggacaccgaagctcctggaattacagggatttaatgtcagtcctcctttcagcctgacttctcttaggataacctcttccaacaagaatttgtatgcaaatcgtcaccttgctaggagtctctagttttgtgtgttaaaaattggcctccaattgtttaaagcacttcaacaggcccttaaaggcccagaaaagcagtggttggacgcccagcctgtccaccacaaagctcttaagaaaatgttcaaacattttcccaaagctgttactctggaaataaaactgtatactgttcgcctgtagccgattaaaagtttaccttcactgtgacagcttttccaggctaggattggacccacatctctattttccatttttcagaaataaatctaaaccaggcagaattgatttgctataacaagagtcaaggtagtattaaaaatatgcgtatacctatatacttataatatgaaacagtatgttacacttgctgggctctcaaggcgagtattgtgtaaacggcaccgtcatggcgttttgagtaagagttgattttaaaatctcagatttagctaacccgaactttgagcagccagcttttctggtagaggaatctgaaggcatttgtcaatttattttttgcaagccctccggaaaaggtaacaaattcaacacttgggagctcaaagctactgccagtcctggacaggaaggttttcatatctgtctgaacttgctcgctgatttctcagacgtccatttataacagtgggtctaacaagatagaatccgcctttgaatatctgtaaatacgggtaaagatcacagtccagcactcataatggtccaaaacgaactggcagattctcgtgtttgattaatatttatgttaccggattcctttacagaaagaaagatgaaacgctaattatgtgtgtgtgtgtttgacgggccccatcctaggtctctgcagttcatttaaagggatgtacattttaggatttttggagactaggggtgtgtgtgtgtgtgaggggggggtaattgttcatgttttgcttgaaagacaggtaacctgtggttggctgaagtattggctggtacactgagggagaggctgacttttcattttccttttctttattttgacggctcaacagtgatcagaattacgcgtgatttctccctgtatgtttgggctaaggcttggacagtgtggtggaaggctcttgttcaggatcttcctcgaggagaactggtagcccccagggtgctctggcgtctttgcagggcacactttctgcgcctgagtggcagggtaggctgccctgcagtgtgtgcttccgagccctgccatgtgtctgtagggcactttccttgctttttttttttaggagcaatgtgtgggagatttgcctggaaatggggggttctgtcagctggatcatgttgaaataccagtgcaattggtagccaaagggatcctggagaagcctccttcggaggtgctgtgttaagcatcttcaattttattgctttgagaagcctagatttttgtataggatttcctacaagggtgcttccagagtggcacctgagtcctgcttagaggttcaataatatttgttgttgctggagcgtcaggggccgtgtcgttgttaaagccgcagaatctagaggttggcatgtggtgtcggatagtctcgaatgcattgacttcctaaacagcccagggcaaaccagttcatctgttagttgcttcatctataaaatggggctagccaattgtttacttccctgtccctgtccagatatgaaaacaaacccataggtaggagtgaagcaattgctgatttcaaagacatcataaaaatggagaactgttattgttcagtccgtgggggcagggtgactaatttgcaaaagggaaaggaatcaaatagccgcttctagagggtgtaattttttactgcaaggaagaagaattaggggctttgggaggaggtttatgtggggaggggggcacttggtttttcaatttagtaacctgataccaataggaaactcccccacttccccattcattttagaggagtgttcccccaccccagctccttgttattgttgggactgtcacatgattcagaatcttgatactgaatagtgtcactgctgctcttgacctgaataccctagaaaaggtattttttcctgatatttggtctcaggccccagaaggagaggagctggacaggggacatgtagacttggattagggaggaatgcatacagcaagcagtctttaaatgcacaggcttgctaggtgccggtgaggaaggaactcaaagcggaccagtgaggaaattctcaccgcctctcagagctaacaaaaattggcacttatccccatggagcacacagctgtctgctatgaaatggtaccttcactagggaagccagagggcctaagtgtcctattggggctccattttactttttggttgttgcttttctttggaagtgtcttgatttcttttttccagcaaaagctggattacttgaattagatttttcataaaataacctctggcagggtccaaaacctctggattagtcttgttagttaggaaatacagaagctttctttatgtatttggtttgttcaccctggctgggccaagactttgggctggagttgtggggtaggggtgggagagtgtggtcctctcctttccccatgggggccttgacccagcccctgttcactggcattggggctggagtggggaacggcagatacctggagtctgcgatggtgcaggcttggagccaggagctgtctggtgcttcttaattgaatacagatctaagtaaattccacgtgggcatgcaaggctgggcaaggaaggccgtgatattcccctctccacggctggactcgtaaccctcccaacctgacgggcctctccgcctgtcgctgtacccagcccacatggtttgcgagaaaaggtagggaagcagggggacaagatcatgcaacgcccatgtaaatattgtctgtatgaactgggtcttccatcttttgttagtggcagctcgttaattaaccagcagattagtgctgccttcttttgacacatgcatgtattttggggtagaggattcttgttctcctaaaactctgaaccgaaccgctcagaaagtcttccttcagcgccgcctgcccctgctccctctccctgatgtcctccccactccccttttcctgtccccttctacccaccctttccttaaacccaagtgggcttgtagtcgagtggaggacagacacgttaaacacagctaaataaatcatgtttacgcttggcgtcttcggtagtgaaaaatctgttggctgtttttacttccttatttctcagcatttgcttcctacctgcttttgaccacatgcccagaaatagtagttttgtcaaatgaggggataatgccagccagcctttctcgctgccaaggaagctgctggattttgcaaaacagagtgacgttttttttagtgacactgatgtttttttcaaagaaattaggatgtagaataagggtattaaaatgcacttagggaagggggaaaaaagcgacatcgtcccccctacagcacagggacacgtagcaagcaggtttagagaagaaaggtctcatttttgtttgcacttggccgctccaagggcaggaggcagctgtcagaggcggaggagctgagtcaggttcccttcgtctcagccccaagacttaatttttctgccattttggtgatgtggtgcgaagatttttttttttctttttcttttgggttttgtgtctgtttagtctctgaggcctcctgagcgatgcttgctgctttcttcctctgagattacagctagattctcgccccgatctggaattggagctcgttgggatcctggctacactatgattgtttatgtgtaagagtggccccggaggcctccccgcctctgggctcttatctacaatgttgttttggggtatatttcatgatggggtgctgggcagagaacttcctgggtaattacagccaaacagaggctgtagatttaaaaaaaataataaaaaaacagtttcaaaaccaagtaagtggcatataaatactgggcactcctgtagggagaagaggcttgtcttatcgcgggatctttgcagggtttctgcagtcaattctgtctgaggtccagcacatcagctctgtttcaaagacagctgaggaaaaaaaaaaattacaacaaaatcaaagtcagcgtgctatgatttcccccaatttctaatgggaatagtctgcaatagaaatgatatttccattgaggactgcgctgccggtttctttaattacattaaatagcggtataaacctcagctgaatgtaaacctctgttacagcggcgtctcgcgcgtggctagatgaatcgtaaggagcaatattcctagcgttaatgtgctaacaatctttattaaattagtcccgcgaagtgttaatttttacacattttgttgtgcacgcactgcacgtcaccgctagtgtgttaggagatgaaaacggatttcacgtcaaaaaataagtaagaaggtggctgtcagacagctcccttagaagaaaatttgtgatttttgccatcaaatgttacctgtgctgaaaagaaggcttacgatatgtatattaaatgccatctacatacagaaaactcagttaaaggaactactttgttgaaagtaattacaggcctgttcaattttttagtcagtgacatttcagacttggcttaggaacataaagaggccatagaaaagattttgttcttatgtaatgcaaagcactgaacctcggtcttctataagtccattaggaaaaggaaaaaaaatgaaagggagaaaagagatttagtcataaacaaaatccaggggagagctgtattttttttattacaatagtagaaatcaattgcctataattctatcaaatgcaacccaaaacaaaatgtgcatttaaactatagcagggtcctcctttttacaatttgatttcttttctctctcttcctttctttctttccttttttctttctttttaaccttctactaaccaaatttatttctgttccatctgaaacaagaaaccctgctggccctgtggttgtctgttcccttatggctcaggtagagttttatggtctgatcttaaaaaggttgatgatgcttacattcctcatatccatgactccatctgcacctgaaatttctgttcccttttctggctgcttcgggcttgagtcatcccaataacctccttgctgggcactccgttttctttatgttctttttattggctgtgctgtttattttcattcttaattctccgggattctcgcagctcagccttcctccttctgtttattccattgcactgtctgtacatggccgttgagcaaaagccagcattggagttcatgggaccttggaaccacaacttcctgaactccccagtttgtaaacatgttttagggagggccagattcttaacacgtgtcaggattcagtgttttccgggtcattcctcaaaggtcaggcacagtggatgctgaggggatagaaaaaggtgtccttagtttaaaactcactgtaggcacccaatctgaagatgagtttcctggtttttgccttgtgtgacatgtgagttctatcttaactgtgtatttccactcccacccccagctctaaattaatgaagaaataggaacatatctgagggatgcctggccaagcttgtcattggagtctggcccctaagttccatctgggaaagggctacagggtcccaacccgaagtcccacattctttatgcttggtatccagatgatttatctaacactttacttcggtttgcagcctgccttcactcttcgttgagttattcttcatgcagatgacatgtagtatactgtttgtggctctggacgcaactggagagaaaattactgaaggatcttgaattaaattgtcttagaaaacagagactgctgaaggttgaagcagctaccacacctctgatcagaaaacctaaattgagaggaaaaggggcaattcctccattaggtattgactggctgattttgctggtgagatttggagaatctctcagttgcaatttgtccttgccctctgtggactctggttggatgcgcgcaagacatcttaacatgtccacgttgctgatagatgagtgtttgtgtgtgtatgtgcatatgcatatgtatatgtatatagaacctctcttatagataatagaagtgcatgcacacatttttctaaccagtgcgacacatggcttcaccttctgttgtcctcaggcctgcccattccaggatggtgggccccaatttggtggaccctgcctgcctgaggtcacccagaggagttatattcatttttgtatctgtgtcctgaagccgtgatgcctaggagcaaaggaatgatcagcgtcccggctggaggacaagtgtttgtggtttatttgcatttcagtagttcggaacactgcaggattttccccgagagacaagcaaaagaagagtccaagctgcgtgtccctcactgcgcccccctaccccctgcaaatgcccacttaggggctggaacggccagccccctccacctccgtggttcacagaagatggctgagggatgcccttcctccccatcaacattgaagtgtcctctgctccctcacaggggccttggtgttggaatttgtgatgtaacttcaccagtccttgggtcagggtgcagaaaggggatcagcagccctggagtatttcagctgcctgcatcttgaggaaattggagttggcagtcaatgaaacaggtgcttttggacctggggaaggggtgtgcccaagcgtgcctgcctctaaattgcaagaggcagctgctggggaggatgttccctttccaatctctggtggaaggaggagaaaggttttggtagtgtcggtgggggacgcgatcattccttggctctgcctctccattttctgggatgagatttcggaagtgctccaagaggaggagcttagagtagggcagcctggctcagggtgctccctgaggtgtgcttctagtctccctcacggccaagccttctcacggtgggtgcaggtggataccctggtggccacacagggtcgtgggtggcctgtggggaatctctggatggccgtttgtggaagtgatggtagaagtggtctcaacccaaagatgagcagttgcccatgttcctggaggcccctggtgaacccacctcacttcctgcagcctggcactcctcagtgaccctctctggatccattagggcctagatggttgatgaaggatgctggacaggctctttcacctgcatttgaattcttaccctcctcagccacctgcaaggactgctgtctttcagctagccgcccacatagaggccaaacgtagattcgaactgtttttatgtctcccgtgtaatgaccccgaaggaactctttaaacacagctgtgcaaacccttgtgagacctgactttcccttttcgttgctcttctttccaaggacacctacatgttcacccccaagccaaaacccgtggcaacaagggactagagacccgtaatggccatcgggtgcccagacaaaacagtggtgtctgatggagaatgagaatccaggagtgggaggtggggcctggggagctccatcgccctgcctggcatttctaggtcccccagatgctctggggcagtgagctgagccacgtggcacacccactccctctctggtcctgccttggggacccaccctagacttgcagcttttcatggtaacctgcgtgttcacttaaatgctttgctttccctttctgctttatgatgatgattgttggtatatattttacaatgaaatggaaaacaagttccagtcattgctggttcctagaccttggtaattaaaagctaaaaaaaaaaaaaaagaaaaaaaaagaaatgaaataatacctgtggagtgaaggaatttattttttgagtcaccctcaaccccaaagacctgtgtagctctgaaattgagcaaacgaagaagtctccctagaattgttcttctctattcctgctgtctcagccactccccctctacaccccccacagccccccaaaaaaagggattgagagaaagacaaatgatgagagaaggccagtcttgtcaggtgaacacccagttcctgtctcatttaaggttgcactccacttctttcaaataggaaattgccaaaatggatgtcatgggctgctaattagatgtattttaactgcaggatcattttaccagctaatactgttattatgtgcttcaatgtgaacccatggtggagctgttaaaatatgagcgtgcagtcttagcagacagctcttggagccgttgggatgggtggagggcgcttttcctcacggccctgaagatccccgggccaggccctgtgctgaagatcagagccctttcagcttctcaagaggtgccccctgctctcctaaagaccatcttctccttgtgtttagaccagggcctgagcctccaggaggcctgagctctccagcgtcacatcccctgccctctagacatcagggttccctctggaccagcctagaagtgccagatgaccacagttcatgcctgtgcctacccagaacaggcaggcctgaatctcacacactggagtttcaagtctgtgctggcttctcctccatcttccctctgtagcaaaccggaaaaagaatcctaatttcccgttggggtgggaggagatgagctaggatcaggataatgatttttaaatgtgagccaggcatttgacttcacgttatttcttttccccctcacgctcttaatacttagcattttttttctatcatccttaagacaaagtagctggcaaaatatttaagtgatcagaaaaaaatatttttatttgcccgcgtgcgaattgggttatctgcctatcttgtttatgaaatttggcgctgcctttcctgcacagtacgttcgcctctcaaatctttcccggctcccatttccatatttctgcgtgcttgttctttgttaatcacttggcaagcgcttatttgaatattaaaaatttctttaatcatcaaaggcaggagcacagtctcatgaatattcatatttttccccctcctcagactggattctagttcattaccctgcagtaaaagccaaacagccatcaatcgccctcattacaggctctggcgttttgattggctgcctgctgcccagagctttttttaatttttttaattttttcccccttctcctatgagctgtcttgtacctgccaacaaccaaaaaaaagaaaaaaaaatcaacaatgcaagaataaatttctctggttggaaaacaactttgcaaacttgtcaaacagtccttgtggcttgctgctgccaccgctgtagcgtccaccagcgccacctccttccccccgctgtccttcccccaccaaaaaaagaaaaaagaaaaaaaaaagaagcccaagataaaagagaggggggagagaaaaataaataaataaataaataaaaagggagaaacttgagcctcagagatgaatatttgtcaagagagttgacgtaagtttcatttgcataatgactttgtacttctgcattaataaaatttgcatatgaagccatgttaattactcctgatcatgctttttgcattcatgcatagtaattttctccgacttgtgagaattaatgtcttggcatggggggagggggcgcggggactgtcaggttcccttgccagtgtccctcactcacacgcgctgcctccctggctgtctccttccttgatctatgactcatttctgcactatcagtaggagttctcagcttaaaaaaatgtatcaattgaaaggcaccagtagggagaaaaatactcgtctcctgcacagtgtattccagaccacctctctccagctctgaacatggaatctgtaatcctcccatttgggaggggacgccccagaggcttcaggggtggggaaggctcgaattccccctgaaaccgggatggggcttttccaggcgtttttgtgtctccacgctcctcggcggtgggcgtgttcgctgggtgagtgcgcatgtgtgaggaacggagcaggagcctctgcaaagtccctctagaagagagacgggtgacagacccctgtggaatgcttaaacccatgaaggcatcaagaatgagcttatctagcattgccctgttttggagcctaagaagaggcattttaggggccttatttttagactttttttttttttttttttttttttgtgcatagacctccaaagccagcgtttttttgggagtgtcttgcaggtctttgcagggcgctttgctatgctcagagaacatcctcttgctttcttcgctgggcagcgatgatgccttggaaaggaccatagggagtggggaaagtttcagaatggaaagcaagagaatgatagtgaccgtttggtgagtttcctggatctccggctctggctcagggctgacctgacccttcctttaaagttgagggagctgaggctctgagaaagtgactcaccttcagtcacgaggccaggagacagccgaggaggaatttgaatccagtcctctcggtcctcaaggctgtgcggcctgggagctctggtggcttcctctgtgcgtgtgtgggtgcataccctgtcccacatctcaagcgctccttaagtgctttctggatttcccagcttcacttttaaaggcaaatacccctcctctgaggaaggatgggggctgggaggtagcctgggacaggtactgaggctgttttttcaagttgaggtaagagtcacatgatgtacaattgaccattttaaagtgtacaatcagtggttttggatctattcacaatgtcgtgcagccgtcactcctgtctaagtcccgagcattttcatcaccccccgaagaaactctgtgcccattagccacccctcacacccctactggctccccccagcccctggcaactgctactttctgtgtccgtggatttgcctcttatgaacatttcgtatccatggagtcatgccgtaggtggctcctttcatcactttgggcttttgcagtagcttcagatttcttgagttccacccttgggaagggctctgggtttgagctgccccgtgtggaaacctctcccagtgtagaaggtgctctgggagccccagagaggccctgtagagcttgggatttgaagcccctctcccggctgcccccctcccctgcctcagttgagccggtccctggagcaggtggacttcagcaaggtcacaattgctaatgagactctggggaaacctgtccagggcggcctaccccctgacccctatgcagggaacaacgtgtggtgtgtgacatcgcctttacagaccctggtctgagccccaccttggacgtttccaggagaagggtgtggccagatgcctgttttctacctgctctgcaacggttcctcccaccacggagacagagtcagcttcttagcacctgggacaacccttaccaggcctcgagctgcttctgctggtttctcagtagtgataaatggtgctggctgtgtcgtggcctcacccagaacccaggaaccagagcctgggtttggcctttgcagcttccaatggctggattgagcccagggatctcagacttccgcccactatgtggccgttgctctagagatcccaggacccctggtcacttacccagctgcagccctagagggaagcagagcattgcgggcttcggggacacaactgggttccagtctcagatctccctaagcctcagttttcccccagtggaatgtggatcttttctgagcgaggtggctgtcatgatgatggatgacccagagccctcggtggtctgcagggaaggcctacatagggatttgagaccaccagtggacaggatcaaatgcagtgtccagtgctggaaggttcaggctagggcaggcttccaggaggaggcaggtcctgaccttccttgagggatggcactaaatctagcatggccttcccctcagcatctgaggctgaaactgtttactggttcctcagccacatccttccagggctatccccagctcagaaataccctgggcccgaggcctcacctagtatgaggtctttgttggttcagggggttccgagcagtgttggtgttagctttgacctcttgacaggacactgacagcttgcaatccctaagcagggggtcttcttaaatgccctgatgccttgatcctggataacccatgttttagagaaaccagggctacagagaaagagccctggttctggggccagacagctggggtttggatggggctgctgatgtctgcagttttctgcagtcacgccatcagtttcctggtctgtgcaatgggtattctaagccccagttcccgtcagtgtgttaggaagttcagtccaatgaagactgacaggctcctggctcctggtggcttgcagggtcctgtggctctccttgcgatgggggaatccacttgggggccctggagtgggcagactcccacccgtgcagacctgtgctgggcctccctggcaaagccggctgggcccagctgcccatcctcttgttgacgtttcctttttgtctctctgatgcttccctgctcaattatttacccagggaatttgggcttcttcacttgtggttttggcaagggcttcacacaaatgttttgccctggtggtctcttagccatttaagataaacggctaaatcaaatgcaggccttgctgtggagctgagcgagctgtggggctgggcagaggcggggccggccctggccctgtgtccttgctgtcacatggcgggaggcctcccaagccaggccgagacgttaggagggggtgagcagcgccagggttttcttggggtgtggtaggggggtgtgaaagccttctgaagggcattgcgttttgggtgcagcacgctcagtgcttggggctggagagagcccccagctggtggtctgccagacaggaggctaacagagcccagacacctggaggcggacccaaggctggaggcggacccaaggtgtcccgggcctgtaggaacagcccatcctgatacagcaaacaggggaggctgtgagcttcccagctcttccagggaggggtagcccgaagttttggaaacaaatccccaaatggaacctatttgattgctccagaggcccccacgtggggggtccttcctgagagtgggtcctcacagcccccgttcacccagccccctgcaccaggcccccagaggcggggtcctgcctccccgacagcccagcctggcagctgtggaaaccgggccctccccagtgccccctgcccacctccccgagcccattccctcgcctgtgtcccgattgccttccctgcagggcctggcaccccgggggcctcccacccccgaagggtggcctgagcagagccccacgccccgagccccgtcccaccccgtgcccctcacacagtccagggcccgactgaccagtcttttctattgttttttctccagggccgtgcaggcctgcccagctgccagcggtggcccccatagctgcctcctcccaccctcactcatccgtgatcacttcacctctgcgtgccctgggcgctctcccgccctgcctccccctgccgtgctgcagcgcgcgcccggtctcgggtgacgggactcagggtgagggtcagacggaggctccctttggatgccagtgtcagttgtcaggtaacagacgacgccgcggtggggggcgggcccccgggatggcggggtgtgccatgggcagcgctggagcaaggtggggacccagggaggaagggcagctcccacccagaaggctttttggggtgccaggggaagtggtaaagaatgttcgctgaactatgagccagggcccggtgcccctcggtcaggagtcccccacggtgcccccacccgttctgagagtcttgctcccagaatgcattccccagcctcccaatcccgcttctttgggttgtttagcgacagcttaattggataacacttaacatctgaggttttcttcggcccttgccactgccaccccctcccccaccccagacaatcccctgccccgccaagaccaggctaggggaagattccttggttgactgtgtacattgctggagccgtccaaaatgctgagtttctctttgggagaatgtgttgcccattagctttgaaaaagaaaaaaagtggctcaaaaggagcctcttaaaaagctgtggccacgagagggagtgaaacactgtgaggtgtgtgaggggtgggggcgggggctgagtacctgctgtgcgtccggctctgggccagacccagacacagctgtttgtgccgactcatcctgctctcccgggcgggcggtgtggctgcccattctacagatgggcagatgggccggtgtggtgacacaaactggcctctacctgccctgcttctccccaagtggaacccaagatcttattctgcctagggtctctgggaatccttggggtccttgggaattcaagggcaaagggccctctcacaagtctgtccccccggcatctcggcagggcctggcgtgaaagcactgtggccacgcaaaccaggatgctgacacagacacatgtggtgagcagccgtggcctggtttctgtggcaggggcaggaaaggagaaggggggtgcagagctggggcagatttgattggtccctgctttgtcaccaggcatgttgcaggctttctctcgacttgaattgtgaaaggaaaactatttttattgggcaggttgtgtttttaattgaagctgtccccacaggcggtccctgatggagccacagctctgcaaaagccatggccacagctctgtaaaaggccacaggcagcccctgctccagggtccagagcttcctgggctccagagctccctagtagggtggcctggagctttagtgtaccctccctgctgtgacaggtggtgacatcataggatctggcttccaaaagggagttctggtttcttactggacttgtgccttaaaggcacaaagcaaaacccaaaatctcctgggaaggagtcggaaccacttgcaaagacgccggctcccttttctgggctgtgctggtccccaggtgctcaggcctcctgtcctggttcagtagatctgttctgtgagtctgtggaaggccctgcttgctgagcagggggtgcctgctctgtctgggtggttgccttgctctcgtggcttcctgtcattagcgctgcagcctcggcaaccactgggggggccatgctatcaaagatcagcctgagtgtttattactggacgcggtcaagttccgtggcacagaaatctgatctcaccagaggctcacccagggctttgcttaaccctctgttggccctacttagaagttgctgaagtagatgagactcagctagaggactgagccgctccctcatgtggccaggcctgcttagcatctttgtatggtgctgaccaggagctgttaccatccccattttgcagatggagaagcaagggcttggggagggagagtggctagccagggtggcagaactgggatttgtccttggttgcctcctgaaaggccacccctcttcctgtggagccacgctgcctctgccgacatccacgggaggtcgaatgagctttccactgccttggctctggggggctctgccatcagcaagtcctcatacatgccactaggatccttatgaggactgtgtatggagggcctgctatgtgctgcattgtgctgggcatgtgtgccttcttgaatttaaccctcacagcaaccctaatactttattctcctcactttgcagatgagaaaatgatgttcagagatgttgagttctcacagctcacgtctatccgtccgtccatccatccatccatccatccatccatccatccatgtatccatccatccatccatctatccatccatccatccatccatccatccatccatccatccatccatccattcatccatgtagccatccatccatccatgcatccatccatgcatccatccatccacccatccgttcatccatccatccatccatccatttattcattctttagcttgaagccatttggaaggcacctagcttgtagcactgtgcacacacaggaagagtcggcaggcaggtccctgccctcgtgcagcttgcagtctggtggtggggaggacagggagtggggacctgcagaaggggaaggaggagcagggagggagggagtggtggaggtgggatttgatcccaggctctccatccagcacctgccacatctttggctttggctcttcttctggcattaaaggcctttttagattttaggccttgagagctgccaggactcagagcctgtgagcaaccagtgcttgattgcagtgctctgggagggacgtgaggaagggcagtgtcctgttcctggggctgggactgcaggaggctgagcccctaggactgctccaggagacccttctaaggggcctgctcttacctcctgccctctgccaccatgtctggtacagttctcttttttcattcggtcccagttcattggccctcaccagcttgcaccaccatgtttcccgatcaatttgaatacctgaaactatcctattctggtgttttttgtccctttgtgatttgtgtccctggcactgggctgtttgcttaagtgtttttagtgcctgtttaattagtagttggaatggagtcattaagttcccagtaacccgttaggaagaagcaggcctttgtaaagatggaatgggcctgctgtccttacctggttttgtcccttttcggatcaggatgcattgaacccatctcttcaagttaacatggagaaccccagtgtaaacgtgtttcacacaggttaattgcgtgcctgttaccgcatctgcagttatttatagaaggatgtgattttacggggggagaaaaccacacaggtatgtgtgtttgtgcacaccctgggctggcagcatcccagggggccctgcctcccgggaccccaaccctagacctctttccaatggtcgcagtggggagaagggactcgggggtcctgactctttttgactctgctgaaggaaggtggggctttgagtctaggcgttcctgggaactgaaatttcttccctgagaaatttcacatagaggatttggcacagtggctgtggggtcaagagcctcagactgtgttcctggtctgtgcttcagctggccaggggccctaaagaagtcattgcctcagtttccccttctgtaaaaatacacgtatgtatgtatatgtgtatgtatgcaacatttgaaaacgaggctcgtgttattttctgagacaggtcagtgtggagctgctgtgggtggagtgagcatggggctagctaggtttccagggcagggcgtgggacattcagagaatggtttggacactcctgggctttgtgccccgcatgccagaatccttccctgttctgaggcttccatgattggaaagcggtggtcaagtgtatgagactgcttgggggtgaaggctgttctgccccatgtagtcatttcccctctccatccctcagtttccccatctataaaatggagctaaggataggacaggctctgaagggtcgttctggggatcgtgtgagatcatacgggccaggtgctgagaacaacaccatgtgctgagtgagccctgtcgaagttagagtccatgcacgagcggaatgggattcacgacattgagactctgtcaggtctcacttcaagctggatcttcgctttccattcttaaaagtatttagccttttggctggctcagatcatgtaccagctttgggaggtggaataggaactgagacacttcattgcatatttaaaagctgcaaatggtcatcagccacagtgattaatatgtgtacttggtgaagttcaaggtctcacacaagaacacacaggatcccagctcagggaagtggaagtgtttggctttaatagagggagtcagttgcagtcattagtatatgctgaaatcacagggcaatcttgtaaagttaaattcaatttacttttctactgaaattgtgcttgctgtgttatttaactagtctggggtttcttggcatgggttaaagggacaataaagataaaagaatacctgtaagtaaatagtagggtttaaccatagaatctatccttttctcctccttcaattatatcccagtgttcattttgtgttggttttataaccagagccgtccaatggggcgccgtggattagaccacgctagctgtggaagcctgatgcaattaatgcagtctgcctggaaagtggccttatttctggaagttttgtgttaatgatatggtctgtgctttgcacatttcataccaaacaagaagcaagctgtagtttcattctggactgggttcgattaacaccggaggatccatgggaagccaaacggtgatacggacagagatggtagcctcaccaggcccctgctgatgcgtcgccttgattctggtgcagggggtgccagagacactccaggagggtgttagatcggccactgagactggagggaggggtgagtatgggggtgaagacaaaaaaagaaccgtgtgagtgagcgtgtgtggacagcagagctccgtcgtgggaaggttggaaaacatgctcatgggattccctttgcaaagtaacgtttgttgttaggatccttctgggctaaccagacaggtcctagtgttgatgggggctggctccatgtaggaaaagggctttcaggggagttattaaaaatttagagagtcatctgtatgccttgcaatgtctacatcgcccaagggccggtggtcccagcatctgcaacccagtcttcacagtgctgttgctcttcctggcgtgcaagcgctgttgattccaccctagcacctgcctgcttcttgaggtcacgctgctgcagaggctgtccatgcccgactgccttgagaacccagacgcctctttctgtgaccggaggaagtgccaggagaggccatggagagctgcaggccccccagttgggggaagccccccagttggggcacctaccagcatgactgtccttagataaaagaggccccagcaaatccctgagtggagatcgctgcagcctcgccagattccatttcactctctgagttggcccttcagacgttctgaaggcagagctaaatcaaagaattctgttcaaatccatacaagatgttgctgtttttctgctctgacaggagaggcatttggaagtgcagtttctttctttctttctttttttccctttttttttaatagctgtcttaaaaaggagtttggctgtttagcacagctggtgctcattacattatgcactggcaataagatagcatgtgtaattaatttttaatgcagtgctggatgcagcgctttcaagcagttagtggatgtgaagaagcagcactggccaaggacatcagagacctcagagcaaggcagccccgttctcctttaaagggactcggaaagtggcagaggaggcttgcattgccctctgtgtggagcggactggcccagaaatgggttcttctcgggtgacctgaggtcaagtcagtctataacaatctaagaccagggatcccaagagatcatctcctccaacctcttcattatataaatggggaaaccaaggcagagagtggggatgaagccatgacacatgggtggcagagctgactcatacctgggtctgcccactaggccatactacctctcttgagtttttattgaaaaccagaaaaggaagttcgtcgcccagtggaagccacttaaagattgatttctgcctgaccatgaggcttggtgtgaaccctgcaatgagattggtagcaggtagagctctgatgttgaggagccccacgttgggtgccttggacttcagctctgctatctgcagtgggagcccaccagacacatcctgggtttgagactctggggttgtgctttgacagctggctgccctgtccctgtggggctctgtggcatggatgtgtgtttgaagttaaatgtcattgtggacccgtgttagactgcaggcattgtgggaagctctagagatggggccatcctcggtccttcccttgcagtgaatgggagtgagtatgtgatcccaggctagccacttacttcctctctccaatcttcagtgtccccacctgtaaaatggggacactgaagtacttgcttaccatccctctactggcaggtcccatgaacagctaccatctgggcgtggccacagcccatgaccagcacctgggggaatcagagggaaaaggccggtgggaagggaaggagggagaaagctgagatgccggaaagccttttgagactctggccttgggtaatcggcaccccagtgacgacttagctcttggaaagccacttgcctgggagagtttcttagtgtgaatgaaggcagaggaagggccaacatcatcagtgttcctggggcttgccactgtttgctaaagggccggctcagtcctaggcatgacatctcatcgttgtaacgctcccaagaagaggcactcccccacccttttgcttatgaggatattggggctcagagaggccacacaacccaccaggggtcacacagcacacaaatagcagaacttggacagagagtctcaaaacagagattcagactcaggtctggccagcctcccagctgtacttggagctctcccgtctggcttcccactgggctgtagtggacaacagagaaggagctgctggtagaaaaccaaatcaaactctgatatggtacctgggagggtcctgaaggtcttccttcatgcactggtcatccttgtgccagaccctgggctggactgagggatccggaaatgggcatgacggggtccttgccctagaggaactcaccgtggtgggggtgcccatggagggccttctcactcagtggatgtgaaatgcatgtccccatggcgcctttctctgtttgaaaaaaatgaatcaattggctgctgctcgggtgctccctcacttattgccatggtgcagctcaagagcagatctcaggatggagaggtgtcccacctgaggacagcttgtccttgtggtcgcattgctgagaggtggggggtaccttctgtgaggatttttacctgaatgaagcacaagtggtgcctgactgcattggaatccacgtgattattggcgtgtttttgactctcattttatccagtggtgcat

SEQ ID NO: 1316 - DNA, 7603 bp, Homo sapiens
ttttcttgcttttcttcccttttttttctttttgcaaacaaaacaaaaaacagcatagaagaaagagcaaaataaagaagaagaagaggaggaagagagggaaagagaggaagggaaaaaaaacaccaacccgggcagaggaggaggtgcggcggcggcggcggcggcggcagcggcggcagcggcgcggcggcggctcggaccccctcccccggctccccccatcagtgcagctctccgggcgatgccagaatagatgccggggcaatgtcccgccgcaaacagggcaacccgcagcacttgtcccagagggagctcatcaccccagaggctgaccatgtggaggccgccatcctcgaagaagacgagggtctggagatagaggagccaagtggcctggggctgatggtgggtggccccgaccctgacctgctcacctgtggccagtgtcaaatgaacttccccttgggggacatcctggtttttatagagcacaaaaggaagcagtgtggcggcagcttgggtgcctgctatgacaaggccctggacaaggacagcccgccaccctcctcacgctccgagctcaggaaagtgtccgagccggtggagatcgggatccaagtcacccccgacgaagatgaccacctgctctcacccacgaaaggcatctgtcccaagcaggagaacattgcaggtaaagatgagccttccagctacatttgcacaacatgcaagcagcccttcaacagcgcgtggttcctgctgcagcacgcgcagaacacgcacggcttccgcatctacctggagcccgggccggccagcagctcgctcacgccgcggctcaccatcccgccgccgctcgggccggaggccgtggcgcagtccccgctcatgaatttcctgggcgacagcaaccccttcaacctgctgcgcatgacgggccccatcctgcgggaccacccgggcttcggcgagggccgcctgccgggcacgccgcctctcttcagtcccccgccgcgccaccacctggacccgcaccgcctcagtgccgaggagatggggctcgtcgcccagcaccccagtgccttcgaccgagtcatgcgcctgaaccccatggccatcgactcgcccgccatggacttctcgcggcggctccgcgagctggcgggcaacagctccacgccgccgcccgtgtccccgggccgcggcaaccctatgcaccggctcctgaaccccttccagcccagccccaagtccccgttcctgagcacgccgccgctgccgcccatgccccctggcggcacgccgcccccgcagccgccagccaagagcaagtcgtgcgagttctgcggcaagaccttcaagttccagagcaatctcatcgtgcaccggcgcagtcacacgggcgagaagccctacaagtgccagctgtgcgaccacgcgtgctcgcaggccagcaagctcaagcgccacatgaagacgcacatgcacaaggccggctcgctggccggccgctccgacgacgggctctcggccgccagctcccccgagcccggcaccagcgagctggcgggcgagggcctcaaggcggccgacggtgacttccgccaccacgagagcgacccgtcgctgggccacgagccggaggaggaggacgaggaggaggaggaggaggaggaggagctgctactggagaacgagagccggcccgagtcgagcttcagcatggactcggagctgagccgcaaccgcgagaacggcggtggtggggtgcccggggtcccgggcgcggggggcggcgcggccaaggcgctggctgacgagaaggcgctggtgctgggcaaggtcatggagaacgtgggcctaggcgcactgccgcagtacggcgagctcctggccgacaagcagaagcgcggcgccttcctgaagcgtgcggcgggcggcggggacgcgggcgacgacgacgacgcgggcggctgcggggacgcgggcgcgggcggcgcggtcaacgggcgcgggggcggcttcgcgccaggcaccgagcccttccccgggctcttcccgcgcaagcccgcgccgctgcccagccccgggctcaacagcgccgccaagcgcatcaaggtggagaaggacctggagctgccgcccgccgcgctcatcccgtccgagaacgtgtactcgcagtggctggtgggctacgcggcgtcgcggcacttcatgaaggaccccttcctgggcttcacggacgcacgacagtcgcccttcgccacgtcgtccgagcactcgtccgagaacggcagcctgcgcttctccacgccgcccggggacctgctggacggcggcctctcgggccgcagcggcacggccagcggaggcagcaccccgcacctgggcggcccgggccccgggcggcccagctccaaggagggccgccgcagcgacacgtgcgagtactgcggcaaggtgttcaagaactgcagcaacttgacggtgcaccggcggagccacaccggcgagcggccttacaagtgcgagctgtgcaactacgcgtgcgcgcagagcagcaagctcacgcgccacatgaagacgcacgggcagatcggcaaggaggtgtaccgctgcgacatctgccagatgcccttcagcgtctacagcaccctggagaaacacatgaaaaagtggcacggcgagcacttgctgactaacgacgtcaaaatcgagcaggccgagaggagctaagcgcgcgggccccggcgccccgcacctgtacagtggaaccgttgccaaccgagagaatgctgacctgacttgcctccgtgtcaccgccaccccgcaccccgcgtgtccccggggcccaggggaggcggcactccaacctaacctgtgtctgcgaagtcctatggaaacccgagggttgattaaggcagtacaaattgtggagccttttaactgtgcaataatttctgtatttattgggttttgtaatttttttggcatgtgcaggtactttttattattattttttctgtttgaattcctttaagagattttgttgggtatccatcccttctttgttttttttttaacccggtagtagcctgagcaatgactcgcaagcaatgttagaggggaagcatatcttttaaattataatttggggggaggggtggtgctgcttttttgaaatttaagctaagcatgtgtaatttcttgtgaagaagccaacactcaaatgacttttaaagttgtttactttttcattccttccttttttttgtcctgaaataaaaagtggcatgcagttttttttttaattattttttaattttttttttggtttttgtttttggggtggggggtgtggatgtacagcggataacaatctttcaagtcgtagcactttgtttcagaactggaatggagatgtagcactcatgtcgtcccgagtcaagcggccttttctgtgttgatttcggctttcatattacataagggaaaccttgagtggtggtgctgggggaggcaccccacagactcagcgccgccagagatagggtttttggagggctcctctgggaaatggcccgacagcattctgaggttgtgcatgaccagcagatactatcctgttggtgtgccctggggtgccatggctgctattcgctgtagattaggctacataaaatgggctgagggtacctttttggggagatggggtggcctgcagtgacacagaaaggaagaaactagcggtgttcttttaggcgttttctggcttgacggcttctctctttttttaaatcacccccaccacataaatctcaaatcctatgttgctacaaggggtcatccatcatttcccaagcagacgaatgccctaattaattgaagttagtgttctctcatttaatgcacactgatgatattgtagggatgggtggggtggggatcttgcaaatttctattctcttttactgaaaaagcaggggatgagttccatcagaaggtgcccagcgctacttcccaggtttttattttttttttcctatctcattaggttggaaggtactaaatattgaactgttaagattagacatttgaattctgttgacccgcactttaaagcttttgtttgcatttaaattaaatggcttctaaacaagaaattgcagcatattcttctctttggcccagaggtgggttaaactgtaagggacagctgagattgagtgtcagtattgctaagcgtggcattcacaatactggcactataaagaacaaaataaaataataatttataggacagtttttctactgccattcaatttgatgtgagtgccttgaaaactgatcttcctatttgagtctcttgagacaaatgcaaaactttttttttgaaatgaaaagactttttaaaaaagtaaaacaagaaaagtacattctttagaaactaacaaagccacatttactttaagtaaaaaaaaaaaaaattctggttgaagatagaggatatgaaatgccataagacccaatcaaatgaagaaataaacccagcacaaccttggacatccattagctgaattatcctcagccccttttgtttttgggacaacgctgcttagatatggagtggaggtgatttactgctgaattaaaactcaagtgacacaagttacaagttgatatcgttgaatgaaaagcaaaacaaaaacaattcaggaacaacggctaattttttctaaagttaaatttagtgcactctgtcttaaaaatacgtttacagtattgggtacatacaagggtaaaaaaaaaattgtgtgtatgtgtgttggagcgatctttttttttcaaagtttgcttaataggttatacaaaaatgccacagtggccgcgtgtatattgttttcttttggtgacggggttttagtatatattatatatattaaaatttcttgattactgtaaaagtggaccagtatttgtaataatcgagaatgcctgggcattttacaaaacaagaaaaaaaatacccttttcttttccttgaaaatgttgcagtaaaatttaaatggtgggtctataaatttgttcttgttacagtaactgtaaagtcggagttttagtaaatttttttctgccttgggtgttgaatttttatttcaaaaaaaatgtatagaaacttgtatttggggattcaaaggggattgctacaccatgtagaaaaagtatgtagaaaaaaagtgcttaatattgttattgctttgcagaaaaaaaaaaaatcacatttctgacctgtacttatttttctcttcccgcctccctctggaatggatatattggttggttcatatgatgtaggcacttgctgtatttttactggagctcgtaattttttaactgtaagcttgtccttttaaagggatttaatgtacctttttgttagtgaatttggaaataaaaagaaaaaaaaaacaaaaacaaacaggctgccataatatatttttttaatttggcaggataaaatattgcaaaaaaaacacatttgtatgttaagtcctattgtacaggagaaaaagggttgtttgacaacctttgagaaaaagaaacaaaaggaagtagttaaatgctttggttcacaaatcatttagttgtatatattttttgtcggaattggcctacacagagaaccgttcgtgttgggcttctctctgaacgccccgaaccttgcatcaaggctccttggtgtggccacagcagaccagatgggaaattatttgtgttgagtggaaaaaaatcagtttttgtaaagatgtcagtaacattccacatcgtcctccctttctctaagaggccatctctaagatgtcagatgtagaggagagagagcgagagaacatcttccttctctaccatcactcctgtggcggtcaccaccaccacctctcccgcccttaccagcagaaagcaatgcaaactgagctgctttagtccttgagaaattgtgaaacaaacacaaatatcataaaaggagctggtgattcagctgggtccaggtgaagtgacctgctgttgagaccggtacaaattggatttcaggaaggagactccatcacagccaggacctttcgtgccatggagagtgttggcctcttgtctttcttccctgctttgctgctttgctctctgaaacctacattccgtcagtttccgaatgcgagggcctgggatgaatttggtgcctttccatatctcgttctctctccttcccctgcgtttcctctccatccttcatcctccattggtcctttttttttctttcattttttatttaatttcttttcttcctgtctgttcctcccctaatcctctattttatttttattttttgtaaagccaagtagctttaagataaagtggtggtcttttggatgagggaataatgcatttttaaataaaataccaatatcaggaagccattttttatttcaggaaatgtaagaaaccattatttcaggttatgaaagtataaccaagcatccttttgggcaattccttaccaaatgcagaagcttttctgttcgatgcactctttcctccttgccacttacctttgcaaagttaaaaaaaaggggggagggaatgggagagaaagctgagatttcagtttcctactgcagtttcctacctgcagatccaggggctgctgttgcctttggatgccccactgaggtcctagagtgcctccagggtggtcttcctgtagtcataacagctagccagtgctcaccagcttaccagattgccaggactaagccatcccaaagcacaagcattgtgtgtctctgtgactgcagagaagagagaattttgcttctgttttgtgtttaaaaaaccaacacggaagcagatgatcccgagagagaggcctctagcatgggtgacccagccgacctcaggccggtttccgcactgccacaactttgttcaaagttgcccccaattggaacctgccacttggcattagagggtctttcatggggagagaaggagactgaattactctaagcaaaatgtgaaaagtaaggaaatcagcctttcatcccggtcctaagtaaccgtcagccgaaggtctcgtggaacacaggcaaacccgtgattttggtgctccttgtaactcagccctgcaaagcaaagtcccattgatttaagttgtttgcatttgtactggcaaggcaaaatatttttattaccttttctattacttattgtatgagcttttgttgtttacttggaggttttgtcttttactacaagtttggaactatttattattgcttggtatttgtgctctgtttaagaaacaggcacttttttttattatggataaaatgttgagatgacaggaggtcatttcaatatggcttagtaaaatatttattgttcctttattctctgtacaagattttgggcctctttttttccttaatgtcacaatgttgagttcagcatgtgtctgccatttcatttgtacgcttgttcaaaaccaagtttgttctggtttcaagttataaaaataaattggacatttaacttgatctccaaa

SEQ ID NO: 1317 - DNA, 2472 bp, Homo sapiens
atgtcccgccgcaaacagggcaacccgcagcacttgtcccagagggagctcatcaccccagaggctgaccatgtggaggccgccatcctcgaagaagacgagggtctggagatagaggagccaagtggcctggggctgatggtgggtggccccgaccctgacctgctcacctgtggccagtgtcaaatgaacttccccttgggggacatcctggtttttatagagcacaaaaggaagcagtgtggcggcagcttgggtgcctgctatgacaaggccctggacaaggacagcccgccaccctcctcacgctccgagctcaggaaagtgtccgagccggtggagatcgggatccaagtcacccccgacgaagatgaccacctgctctcacccacgaaaggcatctgtcccaagcaggagaacattgcaggtaaagatgagccttccagctacatttgcacaacatgcaagcagcccttcaacagcgcgtggttcctgctgcagcacgcgcagaacacgcacggcttccgcatctacctggagcccgggccggccagcagctcgctcacgccgcggctcaccatcccgccgccgctcgggccggaggccgtggcgcagtccccgctcatgaatttcctgggcgacagcaaccccttcaacctgctgcgcatgacgggccccatcctgcgggaccacccgggcttcggcgagggccgcctgccgggcacgccgcctctcttcagtcccccgccgcgccaccacctggacccgcaccgcctcagtgccgaggagatggggctcgtcgcccagcaccccagtgccttcgaccgagtcatgcgcctgaaccccatggccatcgactcgcccgccatggacttctcgcggcggctccgcgagctggcgggcaacagctccacgccgccgcccgtgtccccgggccgcggcaaccctatgcaccggctcctgaaccccttccagcccagccccaagtccccgttcctgagcacgccgccgctgccgcccatgccccctggcggcacgccgcccccgcagccgccagccaagagcaagtcgtgcgagttctgcggcaagaccttcaagttccagagcaatctcatcgtgcaccggcgcagtcacacgggcgagaagccctacaagtgccagctgtgcgaccacgcgtgctcgcaggccagcaagctcaagcgccacatgaagacgcacatgcacaaggccggctcgctggccggccgctccgacgacgggctctcggccgccagctcccccgagcccggcaccagcgagctggcgggcgagggcctcaaggcggccgacggtgacttccgccaccacgagagcgacccgtcgctgggccacgagccggaggaggaggacgaggaggaggaggaggaggaggaggagctgctactggagaacgagagccggcccgagtcgagcttcagcatggactcggagctgagccgcaaccgcgagaacggcggtggtggggtgcccggggtcccgggcgcggggggcggcgcggccaaggcgctggctgacgagaaggcgctggtgctgggcaaggtcatggagaacgtgggcctaggcgcactgccgcagtacggcgagctcctggccgacaagcagaagcgcggcgccttcctgaagcgtgcggcgggcggcggggacgcgggcgacgacgacgacgcgggcggctgcggggacgcgggcgcgggcggcgcggtcaacgggcgcgggggcggcttcgcgccaggcaccgagcccttccccgggctcttcccgcgcaagcccgcgccgctgcccagccccgggctcaacagcgccgccaagcgcatcaaggtggagaaggacctggagctgccgcccgccgcgctcatcccgtccgagaacgtgtactcgcagtggctggtgggctacgcggcgtcgcggcacttcatgaaggaccccttcctgggcttcacggacgcacgacagtcgcccttcgccacgtcgtccgagcactcgtccgagaacggcagcctgcgcttctccacgccgcccggggacctgctggacggcggcctctcgggccgcagcggcacggccagcggaggcagcaccccgcacctgggcggcccgggccccgggcggcccagctccaaggagggccgccgcagcgacacgtgcgagtactgcggcaaggtgttcaagaactgcagcaacttgacggtgcaccggcggagccacaccggcgagcggccttacaagtgcgagctgtgcaactacgcgtgcgcgcagagcagcaagctcacgcgccacatgaagacgcacgggcagatcggcaaggaggtgtaccgctgcgacatctgccagatgcccttcagcgtctacagcaccctggagaaacacatgaaaaagtggcacggcgagcacttgctgactaacgacgtcaaaatcgagcaggccgagaggagctaa

SEQ ID NO: 1318 - DNA, 43793 bp, Mus musculus
  misc_feature (2690)..(2776): n = a, g, c, or t.
  misc_feature (7970)..(8296): n = a, g, c, or t.
  misc_feature (9906)..(9932): n = a, g, c, or t.
  misc_feature (12180)..(12199): n = a, g, c, or t.
  misc_feature (13667)..(13793): n = a, g, c, or t.
  misc_feature (21988)..(23113): n = a, g, c, or t.
  misc_feature (25771)..(25790): n = a, g, c, or t.
  misc_feature (38708)..(38727): "n" at positions 38708 through 38727 can be any base.
  misc_feature (40651)..(40861): n = a, g, c, or t.
ttaacatgctcttaacatctctctagcccctatttggggggttgttctgtctgtctgtttgtttgtctaactgtctgtgtcagggtcttgttgtatagctctggctatcctggaattcatgacagttctcctgcctctacctcccttttgctgttttgatttgatttggtttgggggtatttgtattgttttgttttgttttgttttgttttttgtttttgtctgaggccaagtctgcagaacaggctgacttggaacttgcctttatcctgtctcaaactctggaattataggtatatgccaatacacctaatttaataaatgtatttttgtcctgtctttacatatgtgaaaatcacctaactacttacagtatctcaaaagctcatttcccattcagacctcatttcagactcttgttagttaacatttttaatttatttatgttctgtgtatggttgctttgtctacatatgtctgtgcaccatgcataggcccggtgcccacagaggcaagaaaaggacctggaattagctggaagctgccctatgggtgctggtggtcaaacacaggtcgtctggagattacaggagcaggccaccacacccacctgatgttttctttttactcactcttgtgtgcacacacatctgtgtgcttgcccttgccagtatagagaacatgtggaggctgaaggctgactgcaaatgtcttccccactctcctcacccatcccctttcttgtttttgttttgtttttccagacaggatttttctgtgttgccttggctgttcgggaactcattctgaggaccaccaggctggtcttaaactcacagagattcacctgcctctccctcctgaatgctgatgctgggataaaaggtgtgcactactatctggctttaaagaaatgtttacgaatgcttttagtttgttttgttttgttttttagatttatttagtatttatatgtatgtttgtgaaccaccatgtgaatgataaagacttaaacctagttcctcatcaagaaaaacaatacagagacaaagtttggagctgagatacagagacaaagtttggagctgagacaaaaggatggaccatctagagactgccatacctggggatccatcccataatcagcctccaaacgttgacaccattgcatacaccttttcagcaagattttgctgaaaggaccctgatatagctgtctcttgtgagactattcttgggcctagcaaacacagaagtggatgcccatagtcatttataggatggatcacagggcccctaacggaggagctagagaaagtacccaaggagctaaagggatctgcaaccctataggtggaacaacaatatgaactaaccagtaccccccagagctcatgactctagctgcatatgtatcagaagatggcctagtcagccatcagtggaaagagaggcccattggtcttgcaaattttatatgcctaagtacaggggaatgccagggccaagaagtgagagtggggggaagggcatgggggacttttgggatagcattggaaatgtaaatgaagaaaatacctaatttaaaaaaaaaaaaaaaaaaacaagtggcagggcggtggtggcacatgcctttaatcccagcccttggggaggcaaaggcaggcagatttctgagtttgaggccagcctggtctacagagtaagttccaggacagccaggagtatacagagaaaccctgtcttgaaaaactaaaagaaagaaagaaagaaagaaagaaagaaagaaagaaagaaagacaagtggtcttaaccactgagccatccaacccctcatctttttgtttgtttggttggttggttgtttttttggcttcttgtgaagtcataacttccagttctttggaaacatcaaatgatgttttgctggtgcacacaggtgaaaggatatttggatatagtaaacacatggaaggacctgtgatgatgttatataaatatgacccccagactgtggaagatgagcactgagccttggtttggtttgctccacctggttattcttccctaatgacatgcatgcatggattgattcgctttacatagtgctgttgagctccacttatggaaaacaccgatattgagaaaaacttgcccaagaactactcgtgaggttcctgcctctggagtgctaggactaaaatcacgtatcaccactgcccagctaattcctcacctttgaaagaaaacaaaaaaacaggctctcctcactggacccagagctcaatatactggccagactggctggcctgtgagccaacttgctgtttccactgccttgccgtaggccagtgggtgaacccggtggtttctacaggattaaactatggctgcctggtgtctgcttgctgagaaggactggactgcagctgctggttcgtgtctggtgtctgcagctgctgagctgtatttggtgtttgctaagggactgaactgctgacaaagaaaatggacctcacctccaaagaacaattgctgagcaggtccacttcccccacatcctaataacttttctcttccactaccactattggtggtgggctagaagagagattgacccgtattaaaagtaggttgcattaggaggcagaggcaggtgaatttctgagttccaggctagcctggtctannnnnnnnnnnnnnnnnnnnnnnnnnnnnnnnnnnnnnnnnnnnnnnnnnnnnnnnnnnnnnnnnnnnnnnnnnnnnnnnnnnnnnncctcaaactcagagatttgcctgtttctgcctctggagttctaggactaaaatcatgtatcaccactgcccagctaattcctcacctttgaaagaaaacaaaaaacaggctctcctcactggacccagagctcaatatactggccagactggctggcctgtgagctcactgttgtcctctccccttgctccatagtctgacagtttcttatgtagccccggctagcctcttgattcattactctgagcctcccaaaatctggaatcagagtcatgagccatcaccgcacatcagccacatacactgtacagcactgggcaagtgacctctcccccctcactgagcctcagtttcctgtcaagtggagggtggtctctgccctattgagaggaggacataaaagaacttcaagacgagggtgtcattcagcagcagagcagtcacctagaacgcgtgaggccccagatgtcgtctcttacactgcaagacaaaatttgctaggcatggcggagcgcatctgtaaccacggcactcagaagaaggcagagccaagagcatcaggacatcaagagcatcctcagaggggggggggggggggttgggggggggaatgattgactcagtagtcaggagcacaggctgctcttgcagagaaccagggtttaattcccagcaccgacatggcgacttataactccatctcctaggggtctgtagccctcttccgtcctccacaagtaccaggcacacatacatgcggtacatgtgcatactatgtaagcaaacactcatatacattaaataaagcttcatcaggccgggcggtggtgacgcacgcctttaatcccagcacttgggagtcagaggcaggcagatttctgtgttcgaggccagcctggtctacagaatgagttccaggacagccagggctacacagagaaaccctgtctcgaaaaacaaaaacaaaacaaacaaacaaaagctccatcagttaaaaataatcaaacaaaggtggcaataaacaaaggactgttgtcacctgcatagtggatacaaggccaacccgtgctatatgaaaccctgtttcaaaaaaataaaagaaagagagagaaaaggtggtgggttagaaagaaagaggcagataggagtgataagttttgcccgatgttagtgagcgcagaagccaaagttgagagtagccgctgtggacctgcctgcagcaggtacccagaaccatggctcgccaggatcctttctcagggatcagtggtgatgaaccaggccttgaaccaccctctccccgaccccacgcactagagagagactcaagggaattgtggccagcccaggtgcagggcagttcctctccactcagagcccacacatatggcaaataaagggccaggagtaagggccactggagcccatctccggcacggctgaacaggaagtgaggcggagtttggagtggaatctggtacctcaaggctacggccacccaaactaaccgactcactgggagacgatgccagggggtctagaagccctcagagccctgcctctcctcctcttcttgtcatacgcctgtttgggtaatgtggccaaagggaaggtgcgggtggggcgggggtgttgcggctgacaggagaggtgcagagtggagtcagaaatggccaggcagggtgatgcataacgtggcatctcttaaagtaacgccagaactctaggaaactgaggaaggaggaacactgcatttgaggccagcctgggctacataatgagttctatctaggccaacctgggcaagttactgattaaaactgtctcaaaaagaaaaggagtgtggggagggaatcagggaaagccgtctgtagctagccacaggcttgagtaagtccactgttaggaccaacactaccttgccccacgacacacgaccttagctccacaggtcagaatgagaactgaggtaagtgttgactgaacaccacaccagtggaggtgtagcaatgggtgtcggtgagggaacgggttttatttgtttgtttgtttgtttgtttgtttgtttgttttttcctctgccttacatctggagggcaggcttgccatgtgaccacatagacccaggtttgcagtggaggtcttaggagcagggactggggccctgctctctgtgtcttaagcctgtgtgaccaggaactggctggggctctttcccctccctttctttcttcctcacttccgaccttcttcttttctgtcatgtccacaaaagggagctacaagccagtgtggagctggggaggctgagaacagggtggggggtggggggcgcggttcaagataaatacaagagcagacaccatagccaccagtccaccctcggctcttagcctcctccgatgccccagacagaactcagtcccagtgcctaggttaatactggtttctctgttttgttttgtttttcgagacagggcttctgtgtgcaactggaactcactctgttagaccaggcaggcctcaaactcccagagatctgcctgactctctctcctgagtgctgggattaaaggcatgtaccactactgcctggcaggtcgccacatttaaattacagagatgagaaacagcctaggcacaaaaaaacaaaaaaacaaacaaacaaacaaaaaaaacaaaaacaaaaaaaaaaacaagccaagcgcagtaaaggagagattcaggaaggtgggaattgggctctactatcttttccaatagcctggttactgctgagctgagccccaccgctgcatctaaggttctgccccaccttcaccccctccccgtgggggttcctaagagttgtaaggaatggggaccaatgggatggttttcatgaaagagtccctgggctgtttggggaacatcaaaatacaaaggggaaagggaagaaagaggccatagggtgtgcccccccccaagtctcccatcatctttttctaggtaccattaccattggtacggctccactcctgatgtgaaggggtctgggctagagcaatcatctccatctccaggctctgacccatctgtctcctctcctctctccacaggtcccggatgccaggccctgcgggtagaagggggtccaccatccctgacggtgaacttgggcgaggaggcccgcctcacctgtgaaaacaatggcaggaaccctaatatcacatggtggttcagccttcagtctaacatcacatggcccccagtgccactgggtcctggccagggtaccacaggccagctgttcttccccgaagtaaacaagaaccacaggggcttgtactggtgccaagtgatagaaaacaacatattaaaacgctcctgtggtacttacctccgcgtgcgcagtgagtagggagggcgctggcctccttgcgttccctgctccctctttcttccaaaacattaggagcagagctagctcctccctcctggacctgccaccagccacagagatggtggcttcagggctccctgacctcgcaagggtcagggctgggagaagaagggacaccagaatgctgagcagcaccctgtcttcacagatccagtccctaggcccttcctggacatgggggaaggtaccaagaaccgcatcatcacagcagaagggatcatcttgctgttctgtgcagtggtgccagggacgctgctgctattcagggtgagtctcccccaagtgacacccctcaagtcatcttggcttacctgggcctggactgtgactcccagtgtccagctggtcctctgaattccaaggtttgtccttccaagtttgggaggctgggaataaccaccaaaaggattcccaggggggtcagcgtgtccccacggccctcatagaaaccctctcacttctggcccgccaacgggagtcccctgcaaatgcagccaagacaagggaagaaggtgtgtcctcccagagcccctgcgtctccttaggccagaagacaacatttttcacccacattggggcttcattatgtagccctggctggccttgaactcacagagatctgcctatttctgcctcccaagtgctgctgggattaaagggccaccatgcctgcccttcttcctttctttaactttttcttttccccaccacctaaccccccaagactgggtctctctgtgtagccctggctgtcctagatataaggctggcctcagactcacagagatccacctgcctctgcctcctgagtgctgggattacagttgtgcacccctatcgccctgcactttatttatgtcttagtgtgtacgtgggcatgttgagtgtggaggtcgaagaacaactttcaggagttgattctttcctcccactgtgggattccgcacaccaaattcatatcctcaggtttgcatggcaatacacttaccagcttgagctatcatctggactttctttgctttcagtttttattttactttattttattttatttttttaaagctagatattagtctaggctagcctcaaacttgctatatcaccatggctggcctgattcctctttaccttccaagcactgaaattacaggcaggtggcaccaccagttttatttttgtttgttttaatttttgttttgtgttttgttttgtttttgtggggagggttagacagcattttgctatgtaattcaggctgggctagaactcactctatagatcatattggtctggaattcccaatcctcctgcctcagtttgccaagcactggaattacagatgtccagcaccactcactccctgctcgccgttctgcttgtcattgaggagcagtagagagctagcatggtggtgcacagctttgaccctagcagcactcaggaggcagaggcaggcggatctctcgggagccaaggccagcctggtccacgtactgagttcccaggtagttcttgctagatagagatcctcagagcatcagtggagtggcagggaggtgcagcagtccacttgagacagggagattgcttaaagtttgaggcccataaaaagaaagagaggagaggggcagagactagaatctgccaagatcctgatggtgggatctgccttgatggtggggagcacagtatccctcactctttctgataaagcacttgctagtaggagacagtctaaaaacccttcacctnnnnnnnnnnnnnnnnnnnnnnnnnnnnnnnnnnnnnnnnnnnnnnnnnnnnnnnnnnnnnnnnnnnnnnnnnnnnnnnnnnnnnnnnnnnnnnnnnnnnnnnnnnnnnnnnnnnnnnnnnnnnnnnnnnnnnnnnnnnnnnnnnnnnnnnnnnnnnnnnnnnnnnnnnnnnnnnnnnnnnnnnnnnnnnnnnnnnnnnnnnnnnnnnnnnnnnnnnnnnnnnnnnnnnnnnnnnnnnnnnnnnnnnnnnnnnnnnnnnnnnnnnnnnnnnnnnnnnnnnnnnnnnnnnnnnnnnnnnnnnnnnnnnnnnnnnnnnnnnnnnnnnnncatggggtgtggtgtctgccttgatctcaccctggattgactggacgctggggctccagctgtcagggtactgatgtctcctctctgacccctgcagggcctgaaccttgatgactgttctatgtatgaggacatctccaggggactccagggcacctaccaggatgtgggcaacctccacattggagatgcccagctggaaaagccatgactgacatgtcccacccttccctgcctgccatatgtctgactccagcatccctgcctccccactcttcccctggagtccccccttcccagtgcttgctccagccactcgagtggcctacccttgcctccaggctgccccaccctattctcccacctaatcttgtccttccccaagtccagctccctctctagtgggtaatgagcccttaatcgctgcctctaggggagctgattacagcagcctcgttagtgtcaccccccctcctcccagatctgtcatggccacttaagtgataataaatccttcccaaagcagcccttggcaggagtcatggatctcatgtagactgctcctcaacactgccagggaaccaggagcagaaaacccaagtcccctcccccctcagacccaggattctaggttcaagttctcacctgaccacttctgagatctgggaccagacagttcttgctgtctgtcttccccaaccccctccccccaaaataacaggaagtctcttggggaagtccccaccccaattgaaatgctggtttatctcccttatagggcctcaccctcctcatgtcccaaagcaagggggaaccagcccgggtgttaccaaatttttacctatatttaaactctgagaacacaagatattattttctggagtggggcctaattccctcatgggttcacttgcataaggcagatttggagagtttctgtcaagaaccggggggagggggatgacagagagagctagagtggtgtgacagtcattgggatgggaagagcagactcaggttgttaaaagacaggaggccaagaggagactcagtgggatccccagagacaaggatgcagagataaatagccaaaggaagaagcagacacaaactggctggcctgataataacagttgaggaaaggacaaagcctgaaatctcagagcatgagagagacagccaacagcaagaaatgggcccagcgtgatcaaggcacagaggagctgcagcagggagaagcaacagaggccagaaagcaaggagtgcctggatgggcccctgaccttgtgggcaggaaggccttcgagcttcgaaaaagagatcagggtggtggcgcgcacctttagctttaatctctctactccagaagcagagacacctgagttcgaatccagcccgccttacacaacaagttcgaggccagccagggctacatagggagcccttgtcgcaaactaagagaaagagagagtaagggccagggcaggagctgggcaacagcagggagggcggcggaggcggacaaaggcgaaggggagccgggcggggccgggtggggacgcgcccgcggggaaaggaggagccgcgcgggcggcgagaaggggaaggannnnnnnnnnnnnnnnnnnnnnnnnnngggcggcgggcgggggctccggaaaaacgccccgacttcctgcccgccaggagccaggaagccggagtcgggacaccgggcccgggatccccgagcccgacctcgggcgcctcgccggtcacctccccgcgcggacaccaggtacactgtccctggccccgcccggcctcctcctccagccgccgcagggaggagcagggaggggaccgggcgcggagggcctcccagggtgcgcccagtgaacctgcagccgcctttctctggcctcggttttctcatctgtcaaagagagcaaagagaaaacccggcgcgttggcgcccgcctgtcatcccaggagttgggaagcagagacaggaggattgccatgagttcgaggttagcttgggcgacctagcatgaacctgcctcaaaagaaaaaaaaaaaaaaaaacaaaacaaaacagagagagagagagagagagagagagagcacttgtcgagagcacaagtaggtagagatccaggctcccagcgaagaacgataacactcatttatcagcagggaaactgaggcccagggagtcggactgccttgtcgtagggacagagcatctgggacttgaactcaaagctgtttcctgtaaagagctgtccctgcgatcatggatgcttgattagagctccctaaaataaacaaatatctctgcagtacattttaaagccgagacttacagagcgttaaacacgtctcagaaagcttttttccttaccctctctgtggtattaattatactctgggagatggctgtaggggagagaaccggaaacatatcctcattgaacagatgggaagactgaggcctaaagggaagtcattgcattttgcaggttagtctatcagaagaaaatatatgctcgagcgcatgagtgttttatgcttttgtttgtgtgtgtgtgtgtgtgtgtgtgtgtgtgtgtgtgtctatctatgtgagggggttctgtttttgttttgttttttctttccaattacagcgggaggagttgacagtggtgacagagggtatacaagcatttggaatttaataggtccgagttggggaggtagagctcatgtgaggtcccgataggtgcttaggacctgagcgacttgaagtttctccgagattgagccctaaccaggcaatggaaccatgcaccactcctgctaagggggcggggcccaggagagtgacaggggcagtcgaaatacggaaacaagggtcctccaaggcagaccagagcggccctatcgggccagcgtggcgccgtgtattgcgatacccgccggcaggaggagtggagttgccgaggccggagagcggtaggaggcgggctagagcggccggagggaggagtggagctggacgcaaaggcggcctctggctcggctagagcgactctgcggcacgggtgggggaacctggagctcgagcgcggaggcttcggttcctgaggctgcagtggcttgcttctcttcccatccgacaggtgagataggcagcccttggttgccgtgaaacctgaccccacacgtcttccctgccacccacaccaccaccgctgcagaattagtgagcgcctgttgtagatcagccacgtcccacgtaagatttagggctcgtgaagacccgccacgttacataggtcaataagagctcacataccttccaggtttcaggaagcctttcacggagacctggcttttaacataagcataggcttctcatagatcaaggcagggccctacagaacccaccacacaccactatcgaggtcccataaaccattagttttccctttagaatcaccatctctctggattcttgaggcccactatatgtcaaatagaatgtggggttgtatacattccagggccctcgtagtttttttcaaggctcccagaagttcttggagacctaaataatccagtccaaaggcttgttgaatgtgagcccttaggacccaggcgcctttatgtgtttacttcttcaggacccccccacacacacacacacacatacacacacacacacacacacacacacacacacacacacactgcatagacctaaacctgccctgacttcccctgtccaccccacctccagagcctcaagtgcaaaatgctccctctgccggacagtagtggactttgtcagttgcttcattttgccagctttacctatgtctacttttcaaatcctcttgagcccaggtttctggagnnnnnnnnnnnnnnnnnnnntgtgtgtgtgtgtgtgtgtgtgtgtgtgtgtgtagcagtgttgtgtgctgaatgtttaaactgtggaaccagactgcctgaacctgaatcctggctctgactctcataagccatgcctcaatttccccctcctgtaaatcagcaataagaataatagtgacaccctcctctcctaaaacaaaccaaaataatgctggcctcattgggtcagtaagaggattaaattcattaacatctgtagacagaccctgaaccctgcatagaaactaagcctgtgtgtgctgtctttgctgtgtctgacacatactgagaacacgtgagtgtcagccattgttccttattactgtgatggggagtgtggaggcaatgcatgtgaactgtgaacaagagagtcagggtcttctggtgacaatttgttaaaatttcgtacctcccttggcttctcttttcttgggggggggagttaataaagatttaagcgtgagagttacgggggccactctgaatgatgtgtacaggccagtatggtggcacacgcctttgatcccagcattgggaaggaggagacaagtgactctcttgattcaaggctggcctgctctgcagagttccaggatagtcagggctacacagataaaccctgtctcctgtctaagaaagagagagagagagagagagagagagagagagagagagaatagaaggaaggaaggacaaacaagcattctgtcattgagctacatccccaagccctccttggctcctttggggtctgtcaggtgagtatatttcctgctaactgagatgagcatgggagttcctggtctgtgatcatggcttctaacctagaaggtctggctggctggaaagggtggtttttgaaggcatcttgtttctcaggggatgagtgcttgtagttggggaggtattgcagttgatgggactagacagagtgcttctctccaataatactagaactcaagagaccaagacagggggatgcccgcaagcttgaggccagtctacagagtgagatcctgtctagaaaaaagaaaagcaaaaactgagctgatatacccagaacagttcttacgcactagatgggcttgtttctcataagctgactttgttggcaagtgtatttattaaacgctcaccagtgttcacatcttgacattagctgagcttttatggtggacagatccagcttctgaggaagagtacaaatgatgcctgcttggtggaacccccggccatgacttctggacactacagaaagcatctttggcagaaatcagaatcatagcaacggttcattgagtgctagggaggaggctcctggaagagggagaagggcgggtctcgggcagccagagttataaatagctttggggtgtggggacccgccccctactggtccaccccacactctttccaccattccttccctcctgacactgatccacannnnnnnnnnnnnnnnnnnnnnnnnnnnnnnnnnnnnnnnnnnnnnnnnnnnnnnnnnnnnnnnnnnnnnnnnnnnnnnnnnnnnnnnnnnnnnnnnnnnnnnnnnnnnnnnnnnnnnnnnnnnnnntatgcagtgtggagctggaccgaaccaacaccagctgtggaaggacagctgtcctggggtgggggaggagagatagggaggcagaggaggggccagcagaggtgataggaaggatgaggtaggtctgggaggagaggtggagtcccggattcatattgaaggggagcagcatgcccctgagggcaggctgctgagccccacctcctccatcatctttcagggaccaaagctgggaactgtagggaaccatggggcccaagagctcagtgtgtctgacagagagggactcggttttgttttctcgtgtagagggcgttggaggttgggggttcaccattgacatttcctgtcacaggaaatggggctggtgggttcagaggcaacatcctggcccaggcccgccacagatcacagtgtatcaccttcccctactcttcctaccttctcctaagggctgtgcttttaattttgcttgtgccaaagtccctcccccttgagggctagccagccttctgggtccctggtccttccttctttagtgacccaaattagtggttttacccacagccacccagcccacccatggacccatgctcctggcctccagcacacgcccaccccgcttggtctctccgcctcagctgggctgagaagagctctttgtcgccacacagaggctccattgagcttaggaggctggggggtgggggtgtttactcaccttccgcacctgggccaggaatctgtgagtaactgcccagcctcgggcacttcctccccacccctaactgctcctcctctccgcagcccggcggagtcctggagatgggagaagtcgccggaggggcggtgagtgcggggagaagatctgagccaaggtgagggaggtctggtgctctgtgaggtagggagccctgtgaattgaaaccatgtgtccccttgcaggccccagggcctccccggtctggcctggtgtccatcatcatcggggcggaggatgaggattttgagaacgagctggaggcggtaagcagggtggggtgggagagtgtccaccaaggacccagttctccgtcctgggatgtgtcctccctgctcacattatcatctctcaccccatgtgtaactgtctacagtagtcccacccatctcactctaaccccagtttatcaccacccctcccccatttgactcacatcccttctcaggaccggctcaggaacatcaagtcttatcccttcttcccaacttcttgtccttactgtctgggttgtagcataggcccatccacccccatttccctgtcgtgaaaccattgagaggtgcaagaaactgggtagggcaagccttggatgtcccttctttccccttggcactcagctcccttgtccccaccctccagaactcagaagatcaaaacagccagttccagagcctagagcaagtgaagcgccgccctgcccacctcatggccctcctgcagcatgtggccctgcagttcgagccaggaccactggtgaggatggggcggtggggcagagcaggaatgaggctgggcaactaagaggtctggaaagtccagaacacagcatgagttatcgaaatagggccccagacaagatgggaaaagcaggcatatgatctagacaggtttgcagatgcccggtgagccgcagtaagcagggatcccaggcctgagtgcttacagcagaacccagcatcctgacagatgccatgtcctgcccttttcaagcatctccagctggtaacgctgaccttggcagtggggagggttggggggtggcagcaagaccatctcagcaggtgtcaccagtcctgcatcaaggagttggttcccttagccatctagacttagagaacacctcagaccttgatccaaatacccagacaaactccatgtggttgctaacctagaaacgtcctgagcctgccgtgataatacacacctgtgatcctaagcacattagacactgaggcaggaggatagccacaccttcatagtcagctaaggctgctacatggcaagactggacctcaaacaaaagaaacttccagggccaggcaggagacactggggagacacagataaagaactgtgtggtccagaaaccccagtccctgatttagcaagaagccaccgtactggctgggagtggggggctgtgtaggtaggtgcgtgggagcatggacggttaggcctcttcctaagaagactggataccacccagcacaagctacttggcaagggatgtccgagggtcttgcactacatgaaaatgcacgcagaatcccccccaaccaaaactaggagactaacagaaatcacaggcagggacacccggggtgaagaaagacggacacaggagggctggggatgtaactcaggtggtaggaagtatgcctatcgagtacagaggcctgggttagagcctggcattgcataaagcaagcatagtgatgcaggctggtgatcccagcactcggcagaagaggaggatcctcggctacttagcaactttaaggccagcctgggctacatgagaccttgtctcaagaaaaaggcatgaaatgaaacgctaggactagttgtcctgacaccaggctttagaaactagtggaaaattgatgcagtctctccatctacgttcttggaaaaagcagccatccctcctgggtacacagaggctgtccttgcctaggcgttggagctcaggagtttcctatcctagccctacttaactcaaggactgggaagtgctctgtttgacccaatggcttctggctgggaggagttgctcttatgcagcttcctcacccatcagagtatggggcaagaatggaaagagcagacatagatgtgtcaaccagtaaatgtaaaatgttctgctgccagtcagtggtggcttgtgccgttagtcccagcactcaggaggcagaggcaggcggatctctgactttgtaaggccagcctggtctacagaggaattccagacaactatagctacacagagaagtcctgtctcaagaaaccaaagacaaaaaaaaaaaaaaaaaaaaaaaaaggtctgcctgcacaggagtatccccaagcaccaccagaaatgacatgtcacttgccaggcagcagcatttccagtgtcacccaccaaagactggcacacaggcaacttcaggagatggcctggcaagaatgagtggaccccacttgtccacccgtctactgtctgtccctcaccgccctgcaccctaggcagattgccagagacagctgcctacatttgagcctggctttaccatgtgacattgagcagggatgtttattcattgttggtattggggattgaactcagggccttagctatgtgaggcaagcactctgccactgcctcccaagcccttgttatttttatcgtgtgtgatgtggtgtatgtgtgttcatttgggtatgtgcatgtatgtgtacatatgcattgtatgtagaagccaggggccaacatcaagattccttgatctctttccaccatattttctctctccttttaaaattttattccatgtatttgtttgtttgagacagggtctctctgttatgtagcctggtctcatagtgagctgcctgcttctgactcccaagtgttagaattaaagtcacgcaccactaacccccagctctgtctaaaactattcttattaaatacgaacatgtgtgtgggtgcctgtgtgtggatacatccatggcatagcactagtatggagatggtaggacagcctctaagaggtcataggacagcctctaggagtctctcctcccaccatggaattcccagggattgaactccagttgtcaggcctggtagtaggcagagctaagccatatctctggtcccaccttacttttgagacagggtctcctgaccagggagctcatctgattgagattggcaaggctgcggagcatgagctctgggaactgcccccaaggtctaaaggcacaggctgtcaggcttggtttgtacatcagagctggagatgcaacgatgctcaggattcatagcctgtgcttcccttctgagttagccctgtaacccatactctggtctttctttctttatttctttttttttttaagatttatttatttattatatgtaagtacattgtagctgtcttcagacactccagaagagggagtcagatcttgttacggatggttgtgagccaccatgtggttgctgggatttgaactccggaccttcggaagagtagtcaggtgctcttacccactgagccatctcaccagccctactctcgtctttctagagagggtcttatacagagccatgaacttgaaatggtcctcctgcttctgcttccgagcaagcgttgggaggtgccagcagtactggctttaccttgtattttgagataaggtttctctaagttgcccagggctgcccttgaaccttcgatcctttgaccatgaagcttaagctgttttctctctttccttttggtggtattttggtttttttttttttttttgtgacacagattttgaactcctccctggtcttcctgcctgaagtccccagggatggatgtgcaggccggtgccaaggcactgagctttgaactcccaattccacaccgttgtttttagaaacaggcaggatctcgtatagcctagcctggccccacactcacaagtgttcaaggatgaccttgaactcctgatcctcctgcttctgcctggaaagtgaggggaccatagtcatgcaccactatacctgggttcaaggttcccaccggcaaaatggtgataatggtggtctcagtgatggggcaggttcctaaataacctctggtgggccccagatcctcagaatagctagtagagataggtagtagtaagaattggaaaggaataagaaagtattcatagcaatgaccctggagagtctcaggagaccacctggacagctgggctagaagtcagagtgggcttcaccgaagaaggcatgtctgcaccccacaggcatacagtggtcacaaagctgcttaggctatccaaagagggagtgtggtggttggggccgggagaaagagtcccgctctgtgtgtccccagctctgctgcctgcatgcagacatgctgagctctctgggccccaaagaagccaagaaggccttccttgacttctatcacagtttcctggagaagactgcggtgagatacctcccagctgcccctgtccctctcccagtgtctatctgtggtggtgcctgccaatgtggggcctcttcagtgtcttccctcagacccttctcaccaaggtctcctgagatacatctgccaccttactcctttctcccctgagcaggttctacgggtgccggtccctcccagtgtcgcttttgaacttggtaagaagaggaggggtctgaggataagagaggctttctgaccctggagactcatgggatggaagccatgattcagtcattcattcttggtggtggcagcacagggaaatattagaatccatgggtggggaccatgatccaagtaggttgggagccaggacccctggaatgtggcccctagcccttgcatgcatgtctgtagatcgtactcgacctgatctgatctctgaggatgtccagaggcggttcatacaagaggtggtgcagagccagcaggcagccgtgagccgtcagctagaggacttccgctccaagcggctcatgggcatgacgccctgggagcaggaactgagcctgctggagccctggattgggaaagaccgaggcaactatgaggcccgggagcggcatgttgcggagcggctgctgtcccacctggaggagacccagtaagtgggcactgagattccagttccagtgtgggtctgcctcggtgtcagtcttagtgtctgtattcttgcctcatccagagttctacttggacctacttggaccatggtcccactgtcagcctaactcttagaactctggggttccattgaagtttctgggtcttgtccatggtcatgtgtttgggtctagcgcttgtgtcctctggaatggaccttccgaggtcactttcccttctgcttaccctgcttactgaagagatggcagcccagaagtgatcctccgtggacagggaagccaggttttgtgatttcattgtaaatttctttctttgcaggcataccatctctacagatgaagagaaaaggtgacagctgtggggagtgtcgtgaaaaaaaaggcatggtctggaccagagggaggccatggcgtctctggggtggcaccctcgctcctggctttgggagccacccctctcctctaaccacaggaaatgcttgaggggttgtgggggactgtgtctttgtcattgtggacatagtgtgctcctgtgtgtctgccccggggacccttacctcactgtcttctccccttagtgctgctgtggtcactgccatcagcctgtatatgcgccaccttggagtccggaccaagagtggggacaagaagtcgggaaggaacttcttccggaaaaaggtgctgaggtcaagtctggccctgtcctttctaagaatcttcctgggtgccagccagcagtcactttctgctttgtgtcattttggaagccatagtcttccttttcatcatctccccacaggtgatggggaatcggaggtcagacgaacccccaaagacaaagaaagggctgagcagtatcctagatcctgcacgttggaaccggggagagccatccggtaagagggctactggccccacccttgcccaccccgttcatcccaggccaagctcactgtcccacttttttttttttttaattttattttatttttattaggtattttcctcgtttacattttcttttttttttttaaagatttatttatttattatatgtaagtacactgtagctgtcttcagacactccagaagagggcgtcagatcttgttacagatggttgtgagccaccatgtggttgctgggatttgaactcctgaccttcggaagagcagtcgggtgctcttacccactgagccatctcaccagccccctcgtttacattttcaatgctatcccaaaagtccgccatacccacccccccaatccactacccacccactcccccgttttggccctggggttcccctgtactggggcatatacagtttgcaagtccaatgggcctctctttgcagtgatggccgactaggccatcttttgatacgtatgcagctagagtcaagagctccggggtattggttagttcataatgttgttccacctatagggttgcagttccctttagctccttgggtaatttctctagctccgtgtttgctaggccccggcatagtctcacaagagacagctatatctgggtcctttcagcaaaatcttgctagtgtatgcaatagtgtcagcgtttgggagctgattatgggatggatccctgcatatggcaatcactagatggtccatccttttgtcacagctccaaattttgtctctgtaactccttcaatgggtgttttgttcccatttcttttttttttttttaaagatttatttatttattatatgtaagtacactgtagctgtcttcagacactccagaagagggcatcagatttcgttatggatggttgtgagccaccatgtggttgctgggatttgaactcgggaccttcagaagagcagtcagcactcttaaccactgagccatctcgccagccccttgttcccatttctaagaaggggcaaagtgtccacactttggtcttcgttcttcttgaatttcatgtgtttagcaaattgtatcttatatctttggtatcctaagtttctgggctaatatccacttatcagtgagtacatattgtgcgagttcctttgtgtttaggttacctcactcaggatgatgccctccaggtttatccatttgcctaggaatttcataaattcatttttttaatagctgagtagtattccattgtgtaaatgtaccacattttttgtatccattcctctgttcaggggcatactgggttctttccagcttctggctattataaataaggctgctatgaacatagtggagcatgtgtccttattaccggttgggnnnnnnnnnnnnnnnnnnnnnnnnnnnnnnnnnnnnnnnnnnnnnnnnnnnnnnnnnnnnnnnnnnnnnnnnnnnnnnnnnnnnnnnnnnnnnnnnnnnnnnnnnnnnnnnnnnnnnnnnnnnnnnnnnnnnnnnnnnnnnnnnnnnnnnnnnnnnnnnnnnnnnnnnnnnnnnnnnnnnnnnnnnnnnnnnnnnnnnnnnnnnnnnnnnnnnnnnnnnnnnnnnnnnnnnnnnnnnnnnnnnnnnnnnnnnnnnnnnnnnnnnnnnnnnnnnnnnnnnnnnnnnnnnnnnnnnnnnnnnnnnnnnnnnnnnnnnnnnnnnnnnnnnnnnnnnnnnnnnnnnnnnnnnnnnnnnnnnnnnnnnnnnnnnnnnnnnnnnnnnnnnnnnnnnnnnnnnnnnnnnnnnnnnnnnnnnnnnnnnnnnnnnnnnnnnnnnnnnnnnnnnnnnnnnnnnnnnnnnnnnnnnnnnnnnnnnnnnnnnnnnnnnnnnnnnnnnnnnnnnnnnnnnnnnnnnnnnnnnnnnnnnnnnnnnnnnnnnnnnnnnnnnnnnnnnnnnnnnnnnnnnnnnnnnnnnnnnnnnnnnnnnnnnnnnnnnnnnnnnnnnnnnnnnnnnnnnnnnnnnnnnnnnnnnnnnnnnnnnnnnnnnnnnnnnnnnnnnnnnnnnnnnnnnnnnnnnnnnnnnnnnnnnnnnnnnnnnnnnnnnnnnnnnnnnnnnnnnnnnnnnnnnnnnnnnnnnnnnnnnnnnnnnnnnnnnnnnnnnnnnnnnnnnnnnnnnnnnnnnnnnnnnnnnnnnnnnnnnnnnnnnnnnnnnnnnnnnnnnnnnnnnnnnnnnnnnnnnnnnnnnnnnnnnnnnnnnnnnnnnnnnnnnnnnnnnnnnnnnnnnnnnnnnnnnnnnnnnnnnnnnnnnnnnnnnnnnnnnnnnnnnnnnnnnnnnnnnnnnnnnnnnnnnnnnnnnnnnnnnnnnnnnnnnnnnnnnnnnnnnnnnnnnnnnnnnnnnnnnnnnnnnnnnnnnnnnnnnnnnnnnnnnnnnnnnnnnnnnnnnnnnnnnnnnnnnnnnnnnnnnnnnnnnnnnnnnnnnnnnnnnnnnnnnnnnnnnnnnnnnnnnnnnnnnnnnnnnnnnnnnnnnncttgcaatcccaccaacaatggaggagtgttcctctttctctacatcctcgccagcatctgctgtcacctgaatttttgatcttagccattctgactggatcactgtcccacttttgtttcagctccagattgtcgacatctaaaggtcgaggctgatggtaatgaacctgtagttaaggtgtccatccagggctgagggaggagggctggggtctggagccctgggtctgagggaggagggctggggtctggacccttgggtctgagggaggaggactggggtctggagccctgagtctgagggaggagggctggggcctggatccctgggtctgagggaggagggctggggtctggagctctgagtctgagggaggaggcctggggtctggagccctgggtctgagggaggagggctggggtctggagctctgagtctgagggaggaggcctggggtctggagccctgagtctgagggaggagggctggggtctggagctctgagtctgagggaggagggctggggcctggagccctgggtctgagggaggagggctggggtctggagccctgagtctgagggaggagggctggggtctggagctctgagtctgagggaggagggctggggcctggagccctgggtctgagggaggagagctggggtctggatccctagatctgagggaggagggctggcatgtggactcctgggtctgagggaggagggctgggtctgaggaagaagtagagagtatgtagagaactgagcatgggaggagggggtctctggtgtggaagacagccaagagcacagtgtcatagttctcctggatgcagtagcagatgggactagatgcctctgtttatttccccttttcattcttccttgccgtctttccagcagagaagccaggccctgcagaccggaagggaggcctgggtatgtcttctcgggacaggactgttgggactcctggacaggacaacccaggagtctccctgcaccctctgtctacagacagcgtcgactcccgggaaccaggtaagcgattctgagtcgggacaggagaaccacgagccccacagccctacttggatgaaagcccctgtccctttgagatctctcctttgttctccgcttcttttccagcttctggtcaggggtagtaattgcccgctgccttagtttaccctttgggctctgacctctgtgttggtgtcatgtctccttatccctggtctaggtttcttgtgttgttgtcatttggggctttggttctggcactgggggttggaactctcctcttcacacatggcaggggagctctctgccaccaagctacacccctaacccccactgctggactctaggccagagccgtactgatgagctgtgtccctcctgaccagctgtttccaacagtccctggggttcatttcctggaatctcagtgaggaatgtcctcatgacactcttgtgtcatcttgaatggtgaaccccaaagccctatgagtttactctgtcttcccacagctccagggctttcatcttagcccttaggtcccagacgctcttgtaacctgggttcagatctctcctgcagcttacttgtgctgtgttatggaagccacttccctctctgggttcacttacctttcagtgggtctgtccgtttcccttaaggctttgtggacagaggactgacggcttccagtcccctcctgcctggggtgggaggacgctgtagttctgtgacgacgccccctccttctggtgctagccccgctgcagtgttctgaggtctgaccgagtttctgtcctctcacactgaatactgcatgagtaggtggttaatggccaggcactgagtgtcttctagccctccctcagtgcacaggtcagggagactgagacaactacagggcagaactccatccacatcagaggccttccaagcagctctcttcttcccacccacacccctctatccataggcgtggataccccgcaggagccaggggatacacccccacagggccctaccagcctggagcccctggcgcccccagagagcacagaggacaatggcgagactgagaggtgtctgctgcggtgctgggagggcctgggcagggcagggcagggcagcatagagggcccagggagggtgcttgggattgctgctgcagtctgcacccgcctgtcccagtcatctctgctgccggacctccctcttctgcctgtctctgggcttcttccatccttgcctttccctcctcccctcctcctccctcttctctttaccctctgtttccggccttctctggccaggttctcctgggctccacctcggtcctattcagcttccttcctctcgttcccaccatctccctcttctcagtaagctctgcctccctcatggccctgctcttggtgtcccttgccctctctgtgctccaagctgcagtgtcctgggggccttgtccccctcacagttggggggcaggttctgccccctgcccgtccttgtgctgctgcttcggggaacccttggtgggtgtggggagctgggctgggcacacctggtccacctctgaccctgttgccctctctccccataaggtggaagaggtgggtgcctgggccctgggnnnnnnnnnnnnnnnnnnnnctccccctccccatggccacctcctccccttcaccccctgtgaggggaggggtgggtaggtacgtcaccctcccgattgagctaagtatggaaatcctttctccttgtccctttccctgaccccagcctcagggaagggagggggctggtcctgtgggccacagtgggttttgatctgcccaccacagttcagtacccttggggccactcccaaccccaggtacctccccaagttcactacttctgaccttctcttctctcttctgttgcttgtttcatccctgacccggtcttccctgtccctgtcctggtctgtcctggtctgtcctggtctgtcctgtctgtcctggtctgtcctgtccctgtccctgtccggtctatcctatccctgtccctgcctgatctcccctgttggctgtccctggtctgtcctgtctctgtcctggtctgtcctgtccctgtcctgtctctgttctggtttcccctgtccctgtcctggtctggtctgtcctgtccctgtccctgcctggtctcccctgttggctgtctcggtcctggcctctgcctgactctgtccttggcctcggggtccaggctatcagggcgtctagggcgctcagagagcctgcgggtgagtgaccgccgccggccttcccggggcagcctcggggctaagggccggggtgggggccgttcccggagcgacgtggacatggacccgggctccgccacggccgtgcttggccccacccgacgagccacgtacgtcatttccccctcgcaagctaaggaagcctagagagttgggaggtggtgggttgatgctagactctcaaagaaatagacatccggtgtctgaggttgctcgggccagctgtggacagcatagaccattggggagttgggaggtgggacactgcagtctagagacctggggagaggcgtcaaatgtcaaggccacagagggcttgtaactaaggaagagcaagaggctcccctggggtgctccaggatggagcttaacagtgcctctgtccacagccctgagcccggagatgatggggagccaggacggtcaggcctggaactggaaccagaagaacctcctgggtggagggaactcgtgcccccagacaccctgctcagtctgcccaagagccaagtgaagcggcaagaggtcatcagcggtgagtgctactctggagtctgcactgcagccagggatgctggccagtgctggctgaggcagagaccgagagcatgtgagagcagctgctttccaacagaagcagctgggtgcataggctgtggaacagacccagtgtgagtaagccaagtgccactgtcagccgagcgtgcgcccggagactgtgctgtcagttactaccatcagggctgtgcctccagaggaggtgtggcagtgtagacagtgctgatgtcgggagccagatacagcaaagcctgtcatcccagccacgtgccctggggatcaggtggccagagttcaaggccagggtccatgagatggcttactgggtaaaaggagcctgctgcaaagcctgacagctaccaggacccacatgctgggagagagccacctctacaaggtgtgtgtgtgtgtgtgtgtgtgtgtgtgtgtgtatgtgtgtgtatgtgtgtgtgtgagagtgtgtgtgatttttttttttaaaaaaagttttattcattttatgagcacactgtagtgtcttcaaatacaacagaagagggcattagatcccattacagatggttgtgagccaccatgtggttgctgggaattgaactcaggacctttggaagagcagtcattgctcttaaccactgagccatctctccagctcagacttatttatctatctatctatctatttctttatttattaagaaggaaacttgcgctgggcagtggtggcacacgcctttaatattacttcttttttttttttttttttttttttttttttttttttatatggaagtacactgtagctgtcttccgacactccaaaagagagagtcagatctcattacagggggttgtgagccaccatgtggttgctgggatttgaactccaaaccttcggaagagcagtcgggtgctcttacccactgagccatctcaccagcccaggcacacgcctttaatcccatcacttaggaggcagaggcaggaggatttctgaattcgagccagcctggtctacagagtgagttccaggacgaccagggctacacagagaaaccctgtttcgaagaagaaggaaaaaaaaaaaaaagaaggaaattcgctttcttctcagccccttaggatcagaagcaggtgatgtctgtgagttctaggctgaattggactatacaccaagtcccaggactctgtcacaagagactctatctctaatcaccaaacccaaaacaaaccaaagaaggaaaaaggagctagagacagtctgaaactgctcttgtcctgcctctcttgggcttcttactgtcagctgtttggtttttttaggggttttgcttttttttgttttttttttgttttgtttgtttgtttgtttgtctgtttttgagacagggtctttaaactagccctgactctcctggaactcactcagtagactaagccttccttgaacagacggacataactgccacccacatgctgagattgaaggcatgtcccaccacacccagacatttccaacttgtttgcttatttgtttgtttttaacttattctgtttctttttatcctacaaagtctcgtgaccttggtggagtagtatcactggtttttctgcccgcctgcctgaaacagaaaacgagaaagggtgtgtgtgtgtgtgcgtgtgcacgtgcgtgcgtgcgcactgtagcactgtagcactcctaagtgcctacataaggcggtaatggctccacccagaatatgttctgacctcaccagtttctagggattcttcctcagcctctgcgctctcccagcatgcctttgaacctgtccctagagcagcagttctcaacctgtagggcttgatccttttggaggtcacttggtgatatcctgcatatcagatatttatattacacttcacaacagtggcaaaatgacagttatgctgcagcaatgaactagttctatggttggggttaccacaacatgaggaactgtattaacgggtcacagggttgggcaggttgaaaccctctgctctagagcatgtaccctcccttgtgatgcttcctatttggggcccacagagctgctcgtgactgaggcagctcacgtgcgcatgctacgggtactgcatgacctcttctaccagcccatggcggatggaggcttcttccctctggacgagctgcagaacatcttcccgagcctggatgagctcatcgaggtgcactgtgagtgccagccacagctccctcccttctccagcacatcccagtaccaactccctcctccaggcctcctggacccagagcctgccacaggcagcctggcctactcctggggaccacacattcccgtcccccacagcatacaccccagaggtacagacactaaacaagcacacaaaatgcgtgacagcccaccagccccaaggatcaaacacataactgcagcctgagccagcagcaacctaaaccaggcatttcagtctcttctgctccagtaagccacctgctttcctgtgccccccacccccagccctgttcctcgatcgcttgatgaagcggagacaagagagtggctacctcattgaggagatcggcgatgtgctactggcccgggtgaggtaccctgacatggtcctacacaccccagagacccgggccccaggcctgtgtactttaggcttcctaaagtatgagaatgtttggacaacccgacctgagaccttcccttgcctgaatcttcccgcagttcgatggtgctgagggctcatggttccagaagatctcctcccgcttctgcagccgccagtcgttcgctctagagcagctcaaagccaagcagcgcaaggagcctcggttctgtgcctttgtgcaggtacagtgggtgggacgcgagaatacactgtggtgtcctgggggtgagggttgagggctggaactgaactctgcctcataggagagaagggctgtgggtgtggccctgggctacccctgtgctgcctgcttgctcctcaggaagctgagagccgcccgagatgccggcgcctacagttaaaggacatgatccccactgagatgcagcgactgaccaagtacccactgctgctacagagcatcgggcagaacacaggtaccctcccggccttcctctgaccatggccgctgagtgaggacatgccaggctgacgattcacaccgctccctttgcccgcccgcagaggagtctacagaacgagggaaagtggagcttgcagctgagtgctgccgggagattctgcaccatgtcaatcaagccgtccgtgacatggaggacctgctggtgagctggggcctggctccacccaggacggggcatggtggggaacatccatgcacctggcttagaggtcagtgtccaggagtcagttggcctttggtgtcttcctctcaggactcctggaggtcagatctggacctcagcctgtcccctgcagttggccttatatcattgcttatccatctaccttggagtcgctgagggccagcccctgtgcctggtttagctccctgtaaccctcctgtctctgtcctagcggctcaaggattaccagcggcgcctggacttgactcacctacggcagagcagtgaccctatgctgagcgagttcaaggtgaacccctagtcttccctcagctcaccttggccctgctgccctgggggttcttatgtacactgtggctgagactgcatcccgggagtctccacccccatctccttcccagagggtgtccatggtgacctctgacctcactccctggtccttggctgttcagctgccctcccctcccttcatcaccttagctgatcatggctccttcctgcctcagaacctggacatcactaagaagaagttggtccatgaaggccccctcacgtggcgagtgaccaaagacaaagctataggtgagtgcacccaaaggtggtggggccatgggtagaggccaggcctgacattgctgcctcacccacagaagtgcacgtgctcttgctggacgacctgctgctgctgctccagcgccaggacgagaggctgctgctcaagtcccacagccggacgctgacacctacccccgatggcaagaccatgctgcggccggtgctccggctcacctctgccatgacccgagaggtggccactggtgagctggggcaggtcatctgagcgcacttgtcctatggcatggggagtggaactctctaagagccacagagctcactctggggaggaacaaagacttggaagggtcctaatgaggcagaactgggcaggactaagtaaggatggcagagatgaggcatagactgtcattgcagaactcaagaggctaagggaagagagaggagcttgagtgtgaggtcagcttgggctataaaggaccaccctgcctcaagaaactaaaaatagccatgcttggtgacatatgcctttaatcccagcactcaagaggcagaggcaggcatgatctctgtgttcgaggccagcctggtctacagagtgagttccaggacagccagggctacacagaaaaaccctgtcaggagaaacaacaacaaaataagaaactaaaaataaataaaaatagagggaactgcctgcatttgcagaagagcatggtctgccccaagggttttctgtttttttgtttgtttgtttttttcccacaatgctgtcccctgccccctgtttaggaattgtaggtacttggaacataaggcagaagccagggcagagagttttgcaagcattgctgagaggttgtgctagggccactggtgccgtatggagggctctccaggtgaaggcagcctgggctctggggcctgatgtgatcagggctgtggaggaagacctcaggacagtgagtgtgaactgtatcacatgaggagagaggagcaatggcgccccagagggggccacactgggagccctagctccaagtcacatctctcccctccctatgcagatcacaaagctttctacgtcatttttacctgggaccaggaggcccagatatatgagctggtggcacagacatcttcggaacgcaaaaagtgagagtccccaaggatggtgtgaaggtgtgtcccgcatagggtggggtttaggtgtgctgaccacctctggtcttgtcctgtctccccagctggtgtaacctcatcactgagactgctggatccctgaaggtccctgcccctgcctcccgcctcaaaccccggcccagcccaagcaggtaagggtcaaggaaagaactggagaagggggcgtgggggtgcttccgtgcacatctacagaacttaagccccagcgcatgcacagatgtgcgtgctgagtcaagtgcagcctgcctccagctacctgtaccccaatgtgcccgtctttgggccagggatacggggtcacctgtcacttccctccccagcatccgagaacccctgctcagcagctctgagaatggcactggaggcgcagagatggctccagctgatggtaagtctcaaggtcactggctaggggaggtcacctgaagccagacaggacctgagcatccctgtctgtctccctacccagccaggacagagcggctcctcaatgacctcctgcccttctgcagaccaggcccagagggccagcttgctgccacagcccttcagaaaggtatgccagccctgcaccctccaaggccagtgtctagtgaagtggtgcctctgttttgaactagtgaaaggctccgtccgtctttcagatgtctgtatgtccacgaatcaagaaacccacccaaacgcctttcttctttagctgctcccccgccatgggcgctaagttcagcttctccagccccaggcctcctgccccatcctaacccttttgactgataaccacctcatccctcagctgtcatctggcccttggcctcctgccccttgtgaccctgttcctcttgccttggccagtactgtccctgaagcagatcctgctaagcactgaggaagacagtggagcggggcctccccgcgatggggatggggtgcctggtggtagggcccccggcccagtgcacacccaggagattgaggaaaacttgcttagcttagaggtggccatcagacaactggaggtatgcctgggggctgggggctgggctcgggcaggctgtggaaggaaaggcattcttcatctgtgatccccttcaggagttggaagaggaattttgtcgcctaagacccctcctgtcccagcttggggggactctgtcccccaacctggctgcacctgaacgctctgctcagacaggtgagtggggaactggggtcagggtgctgttctgaggggcaggaggggtacccttacccaccagccctctcttctcaactcctttccctccctctctccgtgtctgttaccctcaggcctttcatgaagagaagagtgggggagaggatgcaggggggcccacccccacccccacagctgccacagcatctcacaccccagaggcctggagcagagggagattggctgaacttgatagcagacctgctcgggtccctgcctcccactctggcctctgcctttctccctcctgccttctgcttggggaactcagggcttcactcccagagcacccccttaatccccacttttcaggccgtctcagtattgcctatggggggtcaccctccttcccctaccccaagtgcctttgctatgtttttatatcctggactggaggtttatttttaatatatattatctaaggaaagatctgtgtgtgtgagggcgttgggcagtgcgccccatgtctgggcctgtccttgacttcctgggtctgacccacgtcacctccatgactcttgcttcctttcaagcttcttccacccacccacccacccatccatccattcgcttgtcttacatttttatttagtatattatgggaggggcgcactgtgtgctacgtcagaggacaacttgtgggagttggttctccttccaacacctgggtctcagagctcagactcagatgacagacacctgtcccttttccctcactgtactaaggactccacacacgtgcacgctgcatgtgaggtgtgccccgtggtcatgcagagtgaggcacccacaacgcacactcagttcttttatttttgtagtaaactctggaggtggccgtgggatctgaacgggagccggtggggagagggcccctcctgggtggggctggggcgggggcggggttattgctctgatctccctgtccccaaggggacctgtgtgggaggatttcaagagggggctggcactggattggggacactgccacacgaacacgcaggtcacagcacataggaggtcaggggaggctgggcgccgtattgcactttgagagtggggccaggcggttatccccctcaaatcagaacctgggaggagactagaggccatcctgttgctctccactctggagaaggtgtgacctccacttgggggttagaaatggccaggagggtgccaagggctggccctgggccttgcgctagtgttaagggcagaccatgtagaagcttcatggatgactgccctggtcaccagcaggatccaccctacacctgctcagctgccgttcccccctttgcctgacttggtcttgggggacactggaccctcatcgccctcactgtcagagctgcagccgctgacatccgtgacctccagctcagagtcactgtcctccttcccagccaatgtggcctctgggcctccagcccctggcagtgccaggcgaggggccactgccagcccggaggggcgctcagggcccaggccctcccctgtcgcagcaagcaggggtgcagccatgggccctccccctgctcctgcagcagacaggtggcccagggaacccaaagggttggggtagaagtgaggtgggtagagagaggggggcaacttggggaaggggccggtgaggtatgggttgaagttccaggggtactcagggaaggcgcggccgtaaggacccagcaggctgggcggcttggagtagcctgtggcacctgaagaggcataggaacaggtcaggctggcccactagccatggggccctgtttcatggcggatgtgcctcctgcatggtctcccaccctccacctcacctcccccacttccctccctattcctttaacctgcctgcccccaaaaccctcctgccaagtagccaactccctcccattaagttgttctgcagcagagcattctctgccttgattggcttttagaaatgttcccattatataaccaaaattggcttccaactcataatctacctgcctcggcctcttgagtgctgggtgccacgtagcttagcctgacactgaacttgattgatctgtagtcaggatcaagactgagcttggtcctccaacttgtgtgtccctcgtgcaggggtctctggtgtgtgcaccacacccaactgctgcagcactgactgtaaccttgcttcaagcactctgactgagctacatctttgccgcatcccctccctggcttttaaacacatgtacccacacgtactctgtagacacatctctatcttatctcctggagtacacactccacgtgtgctgatcccctcccccagcccccagccccttaccagaacccaggaatgggaaggggctgtccagacgtagtttatccgtctctggggtgaataggggtgtccgagcccctggctctcctaggcgtggggcagagaacaggttctgcagggtctggagagggaggtagggaggcggtactgcttagccccctctggagaggacacaaaacacccctcttccagcactaagattgcagtatccagactcacctcaggggtcaggggtggagcatctggcccaggtgccccagcaaagggcccaggggtcagcaagagaggggagcctgtggcagcagcagccacatccagcagtgggtaattaacaagtacaactttgctgaagttgaacttgtaggtgaacctcttccctttggtcttgtggagaatgcgcttgttgtagtagtaactgtgggagagaagatggggtactggggaggggcaagggggggtgaggcagtagccgggctcaggttcctcaggttcctcatcgccaccccctcccagtttccactcacaagtactggggtccactggaattcagtcctaggatacagagggaatgccccacctttgggggggcagaaaggacagcgaagggaggagagagcaggatgggggtccggcccacagcccctcctcaccgcagggcccggctcagcttgtcataattcatgtggggcttgcacttgcgaatgccccatagacgggccacctcatcggggtccttgatgacaaattccccgtagtccccttgccaggcgatgacgccctggtactcctccttctgcaacagctccaggataaagtgccacagctggatctgcctggagccaggagatgactcgggcttgtaggcccaatctgggaaggcaaaccctagggacaggagacagggaggccttaaggttaggaaacagttgggggctctgggcattactggattttgcaacttgagatgcccagtctcttgagagcaagggaggagagggtgaaattgagagggacccatttcctgcatccacggctcttgggacgtggctgaaaagggcccactctgagcagtgatcaccctgtagggaggcctgagatatttctagtgacttgtgatctgccccttgcctaaggcgctcctggcactcagcccgtatgcatctgtgtatctacctctggtctgccccttcccatgtgctcccatcttcaagctgtcaggtagaaggctgtgtgtctgatgcaggcacagccgtgcaggtgcccatggcagacagcacatcatgcagacatccacttgccatgttagtccatgggacacaaccacacccaagtgccacacactcctgcttagggctgctaaagcaaacagatgtaggctgcctacactatatggatgcaacaacccagcatggtacacccttggcaacatgcacaaatacagacacacaagcccaacacccagctaacacctggtgtgacaaagataatgaggccatgacactcaagtccccagataggcagacgggcacatgcacagtaacaagacaaccaaacaacctcccaggtctacactccagcctgtgtatgtctgcaattgcatggtccaattggccttacttcaccctgggaggagtctcctggttcccgccatctgtacacacttagagaccaggagcggagatcctacctacccctggtctttccaagctagaaggctctggatcccagtgtccacaccagctcctatgtcatcccttgtcttgtaccttcccagagattgccatgatccagacgtgaacacatatttaaatctggtctctagcaagctgagagcagtacaagagacagggaaggctagggaagccatcaaaggctgggacatgggagggactatgctgagctgggagacctgggtccctgtatccagttgctgtgtagccaggggatagtttctgtcctctctggattgaggttctggaagcaggaggcaggaagtagcagaatctcactggtgcaggctgccctctggtacatatgtgcaggtgatgccccaactgccaaaggacaggcagtggtcgccactccctgtggaaggggagttttaatctctgagccatttcatctcagatgccatcgacaatccgtccagatggaccctggccaattcatacccatagctcacttccctggggaagccaccgcgtcacaaacatgtttgcacaaccaagagaccagaagggatccgctggagagaggaccaatacagcaggcaggcatagacaaccccagacacagtccagaaaccaagcccagatcctgatatacaggcccagggccatctacccacaccctgcaaaatagacctcagatatccactgagagtgccacagacgaccagagacaggcaaatcctctttaccccaccaaagcaggagtatggcacacaagctgccagacgccaaaagtatacatgcatgaccccgagatgtagagtccctgaatcattcctgtggcctctgtggtccaatctgtgtatgagcaggcgtgcattcacacaaagatggccccctgcagacacttgccctctgtgaccccttcaggaacactgaagtgtcgcacatgcacgcatacactccacagtgaaactcagagcagacagacagatgctctcaaagactccctcttattagtgacccattcgtgccaagaagatcctctccccctggcttaaacaccacatgcctctcctttcttctctttaggctgtgccctctccttgtgcctagcctagagctcgggggaggtgcagccaaatggacatggtgcggaaatccttcatctccgccccttccgtcctcatcctccaaaagaccctggacctttgtgtcccagcaagcaggtggcagggatagcagaccatgaagaagtttctggtcaactttctcatgaaagggtttgtagccagggaactgatggggaccgagacagacaggttcacaggtgcatgagagagacaggaagnnnnnnnnnnnnnnnnnnnncatttccgtgttggttttgatttctcttccccaacgctttcaactcccccgccgcctcctccgggacacgttataacgaggagccgtgggatcggcgctccgggccctgctcccacgctccccccgtcgtctctcacacacatctctgccttctcgcagtctctgctgccactttttccccatctctctcgtgtctggtctctgtcctgtgtatcagcccccccagccccgaggacctggttctggcccctccagccgggtcggtctccacctagaccagcatttctcctatgtcggttgctagcatctctaggtctcatctctcggtctctgtgtccctgggcctttagtctccacatggttcctctctccatttctgggtctccacatctctgcctccctgtctgagtctctctttcttgcaaagtccccatctctgtctttaggtctctctttcagtcccagtgtccctctcttgggactcctttgatctcgccgtgcccctggcacccccctggccccattgattgctgatcgacccatggaggaagtagggccttcggcccggggctatagggccaggcagcagctttggcagagccactggacagatggacagacagccccagccccagccccagccccagtggctgaggagggggagcatcacaagcccctcccagccggccggcacgatgcggatggggactccgggcaagctttaatttttaattttattttgcttccttcagccccccctcacccccatctctagcgcccgaagccatggcaccgaatgtgtgcgtgagtgaggcagccgcttggagaggggttgggcaggcaaaggctgcctccctctgttccttaccaagcacaattacacagacccacacctcctgcaagcacacaggccaacaaagtcacttgcaccactgcattccccacacactgtcacactcaaaacacacacagagacagaaccatgcacagtcccacagcccacacatcaatgaagtcacacatcaatgttgtacattctcatgtacaacagaaccagacacaagatctgcctagactgatgcatagtaacacaggcaccaggtcacacaccagtgcaatcacacagagagacaatgtcgtacagaaacagagaccccccccccctccccatacacagcagcacagacaagtcagcagcaggcacagtcacacatacaggtactagagaccttccatcaaacacaaactggagcacaggcagacacacaaaacaccacaaacacaggctgccacagccagatggcacacatgtgaggccacacccatcaaaggcatagagccacagtcagagtccccaatatgatcagcacagtggggaaaccccacagcagcccccatgctcagagagaggcaacactctcacttagacataggggctcagttcagctgggtgggggcgcccatttagaggctacagcagcccagcaacgtcaatgtccctgccaccatgggtttgtctgtcatctgtgaatctcactctctctctctcctctctctctctctctctctctctctctctctctctctctctctctctctgtgtgtgtgtgtgtgtgtgtgtgtgtgtgtgtgtgttcaaaacgtgtgcttgctacatagtcgtctcttcagtccccttcattgtctgtgtctgtctgtctgtcaccgagggtctttttattgctcatctctgtgtgccttagtctccagatgcttttgagtatctctcattctgtctctggacgccctcccccgtcccccttggcctctgggcctctctgcctctgtctcctcaccccatcaccccagccccctgggctggggtttaaccagttgttttgatttctctaagctgcgctgagccgcctcgggagccgcctcaggnnnnnnnnnnnnnnnnnnnnnnnnnnnnnnnnnnnnnnnnnnnnnnnnnnnnnnnnnnnnnnnnnnnnnnnnnnnnnnnnnnnnnnnnnnnnnnnnnnnnnnnnnnnnnnnnnnnnnnnnnnnnnnnnnnnnnnnnnnnnnnnnnnnnnnnnnnnnnnnnnnnnnnnnnnnnnnnnnnnnnnnnnnnnnnnnnnnnnnnnnnnnnnnnnnnccactgctcccgcgtacagcttgtgcatgcgtttgcgcgcgcacacacacacacatacacacacacactgctcacacatatactacacacacacacacacacacacactgctcacacatatactacacacacacacactgctcccacatacaccacacacacacacacacacacacacacacacacacactgctcccacatacaccacacacatacacacgccctagctcctgcattcacccttcctcacaccacatgccaatgtgcacacatctgtgcacacagcagagatgatgcttgaccatgggcacacagaccaatccacactctgggcccacgggcatgctgccagctagcatgagctcctatggctgtcctgacaaaaaagaggtctctcaggggctgtcataccaatacctgccaccttaccgcaaatgtcacccaattctcaccctggtcacatcaaccatactctctgccctggctcctaggaggggagactgtgccaaaacttcatacttcacatttgtgtaccacacacaccatatacatactacacacatgccacacacacacacacacacaagacatactacacacacacattaggcaaactatacacccacacacacactacacacctgtacagtagataaaccatagatattctacatatctgctgtacacataccacacactcatatcacaaacataccgtacctcacgaacaaaactgtacactcctatatgccatacaaataccatgtgacatacactccatataccacaccacacacccatacaacatataaacaccacataccacaccacatcacatatctactacataccatatgtacaggtactcatgacacacccatatatgcatcacatgcatatcacacacgcagaccacatagaaatcatacaccacacatagataccaagtcatacacataccacattccaaataccacaactaccacatgccgtccctgcttcccccagactgcatacagataccacgaagtgcaagaactgaaaccccttgtcacatagggtcactcctgatacacagatccacacggaggcagacatgccatcatagacacggcctcacacccagaatggagcacaggttcacactgtgcacacacgcagcagcaccccagcatccacccagggatgcacaatcacaaggtcacacgtgcacatgcacacgctcagcgctgttagcattcctcaggactggtcatgcacaccctctctgctgcaaaccaacattcactccagcctgctgcatctcgcctcccaaatgactgtctgtgcatgcacacacagcgagaacaccataggcatccaaagccagagtcagacacaggctcagagatgtagtaaccaccgtcaacagtctgccacacagccagggtctggcacaggtctgggggcctctgtagctactgtgcttcccgggtgagcccctcctgctcagcacccccactgacagtggcccctcagcgcccctgcctctcccaccccacttctggactcaggctccttacctcctcaccctcagggacagctgtcctgccttggtcactcagccctgcacagatgcagaaacaccaaacacagctcaacccagagttctgggcagtcacacgcacagctgatggacccacatgtgtgtcccactgtcacatccatagatgtgtgtggctttgggcagcccccacgacctctctctcgctctctctctctcgcgcacacacacacacacacacctaatcttctgtgcccagggacacacacaacaattgacacaggccatatttacatgtgctacaacacacagacacacaaggggacctttgagaaggcttcactgcaggacagggacaaggcctgggtgagatctggctggtaccagatttggggtggttaagaaaggaaagaggagtccagggcctggaagggcaggaatggagggcccaggccccaccttggaccctgccaccccaccccaccccaccccctgtctctctctgtatctctttctggtctggagccatgcttgtctctttgagtctctgactctctcctggagtcccagtctcagcacggatgtccctggggctgcagccagcctgcagaacgatgtcagtgggggtagtggtgagggagagtccccagggagttgggagctgcagtgccacgcaccccgcctacaaaacagtgctgggggaggggatggaggtggaggcgcaagcagccccagtccaggctttcctcttgagacacggagaccctgagcgatgcaagaggccaatgcaagaggctggggtgggggtgggtgtgggggacaaacagggtctcagagagagagattgggagaggggaagggccaacaggctaatgggaccagaggcagggtgagagaccaaggcagagtagacttcccacagtcagaaagaggaagctagacccaaggagacagagacaggcagataggagagaaagaagagacagagacagagagacaaggagagacagaatcagggagattctggaagagggaatgactggagaggggctgagaggaagtaaattagagagctgagagccagggcaccagagaacctgggtcagcaaggatgcaggggagggggcagagatgcggaaaattgagggattagggcagaggcaagagagtggatggaggagacaagagctgagacagccaggaggactcccccccctccacaccatggtgaacacccccacccccaccccgtgtcccccacaccccccttgccgtgtggattcatgactctctttagtgccttccttacctcagtttcagtactggggctctggtgttccctacactaaaacccaggcctcctcatttccacctgctccatcccaggcc

SEQ ID NO: 1319 - DNA, 3200 bp, Mus musculus
cgggacaccgggcccgggatccccgagcccgacctcgggcgcctcgccggtcacctccccgcgcggacaccagcccggcggagtcctggagatgggagaagtcgccggaggggcggccccagggcctccccggtctggcctggtgtccatcatcatcggggcggaggatgaggattttgagaacgagctggaggcgaactcagaagatcaaaacagccagttccagagcctagagcaagtgaagcgccgccctgcccacctcatggccctcctgcagcatgtggccctgcagttcgagccaggaccactgctctgctgcctgcatgcagacatgctgagctctctgggccccaaagaagccaagaaggccttccttgacttctatcacagtttcctggagaagactgcggttctacgggtgccggtccctcccagtgtcgcttttgaacttgatcgtactcgacctgatctgatctctgaggatgtccagaggcggttcatacaagaggtggtgcagagccagcaggcagccgtgagccgtcagctagaggacttccgctccaagcggctcatgggcatgacgccctgggagcaggaactgagcctgctggagccctggattgggaaagaccgaggcaactatgaggcccgggagcggcatgttgcggagcggctgctgtcccacctggaggagacccagcataccatctctacagatgaagagaaaagtgctgctgtggtcactgccatcagcctgtatatgcgccaccttggagtccggaccaagagtggggacaagaagtcgggaaggaacttcttccggaaaaaggtgatggggaatcggaggtcagacgaacccccaaagacaaagaaagggctgagcagtatcctagatcctgcacgttggaaccggggagagccatccgctccagattgtcgacatctaaaggtcgaggctgatgagaagccaggccctgcagaccggaagggaggcctgggtatgtcttctcgggacaggactgttgggactcctggacaggacaacccaggagtctccctgcaccctctgtctacagacagcgtcgactcccgggaaccaggcgtggataccccgcaggagccaggggatacacccccacagggccctaccagcctggagcccctggcgcccccagagagcacagaggacaatggcgagactgagagccctgagcccggagatgatggggagccaggacggtcaggcctggaactggaaccagaagaacctcctgggtggagggaactcgtgcccccagacaccctgctcagtctgcccaagagccaagtgaagcggcaagaggtcatcagcgagctgctcgtgactgaggcagctcacgtgcgcatgctacgggtactgcatgacctcttctaccagcccatggcggatggaggcttcttccctctggacgagctgcagaacatcttcccgagcctggatgagctcatcgaggtgcactccctgttcctcgatcgcttgatgaagcggagacaagagagtggctacctcattgaggagatcggcgatgtgctactggcccggttcgatggtgctgagggctcatggttccagaagatctcctcccgcttctgcagccgccagtcgttcgctctagagcagctcaaagccaagcagcgcaaggagcctcggttctgtgcctttgtgcaggaagctgagagccgcccgagatgccggcgcctacagttaaaggacatgatccccactgagatgcagcgactgaccaagtacccactgctgctacagagcatcgggcagaacacagaggagtctacagaacgagggaaagtggagcttgcagctgagtgctgccgggagattctgcaccatgtcaatcaagccgtccgtgacatggaggacctgctgcggctcaaggattaccagcggcgcctggacttgactcacctacggcagagcagtgaccctatgctgagcgagttcaagaacctggacatcactaagaagaagttggtccatgaaggccccctcacgtggcgagtgaccaaagacaaagctatagaagtgcacgtgctcttgctggacgacctgctgctgctgctccagcgccaggacgagaggctgctgctcaagtcccacagccggacgctgacacctacccccgatggcaagaccatgctgcggccggtgctccggctcacctctgccatgacccgagaggtggccactgatcacaaagctttctacgtcatttttacctgggaccaggaggcccagatatatgagctggtggcacagacatcttcggaacgcaaaaactggtgtaacctcatcactgagactgctggatccctgaaggtccctgcccctgcctcccgcctcaaaccccggcccagcccaagcagcatccgagaacccctgctcagcagctctgagaatggcactggaggcgcagagatggctccagctgatgccaggacagagcggctcctcaatgacctcctgcccttctgcagaccaggcccagagggccagcttgctgccacagcccttcagaaagtactgtccctgaagcagatcctgctaagcactgaggaagacagtggagcggggcctccccgcgatggggatggggtgcctggtggtagggcccccggcccagtgcacacccaggagattgaggaaaacttgcttagcttagaggtggccatcagacaactggaggagttggaagaggaattttgtcgcctaagacccctcctgtcccagcttggggggactctgtcccccaacctggctgcacctgaacgctctgctcagacaggcctttcatgaagagaagagtgggggagaggatgcaggggggcccacccccacccccacagctgccacagcatctcacaccccagaggcctggagcagagggagattggctgaacttgatagcagacctgctcgggtccctgcctcccactctggcctctgcctttctccctcctgccttctgcttggggaactcagggcttcactcccagagcacccccttaatccccacttttcaggccgtctcagtattgcctatggggggtcaccctccttcccctaccccaagtgcctttgctatgtttttatatcctggactggaggtttatttttaatatatattatctaaggaaaaaaaaaa

SEQ ID NO: 1320 - DNA, 2760 bp, Mus musculus
atgggagaagtcgccggaggggcggccccagggcctccccggtctggcctggtgtccatcatcatcggggcggaggatgaggattttgagaacgagctggaggcgaactcagaagatcaaaacagccagttccagagcctagagcaagtgaagcgccgccctgcccacctcatggccctcctgcagcatgtggccctgcagttcgagccaggaccactgctctgctgcctgcatgcagacatgctgagctctctgggccccaaagaagccaagaaggccttccttgacttctatcacagtttcctggagaagactgcggttctacgggtgccggtccctcccagtgtcgcttttgaacttgatcgtactcgacctgatctgatctctgaggatgtccagaggcggttcatacaagaggtggtgcagagccagcaggcagccgtgagccgtcagctagaggacttccgctccaagcggctcatgggcatgacgccctgggagcaggaactgagcctgctggagccctggattgggaaagaccgaggcaactatgaggcccgggagcggcatgttgcggagcggctgctgtcccacctggaggagacccagcataccatctctacagatgaagagaaaagtgctgctgtggtcactgccatcagcctgtatatgcgccaccttggagtccggaccaagagtggggacaagaagtcgggaaggaacttcttccggaaaaaggtgatggggaatcggaggtcagacgaacccccaaagacaaagaaagggctgagcagtatcctagatcctgcacgttggaaccggggagagccatccgctccagattgtcgacatctaaaggtcgaggctgatgagaagccaggccctgcagaccggaagggaggcctgggtatgtcttctcgggacaggactgttgggactcctggacaggacaacccaggagtctccctgcaccctctgtctacagacagcgtcgactcccgggaaccaggcgtggataccccgcaggagccaggggatacacccccacagggccctaccagcctggagcccctggcgcccccagagagcacagaggacaatggcgagactgagagccctgagcccggagatgatggggagccaggacggtcaggcctggaactggaaccagaagaacctcctgggtggagggaactcgtgcccccagacaccctgctcagtctgcccaagagccaagtgaagcggcaagaggtcatcagcgagctgctcgtgactgaggcagctcacgtgcgcatgctacgggtactgcatgacctcttctaccagcccatggcggatggaggcttcttccctctggacgagctgcagaacatcttcccgagcctggatgagctcatcgaggtgcactccctgttcctcgatcgcttgatgaagcggagacaagagagtggctacctcattgaggagatcggcgatgtgctactggcccggttcgatggtgctgagggctcatggttccagaagatctcctcccgcttctgcagccgccagtcgttcgctctagagcagctcaaagccaagcagcgcaaggagcctcggttctgtgcctttgtgcaggaagctgagagccgcccgagatgccggcgcctacagttaaaggacatgatccccactgagatgcagcgactgaccaagtacccactgctgctacagagcatcgggcagaacacagaggagtctacagaacgagggaaagtggagcttgcagctgagtgctgccgggagattctgcaccatgtcaatcaagccgtccgtgacatggaggacctgctgcggctcaaggattaccagcggcgcctggacttgactcacctacggcagagcagtgaccctatgctgagcgagttcaagaacctggacatcactaagaagaagttggtccatgaaggccccctcacgtggcgagtgaccaaagacaaagctatagaagtgcacgtgctcttgctggacgacctgctgctgctgctccagcgccaggacgagaggctgctgctcaagtcccacagccggacgctgacacctacccccgatggcaagaccatgctgcggccggtgctccggctcacctctgccatgacccgagaggtggccactgatcacaaagctttctacgtcatttttacctgggaccaggaggcccagatatatgagctggtggcacagacatcttcggaacgcaaaaactggtgtaacctcatcactgagactgctggatccctgaaggtccctgcccctgcctcccgcctcaaaccccggcccagcccaagcagcatccgagaacccctgctcagcagctctgagaatggcactggaggcgcagagatggctccagctgatgccaggacagagcggctcctcaatgacctcctgcccttctgcagaccaggcccagagggccagcttgctgccacagcccttcagaaagtactgtccctgaagcagatcctgctaagcactgaggaagacagtggagcggggcctccccgcgatggggatggggtgcctggtggtagggcccccggcccagtgcacacccaggagattgaggaaaacttgcttagcttagaggtggccatcagacaactggaggagttggaagaggaattttgtcgcctaagacccctcctgtcccagcttggggggactctgtcccccaacctggctgcacctgaacgctctgctcagacaggcctttcatga

SEQ ID NO: 1321 - DNA, 44075 bp, Homo sapiens
  misc_feature (23457)..(23689): n = a, g, c, or t.
  misc_feature (39458)..(44075): n = a, g, c, or t.
tgcgcttcccaggtaggaagcaaggtctaggtgtcccgagcaggcctgcaatcccgcagccgcgccgctccagccactggggagcagtagagggcctagaaagaagctcagccaccgaaggctcttgaaggtgaattcctagggcttccaggtctggagccaggcttattcctgggagggggttgtaacggggaattgaagtgcagaggggctagtgaccccagcagaacacctggggtcctggttcccagggctacagaactgtcctagatactgtgccaaatgcactgcagaatattcttgcagtcttatcaagtggggggtttgtacccatgttataggagaaaaaactgagtttcagatgaccagtcagttggcagagctgagttgtaaaagaatcctggactcttgaggcccaggctcttctgcgtggatgggaattgcccttttcccatctcctgggttcacgccattctgcctcagcctccccagcagctgggactacaggcacacgccgccatgcccggctaatttttgtatttttagtagagacggggtttcactgtgttagccaggatggttttgatctcctgaccttctgatccgcccgcctcagcctcccaaagtgttgggattacaggcgtgagccaccgcgcccagctggcaattgcacttttttaaaattctgcactctaggaggcagaggtgggcagatcacttgaggtcaagagtttgagaccttggcctggagtggtggctcacacctgtaatcccaacacttggagaggccgaggcaggtggatcacctgaggtcagaagttcgagaccagcctggccaacatgatggaaccctgtctctactaaaaaatacaaaaattagctggacgtggaggcaggagaatcgcttgaatgcaggaagtggaggtcacagtgagccaagattgcaccattgtactccagtctgggcgacaagagtgaaacaccgtctcaaaaaaaaaaaaaaaaaagagtttgagaccagcctggccaacatggtgaaaccctgtgtctatgaaaaaaaaaattggctgggcatggtggtgcacacctgtaattccagctacttgggaggctgagacaggagaacagcttgaacccaggaggcggaggctgcagtgagccaagattgtgccgccactgcacttcagcctgggcaacagagcaagactccatctcaaaaaaaaaaatctgaaatacttcaggcatgcaagtatttagcattcagtattcataatgtaagaaaaacctatgaagcacaacccagtttaagtaacacaggcagggcagggtgcagtgcctataatcccagcacttcgggaggccaagctgggagaatcacttgaggtcaggacttccaggccagcctgggcaacacagtgagaccctgtctttacaaaaaatttaaaaaataggcccagtgcggtggatcatgcctgtaatcccagcactttgggaggccgaggcgagtggatcatcaggtcaggagattgagaccatcctggctaacacggtgaaaccccatctctactaaaaaaatacaaaaaattagccggtcatggtggcatctgcttgtagtcccagctactcaggaggctgaggcaggagaatcacttgaacccgggaggcggaggttgcagtgagccaagatcacaccatcgcactccagcctgggctacacagcgagactctgtctcaaaagaaaaaaaaaattaaaaatagccaggcatggtgtgtgcacctgtaatcccagctacttgggaagctgaggcaagagaatcacttgagcccaggagtttgacgttatgattatgccactggacaccagccttggtgacagagagaggccctatctctaaaaaagaaaaaaaaaaaagtggccagccacggtggctcccgcctgtaatcccagcactttgggaggctgaggtgggtggattacctgaggtcaggagtgtgagaccagcctgcccaacatggtgaaacctggtctctactaaaaatacaaaaatatagccaggcatggtggtggccgcctgtaatcccagctactgaggaggctgaggcaggagaatcacttgaacctgggaggcagaggttgcagtgagccaagatcacgccactgcacttcagcctgggtgacaaagcgagactccgtctcaaaaaaaaaaaaaaaaaaagtaacacaggaaataaaaccaagacaagatgagctctctgtgtctctgtgtgtccctccccagacccaaccctggcgtcccccagaggtaacccctcccaggaactgggcgtttgccactcccctgcacgggtctacacctctgctacaaacgtgtgtccctaagcagcggacgccttttgaaaacaagtcaactgtatcatgctacgatattttttctgatgtttgtgctgtttctgagacagccttatgacaccttcccctattctgtagcattctgttggctcactttgccacagtgtatgcacccattctcccacaaatggacttttcatttgcttctcaatgtttgctaccaaaaatctccctgcaataaatttattttatatatccccttgtatgtgtgtgagggtcccctaactgctcacaaatatctcagcaactccgccctccccactcagacctcatttccctcctaccagacatgctcaaaggaaactgggagcaacacaaagatgactttgaatctctgtccaccacccctagactgtatgacacccgcaagtgacaacctcccctctctggcctcggtttccccctctgtaaaatgggggatggcctaccttgccagtcatggcaggtcaatataaaacaacttctggctgtgcacagtggcacatgcctgtaatcccagcactttgggaagctgaggcaggaggattgcttgaggccaggagttcaagaccagcctgggcaatatagcaagatcccatccctcttaaaaaaaaaaaagaagaaaaatatatgttgttgttgttattattgttattattagagacagagtttcgcttttgtcacccaggctggagtgcaatggtgtgatctcagctcactgcaacctccacctcctgggttcaactgattctcctgcctcagcctcctgagtagctggaataataggcatgtgccacaacatctggctaattttgtatttttagtagagatggggtttcgccatgttggccaggctggtctcaaactcgacctcaggtgattctcctgtctcagcctcccaaagggctgggattacaggcataagccaccatagctggcctgtttttttaaaaaaagaattccagtaaagagctgatcatggttctcactccttgaataccaggaacaccatctcgtatcacataatgagacagggagacattctggtcctcatctcacagatgaaaaatgtcaagcttcgaaggatcaaagtgcccacctagtcacacgggtagtcagccacaggtcagcctgccttatttattcttcatgagtatttatagtgactaacatttactgggcgcctactgtgggccatttctgtgcatgtgacaacccctttaagtccttgtttctaatcccaagaagcaaggaaatggggtcagggaagggacaaggtttgcccaagtccaggcagggggagaggtcaagctcagaaccatcacctgcccatgacacatgcccaggactcaggttccctaggcttccttccaaaggctcagcagtgacgagccagcccttgaaccagcctcttcccccacccaagcagccacctctcaggggaattgtggccaccacaggtgcagggagcagtttctctccactcacagcctgaagcatacccggcaggggctgtccccaggcccaacaagcaaagggcccagtagcgagggccactggagcccatctccggggggctgggcaggaagtagggtggggtttggggtagggatctggtaccctgggactgctgcaactcaaactaaccaacccactgggagaagatgcctgggggtccaggagtcctccaagctctgcctgccaccatcttcctcctcttcctgctgtctgctgtctacctgggtatgtggccaaagggcaggaactggcgggaggtgggggaagctgtggaggctgcagagagggcacaggcagagggaagggggctcagggaaaggggaagaggaggcagaggataggggacccagggaagatgcctatagaaatcgtatctgtgccaagatgggccaaggtggggctggagggagcccagcgaaggagaaggggcgtccacagtctcacacagggaggcaggagcaagagtcacctcccccacctcctgttccccacaggccaaaataaggaactaaagttgctcttgactgagcaccagggctgggggcaggaaggggacttaggggtagcagcattcagcgtctgtcaaggggagaaaaagctttctctgccttaaacctcaggtgcctctctctgttgggagtcccttctcagcactgggggaatgggtgtctcatggactccccctcacctgctcaaggacagctggcaggggctgtggccacgctaacccaggagttcagagaaaaaggttccccacccaaggggacactgggagcaaggattggagttcacgtctgagtcttaagcccgtgacgatgagggtgctcggcccctctccccatctcttcctccttctctcttcctcacctccctcctccacctacctccagaagaggggactggccatgtgggaggcctggctgagagctggggcttcccagaggagcccggattggacactgcagccagcctgagccgcctcgtctcactcagagacacccccagtctccaccccgctctgagccccttcaatcaccagcagcccagcccaaggactgaactcacccctgacccctaggttgacacatacaacttacagagaatgagggccaggcacagggtcacaggccagggcaggccacagactggctcctcagcccaggcagggagaggccagggagccaagagtttgaacccagtgccactcctgactgcctggtgatgctggcaacccgcctgccctcccagagcctcagccatccctcctgtaaaatggggctaaggagagaacctacttctagggttctgtgaatgattacacaagaaaaagcgccaggtgctgggcctggctgaggctggggtgcaaaaatggaccgggaaggctgcgggaggaggggacgcctgcactgcttctggaaggagctgtctggacagcggtcctccagtgcctggaacaaacatccaaaatccagagagttcacagggccagagtacaaagtgggtatgcgggaggggggcaagagatggcgctgcagaggtgagaagggcctcccaggggtcttaccatcccagggagtctcattctcctctcccaggatatcctcacccaccccaaccaggtatgtcctctctccttcccaggggcttcttcactttcccgcatcccccctctccccaggatgtatcagcccctgtcaggggctctctctctccctccccacccaggagagtcctcaccctcttcccaggagtgctggaactgcaggggccagggctggggaaatgtgtcaccatccccagtccctgacccacccaccctgtctctccacaggccctgggtgccaggccctgtggatgcacaaggtcccagcatcattgatggtgagcctgggggaagacgcccacttccaatgcccgcacaatagcagcaacaacgccaacgtcacctggtggcgcgtcctccatggcaactacacgtggccccctgagttcttgggcccgggcgaggaccccaatggtacgctgatcatccagaatgtgaacaagagccatgggggcatatacgtgtgccgggtccaggagggcaacgagtcataccagcagtcctgcggcacctacctccgcgtgcgccgtgagtggcccagccctggcccctactcccactgtcccgctggggacactcggtttatctttgaagtggggatagagccagtaccttcaatgtgggtttcaaaccggcttggacagagggacggacattctcctctgcagagtggggtctctggggggtctggggccttgcaggaggtgggcggggccaggaggctagggagggcaagaggggccagggctctgagccatactacctccttgcagagccgccccccaggcccttcctggacatgggggagggcaccaagaaccgaatcatcacagccgaggggatcatcctcctgttctgcgcggtggtgcctgggacgctgctgctgttcagggtgagccccctcggacctctgagtcagccgggcgagggcctgggccgagggacccccaatacccaggtagccctctagagcctgaggttccccatccaaaacttgggagaatgaaagcacccaccatataggggctgtgggagttaaatgaatgaatataaagaagggacttgaactggcgctgagcccagggggtgtcttcaatttagtttccccttctgggctgtcctcacgtccacctccccccaagaagagtctcattcttctccctaagagtgtcctcactcccctcctgccctcacccaggagtgtggttaccctccaggtgtagccaagaccagggaaggtggggcctggtcctcccagaatctctgatctgtaccagcctctccttaggcactacagaaagtgtgactgttattgttattattcatggagaatagtaagggagtggagactcaagaagacgctagcttgggaggccgaggcaagaggatcacttgaggccacaagtttgagaccagcctgggcaacacagcaagaccctatctctacacacacaaagtcttaaaaaaaaattagccaggcatggtggcacacacctatagtcccagctactcaggaggctgaggtgggaggattgcttgagcccaggagttcaaggctgcagtgaaatatgatgttgccacagcacttcagcctgggcaactgagggagaagaaagagagagagagagaaagagagagagagagagagagagagagagagggcgagagggagggagggaaggaagggaagggaagggaaggaaggaaggaaggaaggaaggaaggaaggaaggaaggaaggagaacactggttgtagactcagagagaactgttacataaccagtatgtggccttggggacatctcttaccctttctggaaaagtacttcctggcatccaggagggtctgaaagatattcacctccccctgctcactgaggcacccaccccacccacccctacagaaacgatggcagaacgagaagctcgggttggatgccggggatgaatatgaagatgaaaacctttatgaagtgagtgaagggtggggatggggtaggggcagttgtgttaggggtgggggtgttccctctgggggtggctgggggcagggaccccaggtgtcagggtgctgatgttcgctgcctcatttccatcccagggcctgaacctggacgactgctccatgtatgaggacatctcccggggcctccagggcacctaccaggatgtgggcagcctcaacataggagatgtccagctggagaagccgtgacacccctactcctgccaggctgcccccgcctgctgtgcacccagctccagtgtctcagctcacttccctgggacattctcctttcagcccttctgggggcttccttagtcatattcccccagtggggggtgggagggtaacctcactcttctccaggccaggcctccttggactcccctgggggtgtcccactcttcttccctctaaactgccccacctcctaacctaatccccccgccccgctgcctttcccaggctcccctcaccccagcgggtaatgagcccttaatcgctgcctctaggggagctgattgtagcagcctcgttagtgtcaccccctcctccctgatctgtcagggccacttagtgataataaattcttcccaactgcagaccttggcaggagtcgtggatcttacggaaaccgcctctcccacatgtccctcagacccaggagtcccagcccaagccactccctgcccactccccacacctgggaccaggtagccagtctgggctgccctcctgggagaacaagatgtctcttgggaaggtccccagaccaactgaaggactggtttggccctctttgcagggcctcaccctagggtcatatccttaagcaagaaggggacaagatcaagatggctgtggctaccaaattacttacacttttttttttttttttttttttgagacagagtctcactctgttgcccaggttggagtgctcactgcaacctctgcctcctgggttcaagcgattctcctgcctcagcctcccaagtagctgggattacaggcgcctgccaccatgcccagctaatttttgtatttttagtagaggcggggtttcaccatgttggccagactggtcttgaacctctgacctcaggtgatccacctaccttggcctcccaaagtgctgggattacaggcgcctgccaccacgcccggccgctttttttttttttttttttttttttgaggcagagtctgactctgtcgcccaggctggagtgcagtggcgcaatctcagcccacttcaacctccacctcaagcgattcttgtacctcaggctcccgagtagctgggatgacaggcatgtgctaccacacccagctaatttttgttttagtagagacagggtttcgccatgttggccgggctggtctcgaactcctgacctcaagtgatccaccatgcttcggcctcccaaagtgctgggattacaggcatgagccactttatgcgtatttaagccttggaaacacagggactatcttgtggattggggctagtacagaattcagactgcagccttttcccgatgcgttgacttacagaaggggcattttggagggtctgtggtcctaacctggggatagcagggagatcccggggcaatgacagagaggcacagagacacggatttcctgagaaagggagaggagagaggctgagacccagggatcatgaaggggacgagcaagggaaggaagagatgatgagaccctgggaatccgggagagagacagggacgtggagagaaagggacagagagagagcgagaaggaaaggaagagacagaagggagaaggggcaaccgaaaatgggcacgaagaggcccaggcacagcaacagctggggaaatgacagagactgagacggagatgcagaaagatacagagagagctggagagggtagagaagggctttcggggagaaagtgatggagggacagagaggagaggtggaggccaaggagggaaagaccccagtagagaaagacagagggacagagaaggggatgcagacgcaggcgggagcacacccacagaggcgaaggaagggcgcaagaccatgagaaccacagacgcggaaagccggggaggtcgtggctcggtctagggcgcacggggagcagggcttgccccccagcacctccggggaggtgaccccagccgggagatgcgagtcccgcggagcccgcgcccggcggacggaccgatggacaaagccggggagagctcgggcgcggccggggcgggggccggtgcccgcagggacccgggcgcagcggggaaaggaggggcgggcaagcggcgagaaggggaaggaagcggaggtgccgggcgggcgcggggcgcgggcaggaagcggggaggggcggcggggcgggggcctccggaaaaacgccccgacttcctgccccgccagagccaggaagcgggagccgggacccagggcccgggatcgccgagcccgacctcgggcgccccgccggtcacctccgcgcggacaccaggtactcggtccccggccccgcccggcctcctcccctcggctgttgggggaagtggggaggaggagggaggggctggggcgctgccggcagcggaggggcccccttcggaccccacggaaccagcggccgcccctccttgggcctcagttttcccatctgtcaaagggagcaaagaggggagaactcacacttgacgagtgccccataggtggggacgaacggtgcgaggccggggccaaggcctcccacctgctcagtggagaacggacgatcactaccattgtacgggtggggaaaccgaggcccggggagccaaaccgactcgtcccagggaacgcacatcgtgagaaagtgtggagttgggatttgaactcgcacgtgctttccgcaaagcgccatcctccaacccccgcatgctttagggccacctaaaaatgaaaaacaacaataacaacaacgacgagggtcgctgtgaagctgaaagttgcagagtgcatttgaaagagttttcggaaagctcttttctaggtcattaattataccgtgagagacaggtgtagggagagagctggaggccttctcccattgtacggatgggaagactgaggtctacagagaagtcattactttttgcagattacactgcatgtcagagggaaagttgtgctggaactcaagactattgcttttccggttccaaaggaaggggctgggggtgggagacggaggggattgatgtacgaggattggaaattcagcgggtcccctaagtggggagactaataggacggggagccccagtccgccgtccgagtgctcagcgctggggtgactaggagatctccgatcgaactcgggaggagttggacccatctgcacctccgggcgcggggcggggcccggggagtgacgggggcagtcgagatacggaaacgctggccctccaagacaggccagagcggccctatctggcctgcgtggcgcagtacagcgctagagcggccggcgggaggagtagagtcgtcggggccggagcccggcaggagccgggctagagcggctggcaggaggagtggagctgggcgcaaaggtggactcagggcggctagagcgacgcggcggcaggggtggggagagtgcggagcccgagcgcggaggcttcggttccggtggcggcgatggcttctctttccacctggagcaggtgagggacgcggtccccagcgggtgtcagaccctgactctgcacgtcctccccggcatccctggccgtgcacactgccacgtcccccgtaggatttagggcccgcgtaagacccgccacgtccatgtaagatttgggtctcgtgtagacccgcctcattccgtataaagtcttacagaccctccaggttcctgccagccccccatggagaactggcttcttatagacgtggggtcctcatagaccagtggcatcccctagaatccggggctctatagaccatgggtctcgggacccaccacgcacccctatggaattctgagtcccttttaagtctccagaggttccacagactggcagctgtccctatagaatcatgatcctgtatgatccctggatcctttagacccactgtgtgtcaaatagaatctggggagttacacattccaacgactcttttaggttctttaaggctccagaagttcttggagaccctgagtcacctgctcaacacattatagaccctgagacctccatagaactcaacacccatgtggccccccaacccatggaccttctaaaccagccctaaccccccagcgccccatgcacgcagtgttccctctgctggaccccccaggccttgtcagttgcctatagatccatctattctctgacagcttcacctataattctccagcctttgtgggactcccccaaacccctcctcctaaacaggcgacactcctcgcctccatcatctccaacccccaagcctctgtggagcagccgtatccaacttgcactcctgcctaggccatagtgaccacatacccgtgacttttccaggcatccataagaagacatgatgtgtctcagagctttggttcagattttagtttctgaagggtagggtgggggctccccatgctctgaagcaatgctctctgttttattttgttttatttatttatttatttatttttgagacgaagtctcacttctgttaccaggctggagtgcagtggcgcgatctcagctcactgcaacctccgcctcccggattcaagcgattctcctgcctcagcctcccgagtagctgggactacaggctcgtgccaccacgcccagctaattttggtatttttagtagagacagggtttcactatgttggccaggatggtgtcgatctcttgacttcgtgatccgcccgccttggtctcccaaagtgctgggattacaggcgagagccaccgtgcctagcctattttattttaagacaaggtctcactctgtcgcccaggctggagggcagtggcacaattttggctcactgcaacctctgcctcctgggctcaggcgatcctctcatcttagcctcccaagtagctatgactacaggcatgaaccaccacacctggctatcttttgtagagatgggggtttcaccatgttagccaggctggtctcgaactcctgagctcaagtgatccacctgccttggtctcccaaagtgctgggattacaggtgtgagccactgtgtccaccaaatgcagtttattttaaatgcgtaaactctgtagcccaactgcccaggtctgagtcctggttctgcctcttatgagctgtgcctcagtttccttctttgttaaatggaggtgagaataataatgatctcttggagtcaccgagaggattaaatgagttattacctgtcaaccagcgatgccatgcctggcacatactaagtgtctcttttgtgtcagctgtcatttcattattattgtgataaggaataaggagataagaacttggcaagtgcacagttccagacctggcaccaagcacttgcaaagataatgagtatcccctcctttgcctttttaaaatttccctgcctcagttgagcgtttctacctctgagtgggatgagcatgcaccctccacgtccgtggtcatgtttcatagtgagacagggtctcactgtgttccccaggctggtctcaaactcctgagctcaagcgatcttcccaccttggcctcccaaagtgctggggttacaggcatgaaccacctcacctggccagtttgcaaatttattaaagtgaatgtttaacagtacttgaatcttgaattgcccaagcttagatattggacaatacactttgtgggaaataataaaaatgatgccttccccaggtggacccacagggtggcatttggacactccagaaagcatcattgtttaatcatcaaaatcctggttaccatttactggggagctagggaggaggcccataaagcaggagaagggcgggtctctgctggcttgggttataaatagctttgggctgtggggagccccgccgctggtccaccccacccctctttccacagctccttcccacctgacacgggctccgtggcattagtcagactaattaaggacacagaagatgtcggtggaaagactcagagagaagtggagactcaaggagagacaaagatgggagagacagcaagagatgggggagaaaaagggatggagagatgagagacagcacatgagactgtgactcagagaggtgtgaggatggtggctgcagaaaccagatgtgggaggacagaggcacagagacagggacaggacagacggagctacagaagcaggaagggggtgtcaccgctgagagggagagatggagggaggagaggcagggatggtggggaaaatgagacagttctggaggaagggaaagagaaaaatcaggaaacagggtgaaaagagaccaagacatgagacagattcaagggacagacagccaaggagagctggctgcggacagaccaaggcgcacgtagggtggaggggacagacgcaccttggagatgggctgtctgaggccccatcacttggtttctgggactggaagcctgggaagagatgaggtccctgggggaaagaagaacttctgggtttggggactcccagtccctgagggaggagggttctgagttttgttttcttatgtggagagttgggggttgggggtttgccattgtgacttcctgtcacaggaagtggggctggtgggttccaaggcaacatcctgtcccaggcctgtcacagaccagaggagacccctgcaccccacttctctcccgcctctcctctaaccctcccatcccctcttgcctctgggctgtgccctcaggaattagcccccaggcccctggtccctccaacctgggagtccaggcccccagccccctcttccattagggcattagggaccccagattgcaggctgtcagactcagccttcccatggacccaggctcctgagcctccaacgcctgcccccgcaaggctcccgtccctgggctcccgccccctggcgggtctctgaagggctctttgtggccacacagaggccccattgagctgcggaggctgggatgggggaggctgtttactcaccttcacacctgggccaggaatctgtgagtaaccaccctgggccgcctcctcccaccctcctaaccacagcccctcctcttcctccagccctgcagagcccagggagatggaagacttcgcccgaggggcggtgagtggacagagcaaggggtgaggcgactctggggctgtgggtggagagtcctgtggactgaagctgccctccctttccacaggcctccccaggcccctcccggcctggcctggttcccgtcagcatcatcggggctgaggatgaggattttgagaacgagctggagacagtgagtgggagatagggtggaaaagctctgtcccaggctcagtgtcccgccccaggtcccctcccacctgcagatgctgtcttcttggccttttcccacggtctgtctcatcctctcatctccctggtacctccttcctcacctcgccgaccccacacagcagcatagacgcccacccttcttactcttaaccccatttcttatcgttgctctctcctcccccagcatggaccccaatttcttctctcctaatttctgtcctcatcatccaccattataatattaagtctcatccattctccctgaacacctgcccttgctgtcaccatcattttttggacactgtcaccactccccacttcccaggagctaaccctggcttggatcccttgtgaagtgccaggaatgggtagggtcaaccctaaggcccctcctcttctccccattgtactcaccccttcctgcacccccagaactcagaagagcaaaacagccagttccagagcctggagcaggtgaagcggcgcccagcccacctcatggccctcctgcagcacgtggccctgcagtttgagccaggacccctggtgagggcagggctgggtgggcacagggaggggtggggctgggacaggcacagcttttagcgaattaaaccagcgagctagtgcctggagggtctggaaaagcagatctagaacacagagagccagatctagaaagagagaatgctttagacaagagccagaaagcatgccacgtgacctcaacaggcttacaagtgcccagggtagatctcagtgcgcagcgggcagggtacacacgtcaggaccccgcggagccacagagagtccagcagcctggcagaaaccacatcccatcccactctgtgcctgtggcagcgcccccatcagcctgtggcagcacctttccgtgaactctaggggaccaaattcttctctccaaagcctttttggcagatgccagcacgcagtcattcacggttgatggttgggaaaaagaagctgttagccatcccaggtctagggagcacagcaggccctgatctggaaacaagaaaaccaccacacacagctcacaaggcagaccacacaattgtggatccagaagcctccggatgaggcagaagatacctgggagatgtggatggacaaccgtgccatccagaaacacccgcagagtctagaaaacccagcaggtgatttagaaagggagaggccacagtgctggctggcaggggatctgtagacaagggtctcatcccaagaagaccccgtccagcccagcacaggataggaggacagcctggggacagccagggcactgcaccatgtggacatgcatagtggacccctccagaaaacaaggaaaccgatagagtggggagaagtgcccgaggcatgcagaaagaagaacatgtcagctgcaagaccagaggctggtcatccggacgccaaaccatcagatatgcagaaaattaggaaattgcagtctttcccctgtctacattctctttccagaagagtggttcccccgacaaccacatgcacggagactctggccctctgagcaagggagtcccctattcaagccttggggtttctagaacaccagattgtggacatcagcccagggatcgtgctgactaccatgttcttttacagatgtggaaaccgaggcctagagagggtcagggacttgcctgaggtgaccccggcggcctctgggcattttgaggtttattctcgcatagctccctcacctcatcagcttgtggggagccgatcagagatagctgtggtcccctgggcagcttcctgttggcctgtcttagaattttgctatatttggggggtgtgaagagtggatatagatgtgttaaaactgtttaaagtggagaaggaggaccgggcctggtggttcatgactgtagtcccaacgctttgggaggctgaggcaggaggatagcttgagcctgggaggttgaggctgcagtgattgcaccactgcactccagcctgggcgacaagagtgaaaccctgtcttgaaaaaaaaaaaaaagtggggccgggcatggtggctcacacctataatcccagaactttggaggctgaggtgggtagatcacttgagatcaagagttcgagaccagcgtggccaacatggtaaaaccccgtctctactaaaaatatgaaaattggccaggcgcagtgactcacgcatataatcccagcactttgggaggctgaggcaggtggatcacccgacgtcaggagttcaagaccagcctggccaacatggtgaaatcccatctctactaaaatagaaaaattagccaggcacagtggtacacacctgtaattccagctactcgggaggctgaggcaggagactcacttgaacctgggaggtggtggttgcaatgagccgagattgcaccattgcactccagcctaggcggaaaaaaaaaaaaaaaattagccaggcctggtggtaggcacctgtaatccaagctactccagaggctgaggcaggagaatcgcttgaacccaggaggaggttgcagtgagccgagatcacgccactgcactccagcctgggtgacagagcgagactccatctcaaaaaagaaaaaggagaaaaagtcccactcccattggagtgagttcatttcccagatgagagcccccaggagccaggacaggttggagtccccactgtcacccagaacaggggcgggcactcaggaaatgcttgacgaatgacagagtgagccccacttgtccacctgttctttccaagccctcagtatgcacaaggcaccaccatctgggacacagatggatcaacctacaacacccctcaacacacacaaacccttaagctgctcacagtctttccaggcagtggagtgtagtagagacaggctgcctggattcgaatcctaactttgccacttagtagctatgtgattttgggttttatttatttatttatttatgaaacagtctcgctctgtgtcacccaggctggagtgcagtggcacaatctccactcactgcaacctccatctcctgggttcaagcagttctccctgcctcagcctcccgagtagctgggatcacaggtgcccaccaccacacccgactaatttttttatttttagtagagacagggtttcgccatgttggcctggccggtcacaaattcctgacctcatgtgatccacctgccttggcctcccaaagtgctgggattacaggtgtgagccactgtgcctagcctagttgtgcgactaagcttgactaaacttcttgagctccgttttctcatctgtaaaatggggataatgacggtccctatgattgaacacgttaatgcatgtagagggtgtagagccgtgtctggtatacactaagccgtcagtatagacagtagtagtagttgttgtcattattgccgggaggagaccatgatgaagaaccacaaaggaccatagcacaggatggaaaattagaaaatgctcatggcagccccagggagcctgcaggggaacccagggcctggctttaggggtggaggtcagggagtgcttcccagaggaagtggcagttgagtcccacagccataggatggccaggaggtgaggaaggcccttttcaaagggagagtgtggtttgaggcagggtgagggagcggagagtcatgctgtgtgtctcccccagctttgctgtctgcatgccgacatgctgggctcactgggccccaaggaggccaagaaggccttcctggacttctaccacagcttcctggagaagacagcggtgagagaccttcaagctgccccaaccctgcaatccctgtttgggcctgcagagtcaccatgcggtccccagcctctgccctgagggcagctgctgacccaggccttccccagcaccctcgcttagaccagggttcctggcagtcctcccggcctgcatctcagcacaccaagtcctcctcttcaccccattctctctcttgagcaggttctccgggtgccggtccctcccaacgtcgcctttgaacttggtaaggagaaggatgggatgagggagaggtgtctagcggggaccacacctcccaggaggccaaggggagggaggccgcactcccatgctctgctcggacagccgagattcattcattccttcttggcagcggcctcaggacgtgtggctgttggagtccaagggtgggtggggaccgtggtccaagccaccagggagctggaccctagcccccatgtgtgtccctgcagaccgcactagggctgacctcatctccgaggatgtccagcggcggttcgtgcaggaggtggtgcaaagccagcaggtagccgtgggccggcagctggaggacttccgttccaagcggctcatgggcatgacgccctgggagcaggagctggcccagctggaggcttgggttgggcgggaccgagccagctacgaggcccgggagcggcacgtggcggagcggctgctcatgcacctggaggagatgcagtgagtaggccagccctggtgggagcgtcgcccctccccagcacaagggcacccgtgctacctctggcatgttccatcccgtttgcaggttccctcttcagggtcagagttcatttcttggcactgggggtcttcctctaccctggtgttttaactcaccttgaatccgagtcttccctttccagctttggggttcccttgtcatttctgggtcttgtccatgatctggcacttggatcccatcctcctggatgagagacctccctccctcttatgacagtccttcccaatcccttccacagtgtcccctctctgtctctcttccccctgcctatcccaggacagcaaccctgagatgtatcctgggtggatggggaccccaggcctagcaaatatgtcacaaacatctctcttcctcctacagacataccatctctaccgacgaagaaaagaggtgaggggggcaggggaggcgtgcggcctcctgggtttgagggaggagggggctgagggcctggactcctgggtctgagggaggaggaggctggggggcctggacgcctgggtctgagggaggagggggctggggggcctagacgcctgggtctgagggaggagggggctggggggcctggacgcctgggtctgagggaggagggggctggggggcctggacgcctgggtctgagggaggagggggctggggtcctggacgcctgggtctgagggaggagggggctgggggcctggacgcctgggtctgagggaggagggggctgggggcctggactcctgggtctgagggaggaggaggctgggggcctggactcctgggtctgagggaggaaggggctggggggcctggacgtctgggtctgagggaggagggggctggggggcctggactcctgggtctgagggaggagggggctggggggtctggactcctgggtctgagggaggaggagcctggggcctggacacttgggtcctgggcattgggtaacagcccttgcccctgtccttttgaaccctctcatctctcctcagagtctcacaggaagtagttgtggggtcaggatgggaaggccgggcctctgcctctagggggagagagagagagtgtgtgtgtgagtgtgtgtgtgtgtgtgtgtgtgtgtgtgtgtgtgtctttgtgtgtgttgagccctcactgtcccttccctacagtgctgccgtggtcaacgccattggcctgtacatgcgccaccttggggtgcggaccaagagtggagacaagaagtcggggaggaacttcttccggaaaaaggtgcttccctcagtgccccgtcctgaccctttcctctccagagacgccctgggagcctcatgactctggatacctagcgtcaaattctgctttgttgttgtctcagagatgcttagcctggtcttcctccccgccctctcacaggtgatggggaaccggcggtcggacgagcctgccaagaccaagaaggggctgagcagcatcctggatgccgcccgctggaaccggggagagccccagggtaaggcggctctggcctctgccctcccctgtcttccccagctgctcccactcactgtctcattctctctcgtttcagttccagattttcgacacctcaaagcagaggttgatggtaatgtacctgtagccatagcatccatactgggggcctgtgtgggagaggctaggacctggacgcctgggtctgagggaggaggggctgggacctggacgcctggttctgagggaggaggggatgggggcctggacacctgggtctgagggaggaggggctgggggagctcctgggtctgagggaggaagggctgggcctggacccctgggtctgagggaggagggactgggcctggacccctggctctgagggaggaggggctgggggagctcctgggtctgagggagggaggcctggggcctggacccctgggtccgaggtaggagggattgggcctggacccctgggtctgagggaggagcggctcagactcggactcttaggtctgaggaggaagggctgggcctagacccctgggtctgagggaggaggggctgggggagttcctgggtctgagggaggaaggcctggggcctggacctctgggtctgagggaggaggggctgggggcctggactcctgtgtctgagggaggaggggttgagggctcctgggtctgagggaggaaggggctccttgtcatggtggggaagggcctgagcacagcctcttgcatcccctggcggttgtggatttgagttactgttctcttatctccctctttctccctcactgtctccccagccgagaagccaggtgctacagaccggaagggaggcgtggggatgccctctcgggaccggaatatcggggctcctgggcaggacacccctggagtctctctgcaccctctgtccctggacagcccagaccgggaaccaggtgagagtttcctgggccagggctccatgaggcccggcgatccagggtgggggtgctgcctgcccccttggcacccccagatagaagccattccccagcaacacctcccctttgctctcagcatccacttctccctgctcctggtcaccactgtcattcataactttccccttccctcagtttgccctttccacagctttgctcccaggctctgacctctctgctggtgctgcgtctcccacccccttggactacgttttccatcaacccttccttttccagaaccttccctgagtacatgaccagtccaccctctgagctgcattgctggccccctaggtggggagcccgccagccccatgagcttcatccctcaccatccttacactgctgtggcctcaggcccttggatctctgcatggccaggccagggctcacacaccagctctgctgactgcttgtgtttatttagtatcttggatatgactcccctttcttagcctccgtttgcttttctctaaaggagtatgagagggtggggaggatgaatggacgtggaggcagcacagaatccagggccctcccgacctcagggggctgcagtctggttgggtgggagagatgtttgtgacctatttgctaggcctggggtccccatccacccaggacacacaggggcacccacttctgttgcatcttcatgctcctgcccctagtggccatgttctgagaggtcttaacatctgtccgtcccgtgctgaagtacagagcagccatgtggtgtctgccaggcactgggtagctttagcccccgcaattccaggcccccagagtgtgggtctcgtggccgcagaggccttccagccagccctgctccctccaccccacaggtgctgacgcccccctggagctgggggactcatccccgcagggcccaatgagcctggagtccttggcgcccccagagagtaccgacgagggggccgaaaccgagaggtgcccaggctggggtgcaggggcgggaggtgtggcttactgggcgctggtgggtgggtgcagggtcaccgctgccatctgtgcctgcctgtcccaggctcttgctccccatgctcctctgctgctctctgggtctggccattcctctcccttcttctttccttttctcatctccctcctgcttcctcattgcccccctttccttttatccttcctttttcctctgctccttcctctccttccttttttcactaatccttctcctcctcccttcctctccaccactccttccatctccttttatttccccctcctctctcacctcccctctcctctctcacctcccccctcctctctcacctcccccctcctctctnnnnnnnnnnnnnnnnnnnnnnnnnnnnnnnnnnnnnnnnnnnnnnnnnnnnnnnnnnnnnnnnnnnnnnnnnnnnnnnnnnnnnnnnnnnnnnnnnnnnnnnnnnnnnnnnnnnnnnnnnnnnnnnnnnnnnnnnnnnnnnnnnnnnnnnnnnnnnnnnnnnnnnnnnnnnnnnnnnnnnnnnnnnnnnnnnnnnnnnnnnnnnnnnnnnnnnnnnnnnnnnnnnnnnnnnnctccccttctctttcaagcccccctgccccctgccccccaccccccgcctcgctcctgcctcctggtgcccgtccctcaaccccccacccctctgctctgtgccctgggggccctgtcccccttacagctggggggcaggctctgcctcctgcccgtccttgtgccgctgctttggggaccctttggtgggtgcggggaggtgggtcaggttccatctgggcccacctctgaccctgtgcccctctctccccagaaggtggaagaggtgggtgcctgggccctgggtgggggaagggctagcccctcccccatttgctcccagcccctcccctctccccatggccactccctccccttcactccctgtgaggggtgggtggggacatcaccctcccagttgaagagctaagtatggaaatcctccccaccccataacaccccctctgttgccatccccctgcctcagggaagggagggggtcagtcctatgctccatcctgggttccccatcccttcccccatcaaatttcagtatcccccctcccccaagaccccccactaccccagtgcccctaaaatcccaccactcctctgactctctcctctcttctgttgcatgtttgatccctgtcctggtcacccttgccccggtcctggtctctccctgtctctgtccctgtcctggtctctccccgtctctgtccctgtcctcgtctctccccaatttctgtccctgccctggcctctccccacctctgtccctgccctggtctctccccgtctctgtccctgtcctggtttctcttcgtctctgttcttgtcttggtctctccttgtctctgtccccggcatctgcctgactctgtccttggcctcggggtccaggctatcagggcgtctggggcgctcagagagcctgcgggtgagtgaccgccgccggccttcccggggcagcctcggggctaagggccggggtgggggccgctcccggagcgacgtggacatggaccccagttccgccacggcagtgcttggccctgcccgacgagccacgtatgtcaaccctctcccttcccccatccactaaggcagcctggagaatcagggagggattgttgtcagagtcacagaggaatgggcgttggagaccgaggtcattgaggccaactgtggtcacagaccttggaggaggagggggtagaatgcttctagagatctgggaactctagtgtggtccgatctagagacctggtctgctgcacgggccaccctgcgggcatcgaatgccaaggccactgaccggggttgaacgctctaagaggctgaaggctgcttcttgggatggcccaagctggggccctaacaaggcctctgtccacagccccgagcctggagatgagggggagccggggcggtcgggactggagcttgaaccagaagagcctcccggctggcgggaactcgtccccccagacaccctgcacagcctgcccaagagccaggtgaagcggcaggaggtcatcagcggtgagtactgcccccatcaccccactgtggccaaggacacagtccagctctggcaaaggcaaagacaggcgcagagagatgttcatcttggtgtcatttaccatcgggagaacttgaaggcagcttcaaattccctcttgttccaagttcagattgtttcaacacagagcattttgatggaatgtgaatgccactgtggaagggacatttccaaacatttctagtagtgcaatacagtgctgatgttgagaacactgcatttctggtgcaagcttttatttccttgcttgtgaaatgtgggcattaatagttcctacctcagatattgtcatgaagatgagatgatttgtgtgaaatgtttagcatagtgctgggcacagaggaagagcattttattttatttatttttttaaatttttatttgaggcagagtctcagttggtctctcaggctggagtgcagtggcacaatcacggctcactgcagccttaccctcccaggctcaactgatcctcccacctcagcctcccgagtagctgaacaggcatgtaccaccatgcctggctaatttttgtattctttgtagagatggggtttcgccatgttggccaggctggtctcgaacccttgggctcaagtgatcctcctacctcagcctcccaaagtcttgggattacaagtgtgagccaccaggcccagtcaaggaagagcattttaatgagattgttgttactagtttgatcttaattgcttaggggagaaaagatccccacaggggaaagtttgggagaatgatcagtatattagcagtgcttgcttctgcgtggagagatgatgagtgtatcatttttgtctttttccttttttcctttgctaattgtgtggtggctagggaggctggtggcaaaaagagaaagctttttttttttttttttttttaagacagagttttgctcttgttgcccaggctggagtgcaatggcacaatctcggctcaccacaacctacgcctcccaggttcaagtgattctcctgcctcagcctcctgagtagctgggattacaggcatgtgccaccacgcccggctaattttgtatttttagtagagacggggtttctccatgttggtcaggctggtctcgaacgcccgcctcagcctcccaaagtgctgggattacaggcgtgagccactgtgcctagcccaagagaaaggtttgggacttgactgaaagcttatttacagattacttcatagtgaaaaagatacttattcaaaaattttaggggagtagttgagtactttttgggtcacagatccttctaaggacatgataaaaaaaaaaaaaaacatgagccatgtgctacccattaggactttctggaagatggaaatgtgctttatttgtactgctcaccatggggaccatcggccacctatggctggtgagcacttgaaatgcactaggccaggcacagtggctcatgcctgtgatcccagcactttgggaagccgaggtgggcagatcacttgaggtcaggagttcgagactagcctggccaacatggtgaaaccccatctctactaaacatacaaaaattagccgagcatagtggcgcatgcctgtaatcccagatactcgagagagtaagccaggagaattgcttgaacccaggaagcaggagatggaggttgcaatgaacccagatcactccaccacacttcaatctaggtgacagagcaagactgtgtctcaaaaaaaaagcactaaatacaactgagcactgacttaaaatttcattgcaattaacgaaaatgtaaagagttgtacacggctggtgactatcacgttggacaggatagcaatttctttccccagaaagaatatgcataatgtacaaaatcgtgcttttagtctcaggggacttctagggcccctgaaactcacacatatgccctccggggatgtgggggtccctggatctgaggctgtcaaccactgtataatgtggcttgatggttagacactaaacacagctgcaagcttgctggcaggtgggatgactagcttgtccccatttgctcaggatattcacagttttatcactgaaagcccaggcaggcaaatgaggaccattggtcactctggccagctgccacagcgaaaagggaaaggcagtgggttgaggaatcctcactggttttttttttttttttttttttttgagacgatctcgctctgtcgcctaggctagagtgcagtggcgtgatctccgctcactgcaacctccacctcccaggttcaagcgattgtcctgcctcagcctcccaagtagctggaactacaggtgcccaccaccactcctggctaatttttgtatttttagtagagatggggtttcaccatgttggccaggatggtcttgatctcttgacctcgtgatctgcccgcctaagcctcccaaattgctgggattacaggcatgagccactgcacccggcccctcagtggctatttaagagggcaaatgactccacccggagagtttttttttttatttgtttgttttgttttgtttttttgagacggagtctcgttctgtcaccaggctggagtgcagtggtgtgatctcagctcactgcaacctctgtctcccgggttcaagagattctcctgcctcagcctcccgagtagctgggactacaagagtccgcccccacacctggctaatttttgtatttttttagtagagatggggtttcaccatgttggccaggctggtcttgaactcctgaccttgtgatccacctgcctcagcctcccaaaatgctgggattataggcatgagccactgtgcccagccattttgttttgagacaaggtctcgctctgttgcttgagctggggtgcagtaatgccatcatagctcactgcagcctcaacctcctgggctcaagggatcctcccacttgagcctcccaagtagctgggactacaggcacacaccaacatgcctgggctaattttttttcttttttaaatttttggtagaaacagggtttcaccatgttgcccaggctgatcttggactcctgggttcaagcaatcctcttgccttggcctcccaaagtgctgggattacaagtgtgaaccaccatggctagccagagagagttttttcccaccaacttctaggaagctttcctccctgctctgcctcattcctctagcctgcccatgaggtcatgccccctagtctgcaccctccccaacatgcttcctgctttggtggccctgcagagctgctggtgacagaggcggcccacgtgcgcatgctgcgggtgctgcacgacctcttcttccagcccatggcagaatgcctgttcttccccttggaggagctgcagaacatcttccccagcctggacgagctcatcgaggtgcattgtgagtgcagagccagggtccctctgtgtaccccactgccccacgggcagctctgctctagccctgggttcaacctgctcgggaaccccagggttcacatggggtgggggcagatacgccatccggtcccgaggatcagacacagacacacctgcagccctacccccaccacaccgcagcaggccccgcacagcatcttccagaccctggtggagcatccctttcctcctgcccccacagccctgttcctcgatcgcctgatgaagcggaggcaggagagtggctacctcatcgaggagatcggagacgtgctgctggcccgggtgagatgcccagccctcccgctcctcccagctagacacatggaattcaggcccgggacgggtcctgagcccaccctactccagtcccagggtctgggcttccagcctgtcgtactttagtccctgttcttgcccatccccactgagacacctgcctggcctgaatctcgctgtagtttgatggtgctgagggctcctggttccagaaaatctcctcccgcttctgcagccgccagtcatttgccttagagcagctcaaagccaagcaacgcaaggaccctcggttctgtgccttcgtgcaggtgaggtggggtctggactccagcttcccagggaggaggggcctggagacccagactcctaggtgcctgcgccctggggtgagcccaaagcctgggccatcgcaacaccagcatgtttcccgcaggaagctgagagccgcccgcggtgccgccgcctgcagctgaaggacatgatccccacggagatgcagcggctgaccaagtaccccctgctcctgcagagcatcgggcagaacacaggtaccgcgggcctggatctctgggcctcggctctcctcttttttttttacattttttttctcactcattttcatcagtgataccatcacagctcactgcagcctcaacctcccaggatctaccatcctcccacctcagctccccaagtagctgggaccccaagggcacaccaccatgcccagctaatttttttagtttttttttttagagacggggtctcgccatgttgcccaggctggctttgaactcctggtctcaagctatcctcccgcctcagcctcccaaagtgcttggattacaggcgtgagccaccatgcccggccagctgtcctttgtctaaccttggctgcccaatctggagcctccagggcaggggttcaccagagctgctctctcccttgcctgcagaagagcccacagaacgggagaaagtggagctggcagccgagtgctgccgggaaattctacaccacgtcaaccaagccgtgcgtgacatggaggacctgctggtgagcctgggctggccccacacccgggacagtggatggtgtgagagcagggggtggaccctacctcagcctgtccagaagtcacaccccaccccttggcttgtctccctcaagggtcactgtgtgtccaggggttggcttggccctcagcatctccctctcagggtcattggaggtcaggcccaaccctcagcttgcccgcatcagaagttggtcttggctctcatcttaccaatgtgggtcactgcaggtcagccccagcacttagcttgtccccataatgctcccgtctctgccccagaggctcaaggactatcagcggcgcctggacttgtcccaccttcggcagagcagcgaccctatgctgagcgagttcaaggtgtgaccataccctcctgcctcccccgcccccctactccttggcccaggggattctgtgatacagcccccagcctgtcctgcccatcccataatacacccaggaagcgagagctctgtcccccacctcatgccaatcccatgatccccagcctgtggtcatccccggccactgccctgcccttcccctccccaccaaccccaatcaccccctgccaacctgcacaaaccatcaccccctcctgccccagaacctggacatcaccaagaagaaattggtccacgagggcccactgacgtggcgggtgactaaggacaaggcagtgggtgagtgccagagcagctgcctagtgcagggtgttggggcagtgagccaagggcggggagggggtcgcgcgggggcacgccgtgtgagcactgctcgccccgtagaggtgcatgtgctgctgctggacgacctgctgctgctgctccagcgccaggacgagcggctgctgctcaagtcccatagccggacactgacgcccacgcccgatggcaagaccatgctgcggcccgtgctgcggctcacctccgccatgacccgcgaggtggccaccggtgagtgcagccactgcatggcccagggcagagggtgtcttttttgggcagagctgcctgtggagtggggagcagaaccctctagagagccagggagccagcattctagcaaagaggttgagaagtaggtggaggtgggcagggcggggccaggcctagagggtttataagtgaggtaggaactgctgcaggtgtttgcacagaggcgtgtcttgtgtaaacaaggagaagaaaggccaggagtccagtgaggagggatttgtaaacatactactaggaagttgcaccagggccacaaacactggaagcggctggagggtgggagtggctggaggggtttcgttaggtaagccagggtacatgcccgattccataaggaggtgtgagaggtggggctcaggaggacacatcgggccctggatattagcagacagtgagtggtgagttgagccatgggagccctgagagcgccaccactgtgggtgacttctccagcttgtgcttagggaggggcaggcactggggggacctgggctctgagccccatctccccctctccctgcagatcacaaagccttctacgtcctttttacctgggaccaggaggcccagatatacgagctggtggcacagactgtgtcggagcggaaaaagtgagggggggtctgagttctgagtgtgggtggaggacgcccaggtttctgggttcccagggacaggagggctgtggggaggccctggcatagggtctgggggctctgactgcccagggatttggcctttctccccagctggtgtgctctcatcactgagactgccggatccctgaaagtccctgcccctgcctctcgccctaagccccggcccagcccgagcaggtgaggggggccatggagagagctggaggttcagggagtggggccggaaggcggggcaggcttccctccacaactccagaaccgtctctgtgtgagcatgcacatgtgtgaatgcatgtgtgtgcatacatgtgtgtctgtacgcaagtatgtgactgtgcgtgcatatatagtgtgtgtatgcatgcatgtgtgcgtgtgcatgtgtgtgcgtgtatggtgtgtgtgtatgcatatgtgtgcatgcgtgtgacagcatgtgcatgcatgtgtgtgtgtgtgcgcatgtgccgaccccaccactgccccgtctgtctcctgtctccaggcctctgtgtcttccattgtctgggcctctctgtctccctgtctcccggcctcgacctctgtctctgtctccggacctccctgcctccccacctccagctctctgtctccctgcccctgcggccccccagggccaggggtgtggggtcacccagcacttcctcccctcagcacccgagaacccctcctcagcagctctgagaacggcaatggtggccgagagacgtctccagctgatggtgagaccagagggatgctgggtgaggggccaggttggggctgccgggtgaagagaggcatccacaggaggcccggcaggatctgagctccctctctgttccccaatccagcccggaccgagagaatcctcagtgacctcctgcccttctgcagaccaggccccgagggccagctcgctgccacggcccttcggaaaggtagcccagctctgcccctccagggtggccaccagcccaaacagtgcctctgttccaactagaacaaggctctccacgtcaaaaatttccttacgcccagctgccagaaaacaaatgctccaaacccacccagcctgcaccactgtcctgggtgcccacgtccctcttctgcagccaccatcccttgcttgattctatatttagcctcttcctgaacacatctctgtcttcagtaccttcctgccctgtcccaaccctaaacccagcctcacttcttcacctccctttggatccccgaaccccatctgctcagccttgcctggcacccaccttcacctccagcccctacacatcccctttggaatcccccatcccagatcccagcccagccccctggtctcctgactccacccctccttgcccctggccagtgctgtccctgaagcagcttctgtttccggcggaggaagacaatggggcggggcctcctcgagatggggatggggtcccagggggcggccccctgagcccagcacggacccaggaaatccaggagaacctgctcagcttggaggagaccatgaagcagctggaggtggggcgggacgggccaggggtgccctgagtgggctggggaaggaaggggcccccctcatccatgacccccaccccaccaggagttggaggaggaattttgccgcctgagacccctcctgtctcagcttggggggaactctgtcccccagcctggctgcacttgaggttcccgcccaggaaggtgagtggggcacctgggggccagggcgctgtcctgaaaggagggtccccctccagagctcgcatccctacagccccttctgtccatctccctctttgtcttttctgaatctccccactccacctcgtgtttctcatctctgtgtctctgtttctgataatctgtttctctgtctctgtgcccgcctgcctctccccacctccccttctctctctgctctccctgtcttgtctctgtgtctgtctctccctgtctctctctccatctctccccgtctcccctcttctcctacatcccccaggccttttgcaagaaggagaggaatgggggagaggacgtgagggaccacccccacccacacagctgccgcagcatctcacaccccgagggcctgaggagagggagctgtgggccacgcctgggaggggcccagctggggttactggccccgcatgagcctcggccatctctccctcctgccctctgcttgggggactcagggctccattctggagggcaccacggtgacccgggccatctcagtattgcctgtgggggccacccctccacccccacccccaagtgccttcgctctgtttttataccctgaattggaggtttattttttaatatatattatctaagaagagatctgtgtgtgtgatggcggggtggggcctggcatggcgtctggaactctctgtgactgtctggcgttgacatcctgggtctgtgcctctgcgcctccctccagttgttcattcattcattcattcatttctttgtttgaaccgttactccccaggcactccgtacacacactgggtatgaggcgtctccctgacaccgccctccagctcccacccccgatcccccatgctcagcactgggcaccccgagtctcactctctgttcttttatttctgtagtaaactctctggaggtgactgttgggatcatggggagctggtggggaggggggcccctcctgggtgggggctgggggcggggttattgctctgagctccctgtccccaggggggcctatatggggggggtgtcaggactggggccagcacagggggtttggagacacggccacacaaacacttggggcatagcacaggggtgggcgggcggggcaggctgggcgccatattgcactttgggagtggggccaggcggggacccccctcaaactggagcctggggaggaggccggaggccatcacattccctctgtcctctgtggagggggaagtgagaccccccccactctggggctggggaaggagactggggcagcaatgtgcccagacctgggaggtgctgagggctggtcctgggccttgggccaggcatcaagggcagacgggcagccaccctggtccctgcctcagcagaatccattgccccctgccggctcagctgccggtcccccctttgcccgcctttgccttggggggtgccgggagaccctcatcgccctcgctgtcagagctgcagccgctgacgtcggtgatctccagctccgagtcgctgtcctccttcccaccaagggcagcctctggacccccagcccctggcagcgccaggcgaggggccgctgccaggcccgaggggcgctcggggcccaggccctcccctgtcgaggccagcaggggcgtggctgtggggcctccccctgcccctgacgagggcaggtggcccagggaactggccagagggttggggtagaaatgcggggggtagagagagggaggcagcttggggaaggggcccgtgaggtacgggttaaagttccaggggtactcagggaaggcgcggccataaggacccagcaggccagggggcttggaatagctggtggcacctggggggcacaggggtaggtcaggctggggcacctgcctgcctggggaccagtaaagggggctgcctccctgccatatcccaccccatctccccgcatccctcctacatggcatcttaccccctcatacagcttcccccaactccatctcctcccactcccccacttgtcttcccattccttaggcacccctgaaagcccctgtctccctcatttcccctccctcacatcacatccttttctgggttttacacacacacaccctacaacctggccctgggcccccttccccatctcttctcttgtcttttctcatcctcttccctcaagcctgcagcttctcccactgtgcccccagcaccccagaacctccaggctcttaccagagcccaggaatgggaaagggctgtccagacgcaatttatctgtctcggaggtgaacaggggtgtccgggcccctggctctcccaggcgtggggcagagaacagggtttgcagggtctagagagggagtgggagaagccgcccttctcagactgtcccctccccagagtgggcaccaagtgcctcggttccaggaccccagtacccagactcacctcaggggtgaggggaggagcatctggccctggggcccccccaaagggactgggggtcagcaagagtggggagccagtggcagctgccgccatgtccagcagcgggtaattgacaagcacgactttgctgaagttgaacttgtaggtgaacctcttccctttggtcttgtggagaatccgcttgttgtagtagtaactgtggggagagtggtggtgttggggaggtgcagggggagccctggggcgggatctggggtttcttaatgcgtgtgctgtcccaggcatggtgcacagagcactagaacttggggaaactgaggctcacagaagtcccttaatagggatcacagggcaaggaagggatgaggcaggagcggggaccctgccctgcaagactccaaagcccaggtttaggggtccctcctcctcgcctcccttccactcacaagtagcgatggtggctactcacgcacagccctgtgccttgtgggatccagcaggaacctgccccaggatgcagagggggcaccagagggacagttgggggaaaaggacaaggtgggatccagccccaagcccttcctcaccgcagggcccggctcagcttgtcgtaattcatgtggggcttgcatttgcgaataccccacagccgggccacctcatcggggtctttgatgacgaattccccgtagtccccctgccaggctatgacgccctggtactcctccttctgcagcagctccaggataaagtgccacagctggatctgcctcgagccaggggatgactctggcttgtaggcccaatccgggaaggcaaaccctggggacgggaggcagggagtggcctggggtcaggatgccaagtccagggctctgggtcctgctggactcagtaacctgggaggcatgtagttctcctccagtctcaggcatctttagggacctggtttccacactccaaacctcctccctttgtgtctggtccccaaattacccaaataagggcaagaacccagtcatccagggaccctgggttggtaccagtctgatcccctaccttggcatagctcccccaggctcagcatccagaggtggagttgggagggactggcttcctgcacccatgacagtgaggaggaatggggaggggcacccgcctccaacagcgttagtcctctcactgcccccagccagccctaggaggtctctagtctcttgtaccctgcggtgccctcagctcttactgtctctgttccccattccctgtcccctgctccacctttcgacattccccagagccccccactgacccatcctggcatatccaggctgcagctctgtgcatgtctgtacctgcctgtgtatttgtacctttcccgtccctgtgtcccctccaccccatatccatgcccatgtccgtccaagagcagtccagaacgatgtgtgtgtgtgcgtggacacacacatgcccacggaagacatgtcacacagacatcagttcacttgcctgagacacacagccacactgggacacaggcacaccggagtgccacactcatgctgggggccaccaaggctgacatggcagacacaggctgcgcaagactcaaggtcacgtcatctcaacaaccccacagtgcacacccatcacaacacagaattacacatctcaagactgggacttactaacaacacaaatgcctgacaagacacacacaggaccccaaatgcccaaagaacacactgtacgatggagacggtgaacacagcaccaagatatccatgtccccagacacacagggtgacagcatgtcagtagagcaacttcccaaacctgcacacagaggcacccacatgtcagcactgacacccccggctcactcagcatcacgtctcacatgcagaggggagtactccactgtccacatacccccaggagctgggcaccccgaaatctcatctcccatgcagaaggccccaagccctgggtccaacttctgtgttcactcttatgccacatcctctgtccccttccccctcctcagagaccccagacccaggcatgaaaatagaaggcagagtgagtccataaaaagctggcagcagtgcaggagagaggagactgctgtgcgccagggcaggggagaccagcatcgccgtgtccacttgctgtgtgattacgggcaggtccttaccctctctggtttagaactgcacaggtggaaggcaagggggcgcagggtcccacccaggctgcctggtgtagaaaagtgggtgcttgtgcctcccggcctgaaggccggggagctccaggcagtctccttgagggagaatttttatctccattcatttttgggtctttctcacctcccatgacagggctggatccagactccagctctgacccattccacacccagaacacatcctactggggaggcaactgtatcacagacacacccacaggaccccaaggtgacaagaggacacccaacccgatactccatctgtcctcaaatgcacaccctcaaatatgttgtacctatgaggcacaggcacagctagagagaggacccccaaactcagtaggcagacacacacatgtgacagacaaacccccagaattcactcatgtgcacatggaccctacgctgaaaaccagacacagcccccaacacagaggcccagggatgcatcccccccacagccccaaatgcaccaagacagccatgcggaacgccacacaacccgagacagaccgcaagaaacaggcaaaggctcctcaccccactcaggcagaggcacagtcggagagctggcagacgcccccatcccaaaatgcggacacgcccagcccagagacactcaagtagcctcagatgtgcacgtacaagcaaatacacaagctcacacaaagacaggctgtgcagacacattctcccagtgtgaccccttctagaaacactgaagtgtgacacagggacacactgaaatgagaccccaaataaccaaggacagagtctctgtctgtctctcacacacacacacacccctcccgctgcacatcagcatggtgtctgaccagcttcaccgtccaccaaccccggttgcaagctgtcctctttcctgggtctcggtctggccgggtcgtgcctgcacgtacccctgactgggcagtgccgtctgtctacctgtccatccgtgcctggcctagtgccccctccagcccagtccctgctctcttttccccgcaggtcctgcgtgggagcaggctgagacgtgcgtggcagggatgcccgggcctcgggcccctccgtcctcacccctcactcacttccgtaccctcccagaagacccacctatccccccagcacgcagggggcaggggaatctggctgcgaagtttttagccaagtttctcagaaggggtttgatttgggggactgaccaagactgagagagaaggacccacggactagagtgagacacgtggagacccggagagaagggggatgcggctcatggggaagctgaggggtgggggaaggnnnnnnnnnnnnnnnnnnnnnnnnnnnnnnnnnnnnnnnnnnnnnnnnnnnnnnnnnnnnnnnnnnnnnnnnnnnnnnnnnnnnnnnnnnnnnnnnnnnnnnnnnnnnnnnnnnnnnnnnnnnnnnnnnnnnnnnnnnnnnnnnnnnnnnnnnnnnnnnnnnnnnnnnnnnnnnnnnnnnnnnnnnnnnnnnnnnnnnnnnnnnnnnnnnnnnnnnnnnnnnnnnnnnnnnnnnnnnnnnnnnnnnnnnnnnnnnnnnnnnnnnnnnnnnnnnnnnnnnnnnnnnnnnnnnnnnnnnnnnnnnnnnnnnnnnnnnnnnnnnnnnnnnnnnnnnnnnnnnnnnnnnnnnnnnnnnnnnnnnnnnnnnnnnnnnnnnnnnnnnnnnnnnnnnnnnnnnnnnnnnnnnnnnnnnnnnnnnnnnnnnnnnnnnnnnnnnnnnnnnnnnnnnnnnnnnnnnnnnnnnnnnnnnnnnnnnnnnnnnnnnnnnnnnnnnnnnnnnnnnnnnnnnnnnnnnnnnnnnnnnnnnnnnnnnnnnnnnnnnnnnnnnnnnnnnnnnnnnnnnnnnnnnnnnnnnnnnnnnnnnnnnnnnnnnnnnnnnnnnnnnnnnnnnnnnnnnnnnnnnnnnnnnnnnnnnnnnnnnnnnnnnnnnnnnnnnnnnnnnnnnnnnnnnnnnnnnnnnnnnnnnnnnnnnnnnnnnnnnnnnnnnnnnnnnnnnnnnnnnnnnnnnnnnnnnnnnnnnnnnnnnnnnnnnnnnnnnnnnnnnnnnnnnnnnnnnnnnnnnnnnnnnnnnnnnnnnnnnnnnnnnnnnnnnnnnnnnnnnnnnnnnnnnnnnnnnnnnnnnnnnnnnnnnnnnnnnnnnnnnnnnnnnnnnnnnnnnnnnnnnnnnnnnnnnnnnnnnnnnnnnnnnnnnnnnnnnnnnnnnnnnnnnnnnnnnnnnnnnnnnnnnnnnnnnnnnnnnnnnnnnnnnnnnnnnnnnnnnnnnnnnnnnnnnnnnnnnnnnnnnnnnnnnnnnnnnnnnnnnnnnnnnnnnnnnnnnnnnnnnnnnnnnnnnnnnnnnnnnnnnnnnnnnnnnnnnnnnnnnnnnnnnnnnnnnnnnnnnnnnnnnnnnnnnnnnnnnnnnnnnnnnnnnnnnnnnnnnnnnnnnnnnnnnnnnnnnnnnnnnnnnnnnnnnnnnnnnnnnnnnnnnnnnnnnnnnnnnnnnnnnnnnnnnnnnnnnnnnnnnnnnnnnnnnnnnnnnnnnnnnnnnnnnnnnnnnnnnnnnnnnnnnnnnnnnnnnnnnnnnnnnnnnnnnnnnnnnnnnnnnnnnnnnnnnnnnnnnnnnnnnnnnnnnnnnnnnnnnnnnnnnnnnnnnnnnnnnnnnnnnnnnnnnnnnnnnnnnnnnnnnnnnnnnnnnnnnnnnnnnnnnnnnnnnnnnnnnnnnnnnnnnnnnnnnnnnnnnnnnnnnnnnnnnnnnnnnnnnnnnnnnnnnnnnnnnnnnnnnnnnnnnnnnnnnnnnnnnnnnnnnnnnnnnnnnnnnnnnnnnnnnnnnnnnnnnnnnnnnnnnnnnnnnnnnnnnnnnnnnnnnnnnnnnnnnnnnnnnnnnnnnnnnnnnnnnnnnnnnnnnnnnnnnnnnnnnnnnnnnnnnnnnnnnnnnnnnnnnnnnnnnnnnnnnnnnnnnnnnnnnnnnnnnnnnnnnnnnnnnnnnnnnnnnnnnnnnnnnnnnnnnnnnnnnnnnnnnnnnnnnnnnnnnnnnnnnnnnnnnnnnnnnnnnnnnnnnnnnnnnnnnnnnnnnnnnnnnnnnnnnnnnnnnnnnnnnnnnnnnnnnnnnnnnnnnnnnnnnnnnnnnnnnnnnnnnnnnnnnnnnnnnnnnnnnnnnnnnnnnnnnnnnnnnnnnnnnnnnnnnnnnnnnnnnnnnnnnnnnnnnnnnnnnnnnnnnnnnnnnnnnnnnnnnnnnnnnnnnnnnnnnnnnnnnnnnnnnnnnnnnnnnnnnnnnnnnnnnnnnnnnnnnnnnnnnnnnnnnnnnnnnnnnnnnnnnnnnnnnnnnnnnnnnnnnnnnnnnnnnnnnnnnnnnnnnnnnnnnnnnnnnnnnnnnnnnnnnnnnnnnnnnnnnnnnnnnnnnnnnnnnnnnnnnnnnnnnnnnnnnnnnnnnnnnnnnnnnnnnnnnnnnnnnnnnnnnnnnnnnnnnnnnnnnnnnnnnnnnnnnnnnnnnnnnnnnnnnnnnnnnnnnnnnnnnnnnnnnnnnnnnnnnnnnnnnnnnnnnnnnnnnnnnnnnnnnnnnnnnnnnnnnnnnnnnnnnnnnnnnnnnnnnnnnnnnnnnnnnnnnnnnnnnnnnnnnnnnnnnnnnnnnnnnnnnnnnnnnnnnnnnnnnnnnnnnnnnnnnnnnnnnnnnnnnnnnnnnnnnnnnnnnnnnnnnnnnnnnnnnnnnnnnnnnnnnnnnnnnnnnnnnnnnnnnnnnnnnnnnnnnnnnnnnnnnnnnnnnnnnnnnnnnnnnnnnnnnnnnnnnnnnnnnnnnnnnnnnnnnnnnnnnnnnnnnnnnnnnnnnnnnnnnnnnnnnnnnnnnnnnnnnnnnnnnnnnnnnnnnnnnnnnnnnnnnnnnnnnnnnnnnnnnnnnnnnnnnnnnnnnnnnnnnnnnnnnnnnnnnnnnnnnnnnnnnnnnnnnnnnnnnnnnnnnnnnnnnnnnnnnnnnnnnnnnnnnnnnnnnnnnnnnnnnnnnnnnnnnnnnnnnnnnnnnnnnnnnnnnnnnnnnnnnnnnnnnnnnnnnnnnnnnnnnnnnnnnnnnnnnnnnnnnnnnnnnnnnnnnnnnnnnnnnnnnnnnnnnnnnnnnnnnnnnnnnnnnnnnnnnnnnnnnnnnnnnnnnnnnnnnnnnnnnnnnnnnnnnnnnnnnnnnnnnnnnnnnnnnnnnnnnnnnnnnnnnnnnnnnnnnnnnnnnnnnnnnnnnnnnnnnnnnnnnnnnnnnnnnnnnnnnnnnnnnnnnnnnnnnnnnnnnnnnnnnnnnnnnnnnnnnnnnnnnnnnnnnnnnnnnnnnnnnnnnnnnnnnnnnnnnnnnnnnnnnnnnnnnnnnnnnnnnnnnnnnnnnnnnnnnnnnnnnnnnnnnnnnnnnnnnnnnnnnnnnnnnnnnnnnnnnnnnnnnnnnnnnnnnnnnnnnnnnnnnnnnnnnnnnnnnnnnnnnnnnnnnnnnnnnnnnnnnnnnnnnnnnnnnnnnnnnnnnnnnnnnnnnnnnnnnnnnnnnnnnnnnnnnnnnnnnnnnnnnnnnnnnnnnnnnnnnnnnnnnnnnnnnnnnnnnnnnnnnnnnnnnnnnnnnnnnnnnnnnnnnnnnnnnnnnnnnnnnnnnnnnnnnnnnnnnnnnnnnnnnnnnnnnnnnnnnnnnnnnnnnnnnnnnnnnnnnnnnnnnnnnnnnnnnnnnnnnnnnnnnnnnnnnnnnnnnnnnnnnnnnnnnnnnnnnnnnnnnnnnnnnnnnnnnnnnnnnnnnnnnnnnnnnnnnnnnnnnnnnnnnnnnnnnnnnnnnnnnnnnnnnnnnnnnnnnnnnnnnnnnnnnnnnnnnnnnnnnnnnnnnnnnnnnnnnnnnnnnnnnnnnnnnnnnnnnnnnnnnnnnnnnnnnnnnnnnnnnnnnnnnnnnnnnnnnnnnnnnnnnnnnnnnnnnnnnnnnnnnnnnnnnnnnnnnnnnnnnnnnnnnnnnnnnnnnnnnnnnnnnnnnnnnnnnnnnnnnnnnnnnnnnnnnnnnnnnnnnnnnnnnnnnnnnnnnnnnnnnnnnnnnnnnnnnnnnnnnnnnnnnnnnnnnnnnnnnnnnnnnnnnnnnnnnnnnnnnnnnnnnnnnnnnnnnnnnnnnnnnnnnnnnnnnnnnnnnnnnnnnnnnnnnnnnnnnnnnnnnnnnnnnnnnnnnnnnnnnnnnnnnnnnnnnnnnnnnnnnnnnnnnnnnnnnnnnnnnnnnnnnnnnnnnnnnnnnnnnnnnnnnnnnnnnnnnnnnnnnnnnnnnnnnnnnnnnnnnnnnnnnnnnnnnnnnnnnnnnnnnnnnnnnnnnnnnnnnnnnnnnnnnnnnnnnnnnnnnnnnnnnnnnnnnnnnnnnnnnnnnnnnnnnnnnnnnnnnnnnnnnnnnnnnnnnnnnnnnnnnnnnnnnnnnnnnnnnnnnnnnnnnnnnnnnnnnnnnnnnnnnnnnnnnnnnnnnnnnnnnnnnnnnnnnnnnnnnnnnnnnnnnnnnnnnnnnnnnnnnnnnnnnnnnnnnnnnnnnnnnnnnnnnnnnnnnnnnnnnnnnnnnnnnnnnnnnnnnnnnnnnnnnnnnnnnnnnnnnnnnnnnnnnnnnnnnnnnnnnnnnnnnnnnnnnnnnnnnnnnnnnnnnnnnnnnnnnnnnnnnnnnnnnnnnnnnnnnnnnnnnnnnnnnnnnnnnnnnnnnnnnnnnnnnnnnnnnnnnnnnnnnnnnnnnnnnnnnnnnnnnnnnnnnnnnnnnnnnnnnnnnnnnnnnnnnnnnnnnnnnnnnnnnnnnnnnnnnnnnnnnnnnnnnnnnnnnnnnnnnnnnnnnnnnnnnnnnnnnnnnnnnnnnnnnnnnnnnnnnnnnnnnnnnnnnnnnnnnnnnnnnnnnnnnnnnnnnnnnnnnnnnnnnnnnnnnnnnnnnnnnnnnnnnnnnnnnnnnnnnnnnnnnnnnnnnn

SEQ ID NO: 1322 - DNA, 3185 bp, Homo sapiens
gggcgccccgccggtcacttccgcgcggacaccagccttgcagagcccagggagatggaagacttcgcccgaggggcggcctccccaggcccctcccggcctggcctggttcccgtcagcatcatcggggctgaggatgaggattttgagaacgagctggagacaaactcagaagagcaaaacagccagttccagagcctggagcaggtgaagcggcgcccagcccacctcatggccctcctgcagcacgtggccctgcagtttgagccaggacccctgctttgctgtctgcatgccgacatgctgggctcactgggccccaaggaggccaagaaggccttcctggacttctaccacagcttcctggagaagacagcggttctccgggtgccggtccctcccaacgtcgcctttgaacttgaccgcactagggctgacctcatctccgaggatgtccagcggcggttcgtgcaggaggtggtgcaaagccagcaggtagccgtgggccggcagctggaggacttccgttccaagcggctcatgggcatgacgccctgggagcaggagctggcccagctggaggcttgggttgggcgggaccgagccagctacgaggcccgggagcggcacgtggcggagcggctgctcatgcacctggaggagatgcaacataccatctctaccgacgaagaaaagagtgctgccgtggtcaacgccattggcctgtacatgcgccaccttggggtgcggaccaagagtggagacaagaagtcggggaggaacttcttccggaaaaaggtgatggggaaccggcggtcggacgagcctgccaagaccaagaaggggctgagcagcatcctggatgccgcccgctggaaccggggagagccccaggttccagattttcgacacctcaaagcagaggttgatgccgagaagccaggtgctacagaccggaagggaggcgtggggatgccctctcgggaccggaatatcggggctcctgggcaggacacccctggagtctctctgcaccctctgtccctggacagcccagaccgggaaccaggtgctgacgcccccctggagctgggggactcatccccgcagggcccaatgagcctggagtccttggcgcccccagagagtaccgacgagggggccgaaaccgagagccccgagcctggagatgagggggagccggggcggtcgggactggagcttgaaccagaagagcctcccggctggcgggaactcgtccccccagacaccctgcacagcctgcccaagagccaggtgaagcggcaggaggtcatcagcgagctgctggtgacagaggcggcccacgtgcgcatgctgcgggtgctgcacgacctcttcttccagcccatggcagaatgcctgttcttccccttggaggagctgcagaacatcttccccagcctggacgagctcatcgaggtgcattccctgttcctcgatcgcctgatgaagcggaggcaggagagtggctacctcatcgaggagatcggagacgtgctgctggcccggtttgatggtgctgagggctcctggttccagaaaatctcctcccgcttctgcagccgccagtcatttgccttagagcagctcaaagccaagcaacgcaaggaccctcggttctgtgccttcgtgcaggaagctgagagccgcccgcggtgccgccgcctgcagctgaaggacatgatccccacggagatgcagcggctgaccaagtaccccctgctcctgcagagcatcgggcagaacacagaagagcccacagaacgggagaaagtggagctggcagccgagtgctgccgggaaattctacaccacgtcaaccaagccgtgcgtgacatggaggacctgctgaggctcaaggactatcagcggcgcctggacttgtcccaccttcggcagagcagcgaccctatgctgagcgagttcaagaacctggacatcaccaagaagaaattggtccacgagggcccactgacgtggcgggtgactaaggacaaggcagtggaggtgcatgtgctgctgctggacgacctgctgctgctgctccagcgccaggacgagcggctgctgctcaagtcccatagccggacactgacgcccacgcccgatggcaagaccatgctgcggcccgtgctgcggctcacctccgccatgacccgcgaggtggccaccgatcacaaagccttctacgtcctttttacctgggaccaggaggcccagatatacgagctggtggcacagactgtgtcggagcggaaaaactggtgtgctctcatcactgagactgccggatccctgaaagtccctgcccctgcctctcgccctaagccccggcccagcccgagcagcacccgagaacccctcctcagcagctctgagaacggcaatggtggccgagagacgtctccagctgatgcccggaccgagagaatcctcagtgacctcctgcccttctgcagaccaggccccgagggccagctcgctgccacggcccttcggaaagtgctgtccctgaagcagcttctgtttccggcggaggaagacaatggggcggggcctcctcgagatggggatggggtcccagggggcggccccctgagcccagcacggacccaggaaatccaggagaacctgctcagcttggaggagaccatgaagcagctggaggagttggaggaggaattttgccgcctgagacccctcctgtctcagcttggggggaactctgtcccccagcctggctgcacttgaggttcccgcccaggaaggccttttgcaagaaggagaggaatgggggagaggacgtgagggaccacccccacccacacagctgccgcagcatctcacaccccgagggcctgaggagagggagctgtgggccacgcctgggaggggcccagctggggttactggccccgcatgagcctcggccatctctccctcctgccctctgcttgggggactcagggctccattctggagggcaccacggtgacccgggccatctcagtattgcctgtgggggccacccctccacccccacccccaagtgccttcgctctgtttttataccctgaattggagggtttattttttaatatatattatctaagaagaaaaaaaaaaaaaaaaaaaaaaaaaaa

SEQ ID NO: 1323 - DNA, 2739 bp, Homo sapiens
atggaagacttcgcccgaggggcggcctccccaggcccctcccggcctggcctggttcccgtcagcatcatcggggctgaggatgaggattttgagaacgagctggagacaaactcagaagagcaaaacagccagttccagagcctggagcaggtgaagcggcgcccagcccacctcatggccctcctgcagcacgtggccctgcagtttgagccaggacccctgctttgctgtctgcatgccgacatgctgggctcactgggccccaaggaggccaagaaggccttcctggacttctaccacagcttcctggagaagacagcggttctccgggtgccggtccctcccaacgtcgcctttgaacttgaccgcactagggctgacctcatctccgaggatgtccagcggcggttcgtgcaggaggtggtgcaaagccagcaggtagccgtgggccggcagctggaggacttccgttccaagcggctcatgggcatgacgccctgggagcaggagctggcccagctggaggcttgggttgggcgggaccgagccagctacgaggcccgggagcggcacgtggcggagcggctgctcatgcacctggaggagatgcaacataccatctctaccgacgaagaaaagagtgctgccgtggtcaacgccattggcctgtacatgcgccaccttggggtgcggaccaagagtggagacaagaagtcggggaggaacttcttccggaaaaaggtgatggggaaccggcggtcggacgagcctgccaagaccaagaaggggctgagcagcatcctggatgccgcccgctggaaccggggagagccccaggttccagattttcgacacctcaaagcagaggttgatgccgagaagccaggtgctacagaccggaagggaggcgtggggatgccctctcgggaccggaatatcggggctcctgggcaggacacccctggagtctctctgcaccctctgtccctggacagcccagaccgggaaccaggtgctgacgcccccctggagctgggggactcatccccgcagggcccaatgagcctggagtccttggcgcccccagagagtaccgacgagggggccgaaaccgagagccccgagcctggagatgagggggagccggggcggtcgggactggagcttgaaccagaagagcctcccggctggcgggaactcgtccccccagacaccctgcacagcctgcccaagagccaggtgaagcggcaggaggtcatcagcgagctgctggtgacagaggcggcccacgtgcgcatgctgcgggtgctgcacgacctcttcttccagcccatggcagaatgcctgttcttccccttggaggagctgcagaacatcttccccagcctggacgagctcatcgaggtgcattccctgttcctcgatcgcctgatgaagcggaggcaggagagtggctacctcatcgaggagatcggagacgtgctgctggcccggtttgatggtgctgagggctcctggttccagaaaatctcctcccgcttctgcagccgccagtcatttgccttagagcagctcaaagccaagcaacgcaaggaccctcggttctgtgccttcgtgcaggaagctgagagccgcccgcggtgccgccgcctgcagctgaaggacatgatccccacggagatgcagcggctgaccaagtaccccctgctcctgcagagcatcgggcagaacacagaagagcccacagaacgggagaaagtggagctggcagccgagtgctgccgggaaattctacaccacgtcaaccaagccgtgcgtgacatggaggacctgctgaggctcaaggactatcagcggcgcctggacttgtcccaccttcggcagagcagcgaccctatgctgagcgagttcaagaacctggacatcaccaagaagaaattggtccacgagggcccactgacgtggcgggtgactaaggacaaggcagtggaggtgcatgtgctgctgctggacgacctgctgctgctgctccagcgccaggacgagcggctgctgctcaagtcccatagccggacactgacgcccacgcccgatggcaagaccatgctgcggcccgtgctgcggctcacctccgccatgacccgcgaggtggccaccgatcacaaagccttctacgtcctttttacctgggaccaggaggcccagatatacgagctggtggcacagactgtgtcggagcggaaaaactggtgtgctctcatcactgagactgccggatccctgaaagtccctgcccctgcctctcgccctaagccccggcccagcccgagcagcacccgagaacccctcctcagcagctctgagaacggcaatggtggccgagagacgtctccagctgatgcccggaccgagagaatcctcagtgacctcctgcccttctgcagaccaggccccgagggccagctcgctgccacggcccttcggaaagtgctgtccctgaagcagcttctgtttccggcggaggaagacaatggggcggggcctcctcgagatggggatggggtcccagggggcggccccctgagcccagcacggacccaggaaatccaggagaacctgctcagcttggaggagaccatgaagcagctggaggagttggaggaggaattttgccgcctgagacccctcctgtctcagcttggggggaactctgtcccccagcctggctgcacttga

SEQ ID NO: 1324 - DNA, 96595 bp, Mus musculus
  misc_feature (81)..(100): n = a, g, c, or t.
  misc_feature (20974)..(20993): n = a, g, c, or t.
  misc_feature (23010)..(23294): n = a, g, c, or t.
  misc_feature (24969)..(25093): n = a, g, c, or t.
  misc_feature (34655)..(34840): n = a, g, c, or t.
  misc_feature (43486)..(43505): n = a, g, c, or t.
  misc_feature (63319)..(63565): n = a, g, c, or t.
  misc_feature (87107)..(87126): n = a, g, c, or t.
  misc_feature (90949)..(90968): n = a, g, c, or t.
  misc_feature (92828)..(92847): n = a, g, c, or t.
catccccttccctgcctgctaggggctgagatctggacaaaagtagtttctgttatatctggtggagggtgggagggaggnnnnnnnnnnnnnnnnnnnngcagagagggagagagggagggataggcccaaaccaagaaatattttttaaacttgattagagggatttttgcttaatgagagtctagttttcatagaatttatctggtacaggttaaaaataaaaaaaaaactggagttactattgttctataatttaatctctctaatcatatttccgatatgactaatcagagaggtcacagtagtgagcaaatgcctaattttgttatatataacagtttagctgcaggttgaattctctaaacttcattctggacttttgggcagataatgtaactgtaatcccaacctttcttagaggttttcaatgaaataagcaaatcagttaagttcagtaagagacattggccgtgaaggatgatgcctggtatgttagatggacacatagactagcatctcattagatgcaggcaggctgtacccaaagtttgtagtgaagaaataaacatgccaaaggaatgaatttcaagcaaaataaaatccagtttggaaagagtgagacaaacagcaggttgggatttttcttcagaacagaaggaaaccttttgtatctggagactgtaaatgaacaaagaggctcgagagaacagttgtggattgtggaatcccagccatgaaagagtttggatgacacttttactgtaatgtaaggagaaggaaaagttcattgtaacttttaaaagtctggtgacagtcaaaaaatagcgtagggcggctagcatggacatcagtaaccccattaccataccattctggttggttgttatgcgtagcatcagagtctggtagaggtagtgtactggctagctttgtgtcaacttgacatggctggagttatcacagagaaaggagcttcaattgaggaaatgcctccatgcgatccaactgtaaggcattttctcaattagtgatcaagggggaaaggccccttgtgggtgatgctatccctggcctggcagtcttggttctataagagagcaggctgagcaagccagggaaagcaagcaagccagtaaggaacatcctttcatggcttctgcatcagcttctgcttcctgacctgcttgagttccagtcttgacttccttggtgatgaacagcagtatggaagtgtaagctgaataaaccctttcctccccaacttgcatcttggtcatgatgtttgtgcaggaatagaaaccctgactaagacaggtagtgagcatgcaaatcagggttgaggaatgagcttgaagcaattggtggtgaatttcatgagaaaatcaggggaatggggaaaatcaatgccgttaatgatctgagttttactccctgaagtattacatatccacttagataaaagaaggtgatggggaaagaggcttaatcaagaagaaatgaaaagttgcaaaatataaataatatgttggctttgccttcaactcaaaggtgatagatagtaacaaatacatagagagattaatttcaaacaaagaatcatcctaagtagactggcagccaaatattggcttctatttttactccaaactccaatactctgtttagtgtctgtgtgtgcgcttgggcatgtgtgtatgcacacacacacacataggaaattacacaggtatgtgtacatgtgctttatgcattcatgcatgtgtaggtacgtccacctgtgcttgtgtttggggtccagataacgatgtctactgtcctgctctgtcactctttacctaattctatcaagacagggttatactggttgatcagtgagttctggctttcccattgtggcctgctccatcagtgggattgcaattatatctgaagccatacttttatatggctctttttatatgggtgctggggactcaaaatcaggcccccactttcaaaaaacaaacacctttatgcatttgtcttagtcagggtttctattcctgcacaaaaatcatgaccaagaatcaagttggggaggaaagggtttattcgccttacacttccatactgctgttcatcaccaaggaagtcaggactggaactcaagaaggtcaggaagcagaagctgatgcagaggccatggagggatattctttactggcttgcttctcctggcttgctcagcctgctctcttatagaaccaagactaccagcccagagattgtcccacccacaaggggcctttcccccttgattactaattgagaaaatgccttacagttggatctcatggaggcatttcctcaactgaagctcctttctctgtgataaccccagctgtgtcaagttgacacaaaactagccagtacagcattgaattaactctgcccagatatcttgatggttgttttttaagcttcctaggcatgaaactattattgtatgttgtctttagtgtcttgcataccagctttctagtatttattttatttataccaggaaatctaactgaataccaagaggtgacttttcactgctttggtgcctctgtagctgttcacgggatcctaagaatacacaaaagtatgtgtcttattagacatgaagagaatttatttttccctacactcctctccttaggaacaatgtgagtctctgatggttggctcctagaatggaatactccctttgctgaggttatctgttctcttgcatatgcatgcgtatttgatttcaagttttccaggcctgtttgtgtctgcttgtgctcatcacttgaagtgatggattgaagaaagccgatacatggaagcctcatctagcacattgaggatctgaatggaacaaaagagagatcactctgcatctcttggctggaatacctgtcttaccttcacactttgattagattggaaagcatactgtctataatcccgatttgtaggctcagtctaaactggaatttctcctagtgacactcctctaaagaccttcaggcttaggcaaatgctgtactctggctcttctagtctaaacttttagaagtttcataaaagtcacataagtctattttcaaaagtctttgttttctcattgaatataaagagatatagtatgagagaatgtgttgtgtgtgtgtgtgtgtgtgtgtgtgtgtatgtgtgtgtgttgtagattcatcttttgctcttttctgtccctttggagatagttaaaacaccttttgttcatacaagtgcagaactacagaaatatttagcttgtttgatttttaatctccagatgcccaccactctgtttaaaagttttagttcttagtgatctttctgtaacacatgggatgaatgaatgcaaatagactcaatagagcactaatgatgttcatgttggagcaggaggaagaaagaactccacatgtatttagagacattggtttgatgaatatagcttaagaatcactctagaagactcaaagaccttttcatcagactcatggcagcggattaatttcccaggagcactaacatgtttttcctacctctcattttctcatgagtatatactcagattgaatgaagatgtaaaaataggaatctgagtagcttttattaagttgaatactattatttgaaaaaataaaaacaatgccaatctttttggtattatttttcataggagaaacctatggggctgttgattgataaacaaattagtaattattttacaggtcttattttattttattgacttttgtggttggtttgttgtttggatacttaaatcagtagaagaatatctgcctgtcaagtccagggccatgactgtagtcaaacaaggaagaacaaatacatccattctcagtctgaatttcttgtaacacacggattctccaacttccaaattccgtgaccctttattacagttccttgagttgtgctgatgccccaactataaaaattatttttttttgctgctcatataattttgctactgttatgaattgtattataactatttttggagatagaggattgccaaaggtgtcgtgacccacaagttgggaactgctgtcatatggtgttgacagaacttagaattgatatactgtttgtttgttaatgattggtgaattaaaccgtgcgcctgtgttcctgcaagctgcgtttgttttctctgtccacctttacacaggttctgggaattgaactcttatctctaacctcttcccactgagcctgctcactgtcctggtaacctcagtatatctaatttgtataggcattctgaaactaaaaaaaatttaggatctattacttaaagcaggactttcatatagatatgttgctatatgggtaagtgtaactctaaaaaacctgtcaggttcataccttcaaaccttgcattattccatcaaataattctttctctgaaccacctaagtcaattccaattacaggttgattttattgtttctacagtttggagtatttgttggttgactgttatggtcaccttgttatccagtcaatcatttaataattgtttataaatatttaaaacatttaaatgtatagcatgctcttctagatgcacacttgttgggttgttgcatatcagtagtttggaactttagaattccaaatgcatggtttattattgctcctgtgatacatttctgtttagtagctagtatggtgtcccctttcatgcttgaaatggcttcttttctttttctcttggacacaacacagctgcttgtgttacgtggataaaattcatacagtcaccagtgtgctttcagcccaaactgtgtctgggttaccagctacactgtcccttgttgctggtgaccatttcactttgacattctgtatgccctgcctctcgcactctgttgcccaggtctcgtctttgcttcttttgcatctgtgtacccattacagcctaaccagttcagggaatgtcccagccatcccaccaaaccttttatttgaagagctgagtcaaacagtcacctactcactccctgtccccacccccatgggcagtaggttattttaaggttttctttggaactttttaaaatttttaccttcttctgtgtaacatttctctacctaatgcttttctgttaaatgtaccacctggtttcacccttaggataggtcagtcatgtgagacaatgctattttttttttaattaaatatatttgtgtatttgtgtgtatatgtgtgcggcagtgcctgtgcaaatgcacaggtcagccagagcacagcatgtagccgtcagtctcctctctccactgtatgagatctgggattgaactcagttcttccggtttgggagtaagtgcctttacatcctctgctctcaaggtggtggttcttgttattgtcttgatggaggatagcccttataaaggattggcatggcacttaattaaaatgtgtgtacaaataccttataatgaaacaccagagtcaaaaattcacaaactatgagcctgttctgagaaaaactcttgtatgtttttgtggggaaaaaaaaagttgacaggcctgtcagattggggaagatggtctgtagaagagggagtgggaggtgaatggctaccagtcctttcaatcaagaacatggataggtgtggcttctgagtttatctcttaatttgtaaggtgtcttaagtactttgaataaccagcttagtgaaatactatgcttgcatgccaaagtctgaaataaccttctatgttatgaatacctactatgaatgttttaaatgatatttttaatgactatatcattgctagtcatactcattatttataactactaattgtatattattgaatatgtagaattcttttattttttccattttaatcaatataatgagatgcattatcttttcagttatatctttgttaatttacacaaaactttttttcattaattaattttatatttttcactttatatctctcactttatatcacagtcctcccccacccctcctaggtccacccttacaaatccttttccccattgcccctccccccttcttctgaggagaaggggaagcatcctgccctcccccagggtaccaccagggccctgggacatttagtaccagcaagtctaggtgcatcccctcccagtgaggtccaactcggcagtccacctgtggaataggatcaaatggcaaataccagaatcagagacagccccctattccattgttaggggactcacatgaataccaagctgcacttatgttacaaatgtgtaggggcctaggtctaacccttgcatgctccctgatttgtgattctgtctttgtgagcccccaggggcccaggttacttgactctgtagttcttcttgtgttgttattgactcttctggcttgctcagttctattccactctcttccacaagagttctggagctccacatgttgtttcctggtgggtctctgcatctgcttccacttgttgctagatgaattctttcaggagcaagttgtcctaggtttctatctgcatagcaaaatatcattaatagtgtcaggagttgactcccttgcatgggatgggtcccaagttgggccagtcattgggttggccattcccccagtctttgctctgtctttatccttgtacatcttgtaggcaggacaaattgcctgaaggtgttgaagttttatgggtgggttgatgtcttcctccctccactggatgtcatgcctggctacaagaggtgacgttttgtagtgcatatttatccattttgaattaccacattaggggccatatatgtctttcaaggttttgcttattgccaaactgctctctagaaagttgcattacttaaaaaccatgcaaagacttaagtttaggcactttcccttgactgatgaattggagaacctcaagcaatctttccctcaagttatatttagggaagtataaatgtgtgacttgacatcattaaacctttagatagctaagcctccatcaaatactactgaacacttactagaaatttgagggaacaagaataacagtaaataaagttttgtttttaacatcaagagtgagggacttaacatgtgtaaaatttccagacattaaatatagagggccagttgttcttggatattgtagaagtaatcttttgaagttcctaagaacacagtgctggctacatttaagttgatggagggaagtctgtgtcccagctgcagctccacaggcaccagctgtgtaaattgccactgtatcaattctgtagacagggctggaggttgttcctgcttgtttctcctttgtagaactgcgcggtaagtgcattattaatgcacataactcagccaagggagccatggagggctctgtgtaaataagactatttatcccaaccattccatagaagtgaattatcagcactaatttttcttattatttaacctgtgttgagtggcagtaaaatgctgaaatagttaggataagcttttatttcatgattttcatctttctaatgatcaaattggtaagaactaatgatgactagcgcttgttcattccatttctttaataagaaaatggttgtagcttaaaatgcaaatggctgaaaattgctaaatggtcttaatggtaaatataatgcatttttaaaatgtgacacaaagcatattttactccaaacgttattttatgatagtagaaaattactattaggaagctaataagtcttttgagctctacactttaaaattggtagtcagaagctaaacttatggaaataaatatgccatttacttataaaattattcatcattgggtaaacaggacacagaaacaggccagtaatgatgcttatagcttttttagggtctcaggcctggtcatggtcatcacagaaattagtctaattcaaattggcacactgtagaaacattttgacagcttagttattgatgttaaaaatgtgagaatagccatgaataaaatcattctttttttcttttttctttttttttttttttttttccaaattaggttaagagccgggaaatcttgttttgttttgttttgtttttgttttgttttgttttcattttggaagttgtttaccaaaaatacaccgatgatctttttatcctattaatgtactgtctgtgagaatcaagctaaaatgtaatcccagcacttgagaaacgaagactgggagacacaagtaaacaataacaggaattactattaatatcgtatgtgtattctgtacttgactgtactgaagtactagaaaaaaattgtcataaaactttgggatcaaaaggtcccttctaatggcaactgtccagattgaaaatttgatttcttatgtagctgaagccttcctctctgaagtatttttgtgttctgtctgtttgagctccaggttgtcaattaactgagatacatagacacagtcactgaggtttttggatatcgtggtacaatttattatgtttcagaatagaatatagaagagtagttttgcatttcaggaagagagggccaagtgcagtgtaagaaaccttatataaaaaaaatagctctctaatatgactcctaatgtcatgctgtttgacaaaatgatatcattacatttttttggaggttcacatatttattcaaatcttctttgcatgagaataatagggagaataacagcatgtctttctggagagctgcttgcaatagtatagtagaccagtgccagcctcagtgaatagtcactgtatgaactttgcccttagcaaaaccaaaaaaagtgttggcgttctgaaagtaggattctgactgtgtcatttacctcacaagatccagaatgagttaatggttactcagtcaatgtgacctcgtgcttgcttatgtcctgctttagaggagcatggtggtcagtgttaactgcgggggtcagaagtaatcttaccaagatgacagttttgagtcaacagtgcaccagctatgtactagagtcaaattaagaatagttggacattagggggttggcaagatgtctcagtaggtaaaggattgataccaaatgtgggatcggagtttgattcttaggtctcacgtactgaaagaagactaccaattccctcaagtgtctgctgacttcaatcatgtgccctggcatgcatgtgtcgacttgtgctctctctctctctctctctctctctctctttctctctctctctctctctctctttctctctctcatgtatatcacatgtataaaattaaaatatttaaaaatatagaatgaaaggaaaattgaatagtagctctcataaccactttacaaagtattcttactccataacttgatgttctcaggacttagtgaatggcaaaagtgcatatgccttaaataaacaaaaatattagtatttgaagttggaagttattccacttcctgcagtcttccatttctctgctttaacatttgtgttaacagagaaaacaaaagaagaaagtactttctgtgcatatcaaaccaatacatttacttgtttcatttttcaaaagcttactattttgtaggactagggaaattttagagagagtgttgaacctgaatccgactcctgcttgtctaccatctgaccctaagttagcagttatgtcccatatttctatattgtaaatcagggttaatatcaagttgtagagatgaataaactgtttttgtctagtttatgaaatgttagtaagaaatggatctacgtgatgtcttgactgatatttttctatggccctgccccagaagacattttaaaatttaatgttttcatagagtaatatcctataatactctatgaaattttatagttgtaatattttacagttgtttgatacccctggcttatcaatgttcttagctctgttatttgtaatgtcatttcaggttcctatatggttgtggactcctcaaatcatgatcctggagaaaaagccagacttcagctgcctaccatgaaggagaatgacacccactgcattgatttcagttacctgttatatagccagaaggggttgaaccctggcactttgaatatcctagttagggtgaataaaggacctcttgctaatccaatttggaatgtaactggattcactggtcgtgattggcttcgggctgaactagctgtgagcaccttttggcccaatgaataccaggtaatcccctgagatttttctggtttgtgctgtcttgtattgggtatctttgtatatatagatataaatactggtcctgcaggagtaggatccctccttcttgtttcccaactccttcttgaggaggagtttgagtgccttgacacagaaccttctaactatagaaaatatttccatgcatagaaaacagtagtttggcccacaatttgttgtctactttgcaaagagttacttacttcttattctgatgtacatatttctatgtctttctgcaggaagaaatagttttgttttgatttttttccccattagactgcaatattctgactggattggcttactgatttcttgaaaataccattttggaaataaacaggagatagaattttgtgaaatatatggtctttgatggtggcattagatttttcttttccttaactaaatggaatatttaaaacaagcaaacaaacaattcaggctatccataagaacctttgggtggttttccttggaatgctcaatctgatagtgatggaaggatataatgaattatgttaattgccagttcagggttcttatgacagagtttgcttggtttaagagagaagtcccacgcaccgacttgaagacatatttcagtcatgcagactgtcaggtttaggacctgcaaatacataaccattttgtaggaactcaaagcttgtgttttacatgatatttcaacattttagaagacctacctcttcatggcttactatagaacttgtgagagtacatttatgtacaagtatattccacaacacccaatagcaaaattatttcataaaaatatttctttatggttgtaactcattaagtacaaaaaacataaataaataaataaagcatccccttacttgctttttcctgtgttgattattctagttgcatggccatagttttaccgggtgaaagctatgtctctcattttcaagttgtgtgtctgctgaaaactcggtacatttcattaggtactagtggcttccatcattcctgttcagaaaaattgctcccttttattctgacaggaaaaccatggttttgttttttgtttctttttgaatctaaacctaaaaaaaaacaggtggtttccgttgtgttctcaactttacatgatttccttgatgggtgtttaaattggtttagccattcaggtaactatttgtacctgtgcagtttttgataggtgacttagctgttgatcatctctattccaagagacacccatttgctttaagtaccagttattagagacctattgtgagatgcctcccgaaaaatgtggacgatgggcttctattcctttgtaagaaaaggaccacctcattgtgatacagaagcactacctagacttgctttcctatttatgacttaaataacttgttttctcagatcaagccttctccagctcagcttggtagctccaggaggttagtctagtgttcaggaaccaggtacatgaggcttgccctctaaattcaagggtagcctgggctatagtttgaatcttattaaagaaggaaggaaggaaggaaagaaggaaggaaggaaggaaggaagaaaggaaggaaggaaggaaggaaagaagggaagaagggaagaagaaaaaaaggaaagaaggaaagaaggaaagaaggaaggaagaagaatatccaagctttaagtaattgcttaagatttcagaacttctttttacttttgaaaaaaaaatttttagaaaaaaaagttaaaataaaaacctttttcctcgagaaaaaaagtactaacatcattgtctaaatcatcaaatgatttagctgagaccatcaaatatgtcacttaaaaaaattagacttgtaaggagttgttctcttcaggttggtgaaagtgcactattgaagtggcgcactggattgccttgtttggtatttcactctttaatattgttttaaacacagtttatatagaaatctaccagttctgcgtattcttactcttcatggctggtccatcttgggagatactagctacaaaagaatgacagtttgtgtttgcatggtagccaatttaatcagataagtgccttgagtacacactaacattgttaaatggaagaagcaggtgtatattttatattttggcaatcatcatagtaacccaggactatataagaagttggtgggttcttccattttccatctgcacccataattgatcccgtgccacagagctccatagccagatagctctgagagagagctagcctcccaggagtgtggacaagcatgtgcctgcaggtaaaaccaccactgctgctcaaagggtccctactggaacactcaggacacaagaaccaaggagtggcctagaacaagagtcttctggtttccttctgtgtctatagctaatcctgtgacacaatacaaatactgccatgagagaactggtctctcaggagtactgacacagctgggaacacaggtaagacgatcacttctcttcaaattcctgacccaagaaggacccttccagagccatcaggacacaggaaccaaggaatagccagggacaggatccttctagtttctgtctgtactccagagctgaccatgtatcacagctctccatacataaattcttccatgagaaaactggtctcccaggagtactgacacagaggcttgcaggagggacaggccacagtcagagacagcaagaccagctaattccagagataaccagatggtaagaggcaagtgcaagaacacaagtaacagaaaccaaggctacttggcatcatcagaacctagttctcccaccacagcgagccctagttaccccaacacactagaaaagcaagaatctgatttaaaatcacatctcatgctaatgatagaggactttaagaaggacacaaataacttccttaaagaatacaagggaatacaagggaatacgggtaaataggcagaagtcattaagaaggaaacaaaaatcccttaaagaattacaggaaaacaaaaccaaacaggtaaaggagctgaacaaaaccattgaggatctaaagatggaaataggaacaataaagaaatcacaaagggagccaaccttggagatagaaaacctaggaaagagatcaggagtcatagatgtaagcatcaccaacagaatacaagagatagaagagagaatcccaggtgcagaagataccatagaaaacattgacacaacagtcaaagaaaatgcaaaatacaaaaagttcctatcccaaaacatccaggaaatccaggacacaataagaaggccctaaggataagaataataagaacaagccataaggataggttcttctatacctaagaagagagtgaagattcccaagttaaagggccagtaaatatcttcatcaaaattatagaagaaaacttccctaacctaaagaaagagatgcccatacaagaagcctacagaattccaaagtagatagaagcagaaatgaaattcctcttgtcacataatactcaaaatactaaatgcacaaaacaaagaaagaatattaaaagtagtaagggggaaaaggtcaaataacattaaaaggcagacctatcataattaccccagacttctcaccagagactatgaaagttagaagatactgggcagatctcatacagaccctaagagaacataaatgccagcctaggctactatacccagcaaaactctcaattaccatagatggagaaaacaagatattccatgacaaaaccaaatttaaacaatagttttaaacaaatgcagtcctacagaggataatagatgtaaaattccaaaacaaggcaaactacaccctagacaaagcaagaaagtaatcttctttcaacaaacccaaaagaatatagccacacaaacataagtccatcactaacaacaaaaataacaggaagcaacaatcactattccttaatatctcttaacatcacatcaatgggctcaagtccccaataaaaagacatagactaacaggctggatacataaaatggacccagcattttgctgcatacaggaaacatatctcagtgtcaaagacaaacactacctcagagtaaaggtctggaaaactattttccaagcgaatggttccaagaaacaagctggaataaccattctaatattgaataatagtgactttcaaccaaaagtcatcaaaaaagttaaggaaagacgttgaatatttatcaaagggtaaaacaatctaccaagaagaactctcaattctgaacatctatgatccaagtgcaagggcagccacattaataaaagaaaacatattaaagctcaaggcacacattgcaccctacacaatactagtgggattcttcaacaccccactctcatcaatgggcagatcatggaaacacaaactaaacagagacacagtgaaacttacagaaattatggaccaaatatatatattatataacatttcatccttaaataaaagaatataccatcttctgagcaccttatggtatcttctccaaaactgactatacctaataatagtaaaagcaatatacagcaaaccagtagccaatatcaaactaaatgaagagaaaattgaagcaatctcactataatcagggataagaagaggctggccactctctccctatctattcaatatagtccttgaaggtctagctggagcaactaggcaacaaaaagaggtaaagagaaacaaattgaaaagaaagaagtcaaaatatcagtatttgctgatgatatgatcatatatgtaagtgaccctaaaaattccaccagagaattcctaaagctgataaacaactttagcaaagtggttggatataaaattaactcaaacaaaccagtagccttcctctactcaaaggagaaacaggctgagaaagaaatttgggaaacaacaccttcaaaatagtcacaaacaatataatgtatcttgctgtgattctaaccagaagatgctccaacatgtaataaggacacatgcctcactatgttcacagcagtcatatttataatagccagaagctggaaacaacccagacgtccctcaccagaggaatggttacagaaaatgtggtacttttacacagttgaatattactcagctaataaaatcactaacttcatgagattcacaggaaaatagatggaacttgagaataccatcctgagtgaggtgactcagtcacaaaggaacaaccatggtatgtactcactgataagtggatatcagccccaaactttggaatacctaagtttcaattcaaagaccacatgaaacctaagacaaaggaataccaaaatgtggatgcttcagtgcttttttttaagcagggtgaacaaaatactcacaggaggaaatatggaaataaattgtggagcagagacttaaggaaaggccatccagacactgccccatctggtgatccatcccatatacagccaccaaacctggaccctattgtggatgccgggaagtgcttgcttatagaagcctgatatggctcttgcctgagaggctctgccagatcctgacaaatacagagatggatgcttgcaggtaaccactggactgagcttgagggtccctgatggaggagttggagaggggactgaaggagctgagggagtttgcagccccatggagggagccactgtgtcaatacctcagatcctcggagcttcctgggactggaccactaaccagagtacacatgaagggtcccatggctctggcagaagtgtctcatatgtggcagaagatggccctgttggatatcagtgggaggagaggcccttgggcctgagggtgctcgatgtcccagtgtaggggaatgtcagggagggagaacaggagtggttgagtgtgggagcaccatcatagaggcaggataaggggtttctgaaggggagacctggagaggggaaaacatttgaaatgtaaattaaagagaatatctaatccaaaaaaagaagaacaaggaggaggaggaggagatgatgatgatgatgatgaagaggaagaagaagaagaagaagaagaagaagaagaagaagaagaagaagaagaaggagaaggagaaggagaaggagaaggagaaggagaaggagaaggagaaggagaaggagaaggagaaggagaaggagaaggagaaggagaaggagaaggagaagcagcagcagcagcagcagctggtgtgtgtctcccttccagagaattgttcccttcctcctagtatactgatagaatgtctcacatttatatttattttatgtgtcatggtatgaagatgcagtgacataatctaggacttgaattcaggactgtatattcttaagttgactgccgaataaataacaaacagaaatgcttgtttctaaaggacaaaaagtcttttagaaacagaataactggttgcattaaagctaaagctctgccaagtaaagagtaataatcttccctttagaagccagactctgcttgtgttcgggaagggagttttgctttggcattaaacccatttgctttgaacagcaaggttgttactaaatgaggcggagagataacgtacataacctgtaaaactcttagtggagacttaatctgttgctttctattaacaggacacacatcattaatctcaaaaatgatgtgtggtgaatattacagggctctggcctggaactaaattgcaacaatgtagcaagtgcaccccccccccctcccccccatttaggagagacaagcacagacctggtgcaatccattttctctacttttttttctggtgctttgatgtaagaacatgggctgtagcctctggctttgcctcctttttagagttccattcacgtgtgttgtgctaatattttggcaatagagtaattcctatgctccaagagattgctatagtccagagagcggagattctgctggttctggatcaaagaagatgctgagttaagtcaagtaagcacatacatgaataggttgcctgtaaaagactgcatatggtgggagagcagcttctgtatcaggagcctgctgctagccatcctttagaggtccaggggtggtaaacatctcctccacttcttagatcttccaattttcctagtccttatttgtctatgcaggccccaccttggatatatactataaagttacatagtcccagtataaaactacattgtgtgaacattgcataaagttacatactgacattataaagttcaaattatttggattatataatccaaactatgactcattgttgtgaatactgagatgtatttagatgctgtttgtgtgtgtgtgtgtatgtgtgtgtgtgtgtgtgtgtgtgtgtgtgtgtgtgtgtgtgtgtgtgtgtgtgtttgctaaccactgtaggctcctctcacactggaaggacttctcatttcatttgcatttctcattccttttgtaggtaagggtggggaaatgacaattctctggattgtgagttaggagagggaaataggaggaggcaggtcattactagggcactcctctgaagaagaaaatgattgactagccttaacaaggcagcaagagtatatagaaagggccttaccaatatccccaggcaaagtagtacaatatataataatagcaataaatattgtttaaattgctcgtagatgagtattttgcttcctaaaatgatatgtacggggtcgtttttctcaagttgctcatatttatggtttacggcttgcacaggaagacatgtcagaagtgaacgtatgtatgtctgtgttgaaacaaagtcacatttctagtgtcctaatatatagaacataaacatataaattcgtacaaaactataggttgcatgagagtgtctcgatggattgcaggcagaaaggaaggaaggaaggggattatgcctcccatatatgcagtgctgtcctcgatcagctgtgtatcacatcctttctagtttaccatttcatgtaaagtaaatgtatcttaccttcctaggtggaacaggtttccaattagtgagtggaggattaaaattcctctttgccctctttagttacttagcctggctgataaaatttggactctgcacctctctgtacctattgaatgtaactgtgtacgtaggcttcttttagtaatggcagctgtgatggctctgcgtcgtcgtcattgtgtctcacttttatatggataaccgttcagttttcagtttttctcacttattatcaaggtggatcttccctggctgtcttttcacctctatgcttgcctttgtttcacctaaggtccaaatgaggatagaaagcctcgtgagttattacacagttattgttttttctaaaacttcagagtatgacttctctgcttcctgaggcaatttggaatggaatgtctcctcttctttgatgttagactctgtattgattggctgatgaatgtgagctcatgtaaacaaacaaagacaaatgaacaggagctctgcttttaaccacaggtaattgtttgcatacagcctgaccctctacttagctagatctgcttctgttcagaacctgaggagttgtcatgacaccctaggctacatagggagccactgattgttttgaggactcttgccatgagattaatttaattcctcttaaataactgattgaaaaataatggccattaggagagtcaggctttgttcgatatatgactctctccttgagcatgaatttgtcccatggggacatggaagagtactacattctttgcttgctcaaatttcttgcacttttagtctggttagctggatctgagacaacacacttacattttgtctttattaattatttagccttcatttgattgagacagtctttacacagcaatataaaataacatggataaatgcaaaaacatgagaattgtttccttatcatcagcttagtgatactttctgatacctcaccttcattatcaattcaattccatactgtagatgaaaagtgtgtgcatcaacttcaaattaattctcatttcagctgttgtctgtgctaatatttgatagttaacttgtatgagtctgtgatttttaatttccagtacaaagcaattgaatatctggtttgtgtgttgtcattttcaaagactaatcttttttcttttcatctgcatgtagtatatgaaggaagtactgggttttcaaagagaaaacaaagttaaatgtatttatgctttgtgcagtgaatatttcagtgtcattccatagactaaatcagaaaaataaaaatatctaattttctatattagtgtaaatattttaagtgtttccttcaagagtttaggaagaaaatataaggaaaatagacatagaagctggtatctatttttccttcagataaaaatgactataattgttgcttcctataaccccatttaaaaatggggctcagagctaaacaaagaattctcacctgaggaatacctaatggccgaaaaatgacctgaaaaaatgttcagcatccttaatcatcagggaaatgcaaatcaaaacaaccctgagattccacctcacaccacacagaatggctaagatcaaaaattcaggtgacagcagatgctggtgaggatgtggagaaagaggaacactcctccattgttggtgggattgcaagcttgtacaaccactctggaaatcagtctggcagttcctcagaaaattggacatagtaaaactggaagatccagcaatacctctcctgggcatatacccagaagatgttccaaccggtaagaaggacacatgctccactatcgtcatagcagccttatttataacagccagaagctggaaagaacccagatgcccctcaacagaggaatggatacagaaaatgtggtacatttacacaatggagtactactccgctattaaaaagaatgaatttatgaaattcctaggcaaatggatggacttggagggcatcatcctgagtgaggtaacccaatcacaaaagaactcacatgatatgtactcactgataagtggatattagcccagaaacttagaataccccagatataagatacaatttgctaaacacatgaaactcaagaagaatgaagaccaaagtgtggacactttgccccttcttagaattgagaacaaaacacccatggaaggagttacagagacacaatttggagctgagacgaaaggatggaccgtctagagactgccatatccagggatccatcccataatcagcctccaaacgctgatactattgcatacactagcaagattttgctgaaaggacccagatatagctgtctcttgtgagactatgccggggcctagcaaacacagaagtggatgctcacagtcagctattggatggatcacagggcccccaatggaggagctagagaaagtacccaaggagctaaagtgatctgcaaccctataggtggaacaacaatatgaactacccagtaccccccagagctcgtgtctctagctgcatatgtatcagaagaaggcctagtcggccatcagtggaaagagaggcccattggtcatgcaaactttatctgcctcagtacaggggaatgccagggcctagaagtnnnnnnnnnnnnnnnnnnnngagcgcgtgggggacttttgggatagcattggaaatataaatgaaataaatacctaattaaaaaaaaacaaaataaaaaaatgactataattacatagcatgctacaatgcctaatataaaaatgttagactatgaaaaggaatttttaagattgtaaatatctattcatataatttagtgaacaatttatagataaatagttgttttaaggcaaacccaatagtgttaaaatataatgttttagaggttgaagtaggagggtcattatttaagaaagcagcctctaatatgtaaagactatatcagaataggctaaccacacaaccagataaccagttaactcaccaatgagttaaccaaccgatcaatcagtcatacaaactaccagataacaagatcaattataatgcaactatgccacccccaaacaaatgaccagctagccagctaatttacagactaacccttcaaccaaccaactaatcaacaaaatagcagctaaacagctaaattacccctcaactggtcagctaaccagttaacttactttcttaccaaccagccaatcaaccaacccactcaactaattagcccccatttagtcacatccctaagcccagtaaactggctaggcagaaacaggcacagtgatcaaaggctccccccccaccccccccacccccaggatatcatggatatgttttagttaggtgaagttttgcaacccaagagcataagcttttagagtttttattaagagacctacccactcttcttagagtctgtcagcaaactaaatttgctttcatcttcagtctttaaaataagtgttcacaactcacagctctgctcaggggctacctcaacaatgataaccattttctaatcatcttaatatatcagctatatatcggttacttttcctggatggtaattctcagacatcacaatattttctttgaattaaattttcactctccatgctccaattgttacttgtattttttatttattttttattttatcttattttattacttttgagatgtgatctctctatgaagctctggttctcctagaactcactatgcagaccaggctggccttgaaggacaagtgtaggcaaccacattatgatcacatttcagtactggaaccagagtcaggttctggtcagttaatggctgtacgctttctctaaaaaaatattttttattgtcatttggtattatctcttctgaagtactggatggtttgcatcaattctctactcaagagatgagtagacgagacaagctgaatataactgtacaccttgatgaactgaattttgtttccttgtcatgagcatgcattgggatgctatgcccttcttaatattcgccagggtttagagagaaaaataaacaaacaaaatgtatacagagaagtcagaatgagccccctgtgagtgggcagccacacagatgtagttcaaggggatggcctctagatgataggaccagggactttatgctgattcctctggacattgttggcaagggttcccaaatccagttctggagacacgtctgtgttgattctaaattggagtttgtcatcaggacactgtgatgacaatgatggtctttaaaggtcctcttaagggctgagttcagcagatcaaagtgagtctaccttctgtcagcagacgctcttcaggcacacactgctattaaaacttgtacttaggaactgcttttctagaaagcactgactcttcacttgggcccacagagtaaataaatcaggataaagcctgccttctttgcattggctttctctcttctttacttgggtcagccttctatttaactctgcttgtaggtatgttcattactcctgggatgtttctagtcaaccttgtagaatctaagctgtttcatattctttggagtctgaaggcaccatggcttccactgtgactactctggacctgagtgttggagtgagacccttgaagtcctgatagctaannnnnnnnnnnnnnnnnnnnnnnnnnnnnnnnnnnnnnnnnnnnnnnnnnnnnnnnnnnnnnnnnnnnnnnnnnnnnnnnnnnnnnnnnnnnnnnnnnnnnnnnnnnnnnnnnnnnnnnnnnnnnnnnnnnnnnnnnnnnnnnnnnnnnnnnnnnnnnnnnnnnnnnnnnnnnnnnnnnnnnnnnnnnnnnnnnnnnnnnnnnnnnnnnnnnnnnnnnnnnnnnnnnnnnnnnnnnnnnnnnnnnnnnnnnnnnnnnnnnnnnnnnnnnnnnnnnnnnnnnnnnngcttctaatcttttatttgttttatgtaccagtggctccaataggacaattctgtgttgaatatgccaaccaagttcccttgtgccataaaagggcatgctgcttctccagccagccccagaaatggaagggggttctgttcccaaatggacctgctgggtttaatgcatcccagttagcaagtggctttcacttgctctaaagccaggagtgccctgttgattggcagcaggaagctccttgttcatgtggagagttccattttgcaggggcactagcctctgagacttgtcagcatatggcctttatgatacagtaaaaggtcttttctgcttttctcatagccatttgtggctcagtttggaaccttttgagttacttagccatggccctgaactgtaagggacagcaattttaaatgagtttgttgtttgaatctgccttggtgaaggtttttttttttttttttttttttttttttgttctttaagatagaaaactagcaagcagagagtagatagagccaagctaactgctgtttctcagtcatcactgtactaacttcatttcaatgggctgtggtgcccagaggttaggctcagaattgaatttcagccctgagtcccactcaggttccggggggagctcatgttgcagaaacaagcctcttacttcggtcacggaagccttcttaacaaatccctgcatacaatcaaatcgtggctatttatctgctacactagggttcctgacaatcagactggatgagggtaaagcccaccttctctgttcttcaaatcaaagtgtgacagattcttggtgacataacaaggcagaatttctgccaggccaagaattgctaaagcatttcagggaaaagaacagaaaaaggtgacaagccagtcattcactggttcatgcttttgattatctacctgtgtgtgattgcatcactttggtttatgggacagaggctagctttgttttattttttattttgtttgtttgttattttttacatctcataaccactattaactaggggtcaggatggtaagaattggtgggtcttaacaccattatttgtgattatattgcttagaattagtgaactgatctcattctgagcatggcaagtttagtataataatggtaattactaatggaatttgaatagaagaaattaaaaacatatattttttattttgtttttttttgtttaactgggtatttatttcatttacatttccaatgctatcccaaaagtcctccacccgctcccccacccactcccacttcttggccctggagttcccctgtactgaggcagataaagtttgcacgactgatgggcctctctttctactgatggccgactaggccatcttctgatacatatgcagctagagacacgagctctgggggatactgggtagttcatactgttgttccacctatacggttgcagatccctttagctccctttttttttttttttttttttttaatatcagggaaattgtctggaagtataaattaaagtgacatttgaaccttaaaaagtaacctaaccaaacaaacctccttttagttgctgactgtgaggaaagcttttttccttgttggggacactgaaagttttactgtgaccttcaggtaacagattttgaaggannnnnnnnnnnnnnnnnnnnnnnnnnnnnnnnnnnnnnnnnnnnnnnnnnnnnnnnnnnnnnnnnnnnnnnnnnnnnnnnnnnnnnnnnnnnnnnnnnnnnnnnnnnnnnnnnnnnnnnnnnnnntagcttccacccccttctttgcttttagtcctggtttgggaggcccatatacagtgaacacctggacccaaggggaatctggcccctccgaggaaagaaacttgtccttggtcataggtctgaggacactggaatgcgatagatatgatgcctgtcttatgaactttgatgagattccatgagccattctagcaccgtgttgattggtttgtagtgcaggaaggagaaaggtctgtttctagtaacaaactcccgtagaagagatggcctagcactcagaacacttgtttctgaggacctaggtttcatttgaaggacccacatggcaggtgacagtctgtaacactccaaggaatcttctggcctctcctggcccctgcctgcactgcacacatgtggaatgaaaatccacataggtaaaacaacaacctactctgtgtgttgtggggcatacatttaatgcatgtgagtggtgcatgcacataagtccctatccattcacatggatgtgggagacagagtaggacatcaaatatcttcactcttgctttctccattccccatgaaacagtctctcatagaaccataatcttgtctttaagtacaagctctctggcctgtgattcatttacctttgtaggaatagacctggctctctttcttcttctattggaaattcaactgaggccttcaggatttcactgtaagcatttctaactgcctattggtcttcctgctctggaaaatccagcattgttttgcaattcatgccaagtcggacaatttttttttattgttgttttgttttgattttttaaaagaactttttttaaatggatggctaaaaaaatgctttatttcaaaaaggaggaagaacattaagacatcaaaagtgcacaagacaatgagaaaacatgtatcagaatgagaccatagttcagccatattgacagctgcaccaagggtggatgggcaaagggcgttaatttttaaaagaaattaaaagggaaaccttgtctcaaacttccctgttagttagtttcatttcaaacattaactgcgtatatccaaatagctacgactacccaaaggatagcttctaacaggtagtcctagaatctaaaaaacacttcctatgttttcaaacttacatttaaatcttttttttttttttgagactttcaccaagattctatcttagaaggtaagaatagagaaatttaacactcttcccaattattgaaacaactaagcactttttggtctttcttaataggggtaaagtactccccaccgccatttatagggttaaaaactttaacctgaaaggtttgcctgatcttactctctaacctctgctgtcagagacccattgaccacatggaatatgagcatcacacacctgacagtggctgaacaaaccaggatttgtcttttgttcaactgtcttttagaagacgtaggtgctttgtgtattttactatgaaacatttcttctcctctctagcttaaatggaaagagtgttttcattgttaccatgcactgaaattacctctcctatgtgacttgtaaatcctggggagataagtaagttccaaagtttctttgatacaagtctgctttctctctgtgatgtatccagggtcagtgacatgagctgtgttccccacctcagcatcctgcctctgtgtggattggccagactatgaagacacacttcatctctagtagtttctcagtgaggagtagagacgcacctagggctgtattctcatttctattgagtacaccacagacaaagtatcaacacacctctaggcagttttcatgctcagaactgtacaactaattagtgtcttccaaggctgcgccctcccacctaactatagtgaggcctttgtcttctcaagatagacttctctgtggttctccttgtctctagacttcacgtaattatttaatgagtgttgtaatggaaataagaagcccttggaagtacaatcataatggaaatctcatgctctttaaattctaggcaaaacatcttatcatctctcaaagaaaaatagcttaaggaacttgtcttagtgttgattcttagtgctgtttttttatactttctttggtgttagaaaaagttgaattcctggcttctgtccgaggcccagtggggaaagtgctttttctataagggtgaggacctgtgttttgttccccagtatccataaatctgtaatctcagggtgaggaacaccctgggcccatcctgactaatctattcaaaatggtaaactttaagttcactgacacattgtcacaacaaaaaaggtagagagttccaaaggaatatatccaatgctagcctctggcctccagatatacacacataggcaagcatacccacacatacattagtgcatgccattcacactagagggattgttaatatccacttggaaaatatatggttttaacacagtacagtgtgttgatatggtatcataccaatccttaagaactgatttctgtacaaataaaacacagggaagaacactgatgagaaatgaaagagggttaatctcctaaaagtgtttattctcagtcctgatcttcaactgtaggcataccttcatacacataattccacactaaggccatcttttctagataatagaaacctaaagttctgaaagcaaacctaagcctcaggagaatgtctaggtaagcttaggggtagattcagtgaacagaaaggggaggctggcttcagaagatcttgtgaacaatgagagccaatctcagcactggtggggctcattgatttagtatagccctattctcgttctggccagatacatggaggaggtgctagaagagatttgtgggagtggaggtgagaaaagtcagttcttgtcaaaaacagtttggagaccaaccagaagggagctgaaaattattgtcaagttagcttaagggtaaggaggcagaattttcaacaatttccaaagtggctgttaacacacttctctaaaattgtactcaggatttatgaggcatgccattctcagcgttaatgttacaaaatcaaactctgccatgcaactctgccaaccatagggacagctctgcatcctacaacatcgagtatcaagcagagatttaattctttaggtaaaaataatcaggcacatgtaactcattagtatggaaatttattctcaacttcacaatgtttaaatgttttgtctaacaaagaattacatgagcatgaatttattacttgtaataagtaaacttgactttaaacctatttcatatgtttgtatacctgggttcatataaaaatttctggggtagaagggggccctatgtggaaagtaaattagagagacctaatttatcagtagcttcgggagtaagaatggctatgttgcaataaagccttatttttgaacacccaaagtctattttatatattttaggtgttgtaaaatattattcatttcttcttgtttaactccaaccatctatacatgtagaaaacattactgtgtggaccacaggatatgtaataacaagcctcaggctggctttggctggttagaggtgatttagcaaactgttgtataatagggaataacttcagggcaagactggcttattattatttctcaaagaaagtataaataaccatccttccatgccaggacagcatgctcccaagcattagaacttttgcccaggttcttaccctacctgatggtttcctagaaaacacgctcctgcctcaccatctttctctagcatctgcacggtgacgcttccacagaccattctgtttgaattaacaacctgccccctcctcagctttcaaggtataaagtcacccttagatatgactaatcacaaatatcttttcttaaattacaattttaacttgtagatagaggctaacctgtatttgcttggggcagggctgtattttctttccagagctgttattaccattgagtattaactaaaaccacaatggatggtctgtctcctgcaagcccaactcctgcccatacataacacttgcttctttactccatggcacatcctgagttctccaaactgttgcatattcgcagttttaatatgcaactgagaatattataattaattttataactcagttataaaacaggggcttctatcagaaattattgggaaatatttgctggataaagaaataaatattataaactttaaaaatagaatgcacaaataccctcattttctcaaccaaccaaggtccacagagctccaagggactaaaccactaactaaagagtatatacatggagggacctatggctgtggccacatacgtagagaggatggccttgttggatttaatgggaggagaggtccttggtcctgtgaaggctagatgccccagtgtaggggaatgccacggtggtgaagaatgagtgggtaggtgggtgggtgggtgggggagcaccttcatagaagcaggcagatggaatatagagtttccagtgggaaaaccaggaaaggggataacatttggaaggtaaataaagataatatccccccaacccccaaaaagaaggaggctggggaaagtcaaggagaaaagggtaaggtgctttatatgggagaatattaataatagaatattagtgtgatatatttatataaacaacaaaaatgttttttttaataataaacaaaccatttcgagattaataataaaaataagaaagttaaaacaaaacaaaaaaaaccctcactggttgttattgaagagggtctggttcatttcccatcacccacatgctggttcgtggtatgttgtatcctatcctgtcctctgcagaacactggatatagaatgcacagagatacataaagggaaaccatacataaacattaacatattcataaatcaaggtactttcctcctactttgtgagaaaccttagataggcaggttacaactaatatttggtaaatgtttattcataaccctttctttagctggaaagggttctttctatacaatgcaaatgattaactagtcagttaggtctcctaataggaaggcaatgaatggctgttaaagatgcccgagaaaatgcatcattggaattggcactcttctcctctctgtactgcgctgaagtgttaatcaattaatcagccctgcaaaggctttgatggccgccatacttctttcttgggaataacttccatatggtctcttatgaaatggttcccaacttttgcactataacagattttctcagtgtgcactggattgcctggaagttttgttttttaaaatgttctggcctctaatcccagacattctgatttcaacgtatagagtaaagactaagactgtagatgcagttgtcagtgtatggaaatggaccaaccagaaggttttaggtttttcttagcttttttctaaccatgttgtttgtcaattattcagttctagaggaagaggaggaagaggaggacgaggagaatgtggtggtggtggtaaacgggttatttttgaatgaaccttaatagtatcatgattttgggtcttagaaatttattctgaggtgtcttttcacatatgcctaaggatattgtaatatagaaccagtcatgtgctttctgaccacagcttacttcaaatcttacatcatttctttgtacttgggtatcctgggacttaggagcctttgtatgtacttttaactgccctatgaaaatggtgattagacattaaaaactcactttttttgtttgttggttttgtttttttcttttgtaccatctctttttatttccaagtcaagtttctaaccttcaaatagtaagtgaacccagttgctgtcgtgttcatttataaaatgctttgcatatgaagagatgttgctaaaaaagtttcatgaccgcacacaggagtttcttacattgtgcacatctgaaatatgtactgatcatccagttatcttttaaaaggaaatcaattatcagtaatggaaggattttcacacagaagagtgaagttatatgtgtaagtatattcctctttatcggggctatgatgcattttttatactatattataattgtgtatatacacaaaaacatgttctctttttattgctactgcaaaagtatactgtagctcacaaatatatgggcttagtataataactaaagatcatattctttcaatgtattatttcttttcagcagttcagtctactaatgtttataaaataatccatttctgtacctatattatttaatgaaatataattttgtttagtctaaagtagttagaatgtatattatcaacatagtatgtgaagtgtgtctcaagttttcataataagtaaacaaatagctggtgtctgtttgcaactcagtttatatttgagttgcagaatatggagaagtcagggtagtgttcaattagaagattcatctttccgaattagtgttcttggtgctggaaggtgctacacactctgcaagcagagaaaagtaagaatcaatttcacccaacaatggaccctgaaagctacaacagatgtatgggaagatatgtacattagtgaattagtgatgtgcacgttatgggtgtaacccaccagttctgatctgctctaagtcccatttcatgagatgggatttatagttgtcactattaaaggagcaaataacctgagactagatggcatataggttgggagtggggctgcacaacaatattgttagtaagtagctaattcttaaaatatgttggtcctagcatatatatatttcacattcattgcaaatactctatgcccaatgaacaagataaaattcaataagttttttctttgccctccaatagcatgatcaattgattttatacaaataaatatgtaaattgtaggcggacattttgtattatttactaattgcagagaagcaagaggctagactgtaaaatgcagaaagatccctcagtacaccagcttactaatttaaataataagagaagaacagtcctctggtagcatttctgtttctgaattcactccattgaaaactgagtgaagcaagagatttctttcatgactataccaataaacgtggagagaaatctgttttgagataaagcgtctatgtaatgaagaatagacacttagaaataaggttgttactaccagtgtgaggttaggaataaagtgatgccaagttctccatagccataacataatagtgaccatttttcctttttcaaatatatttggtcctaaaataaaatttaatattttaaagttgtaaaatgcatttaagtagtgttcgtagtatgataagatatctataagagtttgtgaagatctgtaagacaagataattattaatatggtgggaatgtttcctgtctaaaactcaggtgttggtgaggtggtgataaaagaggagatgaagccacagattcacctccttctgtaccttagaaaagaagcatatgtagcagaggatggcctagtcgaccatcagtgggaggagaagcccttggtcctgtgaaggttctatgccccagtataggataatgccagggccaggaagcaggagtgggtgggttggggagcaagacgagggagaaggggagaggggattttcagagaggagactaggaaaggggataacattagaaatgtaaatgaagaaaacacctaattaataatatatattttaaaaaagctaacctccccctcccgttccaccacagaaaggctggattcatcattcttgagactgtagatatagatagtatcctcttataagcagaacacagcctttgactaacacccaaacattccagtcctgtgatctttaacttcctcaagaattgagagaaataaatgtattccatgtaagcaaccctaactctgttacttggtcatagcagcatgaacaaacgaaagcaaattacttattctgtacaaacaattttacatggattgtcatctttaattttcacatggttaattaaaattttattatttcacaatgaggaaactgaagttttaactagcctgttgcaaggctagtgaccattagttgtgtattgaaatcctcagtatttactaaataagtatttagtaaatgtccaagaggactgtttgatttctttaaggaaggatgttgcaaattattttgcaacattgaaattcttttccatgtagagatacaaatacaaattaatatagttgttatattgccatatttttctgttttgtgtgtatgcagacaaggcagtaaatatttacatcagaattcaaagttaaagcttgtctttattggaggtggcacaaaggaggaagaacacacacagcaaatgtgttgtatccttaatggaagttgcgttgtgagttttgaaagaagggagaatttcaggaccagataaaatagcggctataaattcacacagttgtgaatggtgtctgggaaattatggttctttgcatttgaatcttggaggtaaaatataaaataatatttgaaatggaaatgctttccaaagaagaggggcctttgtatttgttcacactaatttgttagtgttgctgaggttgcaattggagtatcagcagccctaacaggtttgttgttatccatgtcttaaaagcattctaggtctgggacatgcttctatgtttaaggacatggtgcagtcaagcctcgtgacctgttgtgttctcctccccctccccccccccccccccggcctccgaggtccacattatagaaggagtacataacatctatgaaaatttattcacatgcatacatatgcacatacccaaattcaactcaaaaattgaaaaatgagctggacaagatgacttagtggttaagaactctttgttatttttacagaggactgggtacacttttttaaacttctctgggcactaagcatgtgggcacatgttatatagaaatacatgcatgctaaacatttatacatataaaataaataaatctaaaagagaataaactataatattctaattacctatgctatctttttgtatgttcccatcttaaaatgcgtttgttcagttttcaaaataaacttggtgtgtatttcaaatacagggtacaattcccttgagaaatgcattgattacaatcataaattacacagaaacatcattagaacttgctgatacaaatttgttttttctgtaataaaagtaattttttctcaacttttttttggtgtgtgtgtgtgagtctttgagatataataatttttcttttggatagttgacccatcagctcagtaaattcaaataggcctttttctttcttcaacttctgattggtagcctgggatacttatctaaatatatctaaatggatatatacatatgtatgtaaatcttatatatttaataaataataaatatacaaataaatatatctaaataagaattttctacttctcttttctctttctatcagcaggatatacttttnnnnnnnnnnnnnnnnnnnnnnnnnnnnnnnnnnnnnnnnnnnnnnnnnnnnnnnnnnnnnnnnnnnnnnnnnnnnnnnnnnnnnnnnnnnnnnnnnnnnnnnnnnnnnnnnnnnnnnnnnnnnnnnnnnnnnnnnnnnnnnnnnnnnnnnnnnnnnnnnnnnnnnnnnnnnnnnnnnnnnnnnnncaagccctccttgaaaacatacatgtgcaggctggatataggtcaaggactgctatattttggccatagttggccaatggcatggtattccaggagagattctgaactgtgaccagagcaacttgaaagagataagtgttccataaggtgcatcagctaccagatggccacagtatagtgatcagaaaagagaataactgttgggagaaggattttgtgcacctgagttctaactataaccaagcccttagaaatattttgactttggatgcatgctatactgtattagtttcctcttgcaatgtaagaaatccccaccagttggtagttgaatgttgcagtgcaggtatgggtcactagtccacagtcacagtgttgacaagagtgtgtcccttttagaaacattaagaacaagtatatttccacacatttcaaggaaaatttccaaatttgttagaatgtaaagaaatttactctgccattgcaccacacagccctatgctgtagccaatccaggggtttgttgaagtcctgttttaaactgaacctactaacaacctgagttccccttgtgcaacatccttttggaatcctcaggtcagtctgttgctctttcctttggaaccattattctgtctgttacactgaacttctattttgattttccttatttgtaaattaaatttctttgtaaaaattaaagcacaaagagaaagtacgttaaatacctggttgaatgtctgatatactataataattcagttagtgagatctatcatgacttcttacttcccatattgcttgtcttattattttccccatttcttgcttattgtaccacatgtaccacattttaaacatcaatatattttctccagtgattagacatttcgatataatatttgtacactatcgagagtatatgcatggattcattatgctagagatttcgagagcttaaatattagattgttcatgagtagcatatgttaaagcactctgcgggtctctgatatggctcccgttcccctaatttctacatcattaccttccaatcttgagcagaccaccagagtacctcagcttctattcccactgtctcactgaacaggataggaaaggactcgacatctcaggtttctagcatgattgcagtggctgttgatgtgattggtcagggaccacactgtgtataactgctctagaaacatctatgaagaaagtagtgtaattgtctttcttcacgtgtgtagtaaacatgtttctgtgaatttggctgagagctacccagaaactgaagatagcagagtagttttactaaaaatgcatgcattaaaacaaaacaaaacaaaacaaaacaaaacaaaaaaccaaacttctgaaagagatctgtcttgcaaagtagtgtcatttcaaagagaagtatgctttaacaacaggtagctatctatcagtgtgtctttctaaacaggaaagagtatctgataaagactagcatggggttttcttttttttcccaacttttaccagtatgttgagcaggctattcttcaatcatgaaaatcataaaatggaattgctctatctgagggtgcctctgcttcacaaatcaagtgtcttttaataatactgtcttgcggttgctaaacatagtgctattattttgcaatgtgacatttatgcatcatgaagagacttcatttttatataatgcgtgaaaaacgaaacatgggattaataatgttagacacatccttgaaattgcccttgaattatagcagtattaaacacctaacaatttatgtcatgtttagcctgagattgctttgataaagggaccttgtacaagtttctagaatttactttgtccacatgaaatatattaatatgacagaggttcacattttctgagcttgtctcttcagtgggaagctgaggttgtacagacgggacaggagctcaactctgtcacatttaagtcttcaggtgtgttatttaaaaaacttgttctcgcaggtttaattgctctcttaaaaaccatgagtttgaaaagtgtttagtgtcattgcattgattggacaataatagaatatcaaatgcattgttcccataatttgatttttcagccacttaagatatttaaattgggcttctgttttaatacctttttatttagactgggcatggatttttttttaaagattttatttatttatttttattatatgtaagtacactgtagctgtcttcagacaccccagaagagggagtcagatctcattacggatggttgtgagccaccatgtggttgctgggatttgaacttcggaccttcggaagagcagtcgggtgttcttacccactgagccatctcaccagccctgggcatggattttgatgaatttgatttgtgattcatttccttcaagagaatggattgtgtttgatgtaatgtgaatgaggactgggatgtgttcataaggtaatgtaactggagatttctgtaccctgaaatagacactgctcttagaaattcaaggtgaacagggatttccagttagctcactttataatagcttacaagtgtgtatagattttctagaggtctttaaaacgtagctctaaaagccttattattcagaagtacctcagtcaatctctactagaaactacagagttttcacttagtatgcatgtttatgatcactcaaatgcacatgactcaaaagacccatggaagagcaggttatagccatgatgttcaatgagtgtttggaaaggaaaagggaaagatcatgcgatctggaattcaccaggttgataggaagtgccatgtactgttgagaggcagaaaaaaatgataggtgtgaggatatgacagcagacggggtattggatattttcaattttaatttacaagcactaaaattatagctgacaattttaagcatgatcagtttttaaaaataggttgatatgtgttcaatattaaccaactgtaattttttttcattgttcatttattttatttttagatttaaactaaaatatattatagacattagattatgcttttaaaatgttttattaaagtatttctaagttcaagttttttaattgctcttattttcatgagaattattcatactggaaaagtgcatagaagactaaaaaataatattgcccttaccatattttttttgtaatatttgagagcaagggactttcaagattttatgaagaaagtgtattttcttccagggattattatttaatacagtgttgtttgcacttttaggtattcaattggtttggtttcatcatctgtatgtaagcgaatattggaacttgcaagtaaaagtagactagaaaacacaacagaaacttcattctgcttgcaatgaatgctgtgacagattgatcattattctctttgctccacccttctctaaattaggcagttcttaaaggatctaagcagaattcattagaacacacatagaaatgtactatctgcaaagttttctctataaaattaaacatgtattggatgggggaaatcctagattaacttttatacagttatgttcagaacatggtataaacttcaaagaatggtcaatgaactactttttaaaatattatttaatgtgttgatagtctgtgtgtgctttttgtatgtgctaagtagtctctcttcagttacattgatattaagggggaaaatgaagaggatccaaaatgaaaacagccagtgactatctagtaaagtagcagtcagcacatctttcccagtaataatagcctcaagctctgtcaggtgcttatgtggtagagtgtacagatatacagtgcagtccaggctccttggtcccaaagcaaagagaatgtttctatcctactttgtctatactgtgaatatcattattataagacttcatagactttataaaatgtacatctcttaaaacatgttttttttttgcatttgagagaactttttaaaattatgtatttttatccatttatttttaagatataacttaattacatttctctattccccttttccatccaaactcttctatccacttttttccactcttattcaaattatgccttcctatcctttttcccaagaccgagtttctttgttgtagtcatggctgccttggaaatagctctgtacactaggctggccttgaattcagagagatctgccagtctctgcctcccacgtgttttgattaaagacatgcaccagtacctccagattcccttttgtcactgttattgaatgtatagatatacatgtaaatacatataaactcttaaatatgacctgttcatccttataaaggtacttggatatatgttttcagggttgaccatttggcattggacaaccaactggtgtgttcttccctggggaaggccacccctcctattttcagccttctttagttgctttctgttctttctgtagggttcaggactggtcggcttttttagttcagtttgtcctgatcattggtgtctttattgtcaacctcggtttagggtggtcatgttggtaagattttaccaatgtaacgtctgttgttggtaggagatacaacttcacaagtccctgattctcttacagtcttttggctctctcttctttccagtttcctgagcttgagctgtgggactttttttgcagttatacatcctgcaggataagggtccatgaccctgaattttgattagttgtggtttttccatgccgatctctgttgcaaagagaagtttccttgatgaggactgaagacctcacttacttatagacgaatgtctataaatgttttagggattatgctggtttagtaaacaagtggtcacaaattctcctctgatgactcttgactttactagtgctctgtagttggctaggtttctattgggcatcttccacagtctctcttgttgcgtgtgtcatatatccgattagagaactattggttggcatgaacgttttagtgccaatcttaaatacatttttcctataatgccatgcagatttctgtaaaggtgttttgtccttcaaaactatggggaaatgtgatataacctttagaaatgtggttcacaaggtgagacatgtattctttcactcaacacctttaaaggagtgggtatttgaagcaaggtaacaagtaacccaaaaggtagaaggtagagggtttgcttttgttttccttttattatttcttttgtcctaaaacacagatggctcagtatctacagtctattcattttatatgtgtgatttgggatgtgcatgctaaatgtgaagggtggggaaggctcattgccgagtgtaggggtggggaggagggaggaagaggaggagagctcttgaaatgttaggattttctctggtgacattcacttaaatggtgttaaagaatgagagagggtcattttcattggtttgctgaagtccaaattaggtagaagttagcatttgttttgaaataaatgttatgaagatataaaaggatggatggattcagatggtaaagagctgtagtagccagaaggtatcaagcctggagaaatgatgggagggagaggggggttagaatactgaatatctacaagaaaaaaactgtatacacacacacacacacacacacacacacacacatattcacatgtagctgtgtggagtcaggtgaatctattggtagacttttattatttttagtttaagtgtttaaaactaactatcgattgtcttaagaattattgatcttagagtgtgtgtgtgtgtgtgtgttttatgttttgcatgttttcctttacctgcacatcatagctgaggaatattctttgtggactacgacatagaagattattccattcaccaactgatgtttagaatttatgtttattaaataattatgtctattaaaaggtacatgtatagctgggcagtggtggtgcacacctttaatcccagcacttgggaggcagaggcaggtggatttctgagttcgagggcagcctggtctacagagtaagttccaggacagcaagggctacacagagaaaccctgtctcaaaaaaataaaaaaaaatgtatatgtattataataccccttttaaaaataaaaaccctgttaatgttgagacactagaaagggagaactagcttgtatgtggtctcctaattgtgaagctatagtctgaagctgaagggattgtttgcttagctttcctgaacaagtttgtctccctagtcagcatcactctgtttgttcactggctcagacttcattcaggccttctcaggcatgtctttgtgtcaccttgtcaagttttaagttgattgggcacccctgggggaaatggtgtgggaaagacatgaacactcttgagtgccagcatagatatggcgtgaggtgaggggcgagagaagccaatggtaagccaagtcctggcagaaatctgcctccaggaggctcaagatggtcgcttaggggaagcatgtcctactctgacccttagtgccagggaggcttgcagttctgcttacaggaaggtagtaccagcagtttttatatttgttggatcgaatctattcataatctctctattttgtttgtctaatctttcaagagctgtctcattcactctgatcccaactaccattcttctcttaagtttctttgctatattattgcttgtcccttcttaatctcacacgttgcagcataataagcctggggcatctctacaaacaactctctctctccttctctctctctctcatctctctccttctctctctctcacctctctctctctctctctctcatctctctctccttctctctctcatctctctctcatctctctctctctctctctctctctctctctctctctctctctctccctccctccctccctctctctctcttcttttataaaagatttcatagttcttcctaagtgtatctgctaattaatctttacattacccctgtgaggtagacagctgaataggatattctgcacacaaagcactagaccatgctgcttctctgttatgatagaggattattgttatgttaaaatgtttatacaccaagtacataaatttgtagagatggatgtaagccgattccttgggcaaaatatatgaacgtggttatagcataaaactgcaattgtaaagcaagttttatcagcttctggtatttaaaggattgtcccagatctgcatactaaacctctgtatgatagcctctttccattctccagcctttgggtagtgacaggacacagtaagctggcgaagcaggactgcagcaagcagctatctgagatcctagatagcattacttttagactactggaagcttctttggtctttaggaatacatatacataaatcactagagtaatagcactagtagtttttgatgataacctgatgatagtgaatggaaattggttaggtgttgtacgctttgtatagagtttggtgtgggtcttctagaacatagctttttaaccctctattgcagccccatactgggcatatgactaaatgtgagagtctggaaacgttggggtctgtataggtggagatggggacttttcatgtgtaggaacagtggcctggaggatgggctgagtcttgctagtgaggtacatcctcacataagttgcttatgcatggatcatgacagtagtggcataaggaaaccactgatagtggacatgggaaaatgaggttatttttctcttgccttaaaatggcttggaatttgaatcttcaactctcttaaccctttgcctgttaacacatgtgagtggggaaacaaggaaattgctttctctataaaatatacttaaatatgtgtgattttaaaactgaaagatgctaagatcaaaaattcaggtgacagcagatgctggcgaggatgtggagaaagaggaacactcctccattgttggtgggagtgcaggcttgtacaaccactctggaaatcagtctggcggttcctcagaaaactggacatagtactaccggaggatccagcaatacctctcctgggcatatatccagaagatgccccaacaggtaagaaggacacatgctccactatgttcatagcagccttatttataatagccagaagctggaaagaacctagatgcccctcaacagaggaatggatacagaaaatgtggtacatctacacaatggagtactactcagctattaaaaagaatgaatttatgaaattcctagccaaatggatggacctggagggcatcatcctgagtgaggtaacacattcacaaagaaactcacacaatatgtattcactgataagtggatattagccccaaacctaggatacccaagatataagatataatttgctaaacacatgaaactcaaggagaatgaagactgaagtgtggacactatccccctccttagatttgggaacaaaacacccatggaaggagttacagagacggagtttggagctgagatgaaaggatggaccatgtagagactgccatagccagggatccaccccataatcagcatccaaacgctgacaccattgcatacannnnnnnnnnnnnnnnnnnnacgcagatgtagctgtctcttgtgagactatgccggggcccagcaaacacagaagtggatgctcacagtcagctaatggatggatcatagggctcccaatggaggagctagagaaagtagccaaggagctaaagggatctgcaaccctataggtggaacaacattatgagctaaccagtaccccggagctcttgactctagctgcatatatatcaaaagatggcctagtcggccatcactggaaagagaggcccattggacttgcaaactttatatgccccagtacaggggaataccagggccaaaaagggggagtgggtgggcaggggagtggggggtgggtggatatgggggacttttggtatagcattggaaatgtaaatgagttaaatacctaataaaaaatggaaaaaaaaaactgaaagatgagtttacttttgttaccattggacctacagttaagtcagcgactcttgccttcactttgtttagagaagttcatatctggctccattcaaagcttgctctgaaccctgctttaccacagtctgtctgtcctttgaccctagatcagggttcagcacattgtatcttgtctgtgggggcagctcagtgtcaaactgtctttgtgtattgatgtagagaagtaattgctgctttctgccctcatgtgaccccatgtcacaggtattaggtttctttgcctcctataatcccagtgaagggtcagaaggagtaatcactgtcatgcagactcccatctggaagtttattttgcttaattaatgatatacactgaaagcattctttatgcctataatataaatgtataagaaaattatctttgtgttcaacattaaaacaatatatctcctagagatttctgagtatataacattttatatgtaaattttaaatgttttattgtcctaaggttgtttttaccttacgttgtctttttgtttataattttgaaaaaactggaaaacatgctcatataacttccaaacttgcatattctagtgaatcctatttttgcttaaaatttgcatggctcttaaaaaaaatgtatgcttgtgtgtaatgtgtgtgtgtgtgtgcccacatgtgaggggctgtaagatatctagtagccccctcattcttttcttctctccctaccttcctcttctttctccctctctttcttctttcccggtgagagctaatttcaaagcttccctgcctggtgacattttataaactgttgttaactattatgtacaaacattctgttcctgggatgatgagctatgtctgggtggaatgtgatggctgttgattataaagggggtgagcatccatgaggacgccccctcttctcactgcactcaaatgcactaaaagttgctgattaggggggaggagataaatagcagaaatgccactattattcttgtcaaaatcaaaaccatttcagtggtcaccgaaaaacagagttctgccttttctttgtgtttaactctgaaataatttttttcagccaatactgtgtgtgtgtgtgtgtgtgtgtgtgtgtgtgtgtgtgtgtgtgtgtgtgtgtgtgtgagagagagagagagagagagagagagagagagagagagagagagagagagatgttttgggttacctttatgttgtatgtccacttggcctctgactgtattgatccctctccgtgtgactgttgctctcgcaggtttaactgatgatcattctatagtcctccgaggaaagccattcattggggagagtgaatccattttctctgggtcttaattaaatgcatctaatcctgaagtgcctgttgcttttttttttcattttctcaaccatcgtgaatcaataactttctatttttcttgatctggggtctgacttatattaattttttgtcattaattagaatcaacctggaccacatttagcaagcagatcaggctttggcactgggtgattttttttcaagtatctatttttcttcctcctcttccttctcctccattttaaatttgccctcagtgggaatggcgctttccctgggaattggcctcatttccagctctgttcaatcctgtgtgctgtggtcacagtgtgagcttcctctacgctaagtcagaacttgggataattaatgactgagtcggaaagccaacacttaggactttgtgggcagaagaacacctcacaccagttcagatcctacctcccccattcctgaccactttgctcagacctcctcccttgactctgcttagtactgatgacaattccccagtcatgtgacatgtgcatttgttcaagtgtaacaggaaatcaggaggcttgtttgagaaccgaggatttataatgttcttattaaattttactttgttagatgcatcttactatgttagcctacggattcttgtccttttttttttttttttgagccattttctgtagacattctttaaaaaaaataataattttaattatttacattcaaatgtccgcttttctgttctcccctccgtaaaacctcacccccctcctctttgcctataagagggtgctccctccccccactcctgcctcactcctctagcattcccatttgctggggaaattaagcctctcccctcccattgatgccagataaggtagtcctctgctacatatgtagtgggagccatggacccactcacatatactcttcgggtggtggtttaatccctgggagctggaagggatccagttagttgatactgttgttcttcctatggggttgccacccccttcagctccttcagtcctttcccttactctttcattgaggtccccagggtcaggacaatggttgcctgtgattatctgcctatgtctttgtcaagtactggcagagtctctctgaatacagctataccaggcttatatttgcaagcacttcttggcatcagcaatagtgtttgtgttttgtgtctgcatatgggatggatccttaggtggggcagtctctggatggcctttccttcagccatgtcctttagacaattttatgttaaagattttgagatgagttggtggccccatccctcttctgggggccatatcctggaggcggtctctttaggttctatctccctgctcttgggtatttctgctaatgctatccccattgggtcctgggagcctctaacatccctagctcatgggactttctagtggtccctcatccctcactgctgcatatttctatttattctcttggctctctggatttctctcatgcctctttccatacctgatgctgccgcccctttcccctccccttctcctctctcatccatgtctctccttccctctgcctcctgtgattaaaaactggggtgcagaactaaacacaattctcaactgaggaatctctagtggctgagaagcacctaaggaaatgttcaacatccttactcattaggaaaatgcaaatcaaaacaaccctgatatttccccttacaccaatcagaatgactaagataaaaaactcagacaatagcagatgctggcaaggctgtggagaaagaagaacactcctccattcctggtgggagtgcaaactgttacactcactctggaaatcaatctggagctttgtcagaaaattggaaatggatctacctggaaacccaactatacttttgtgcatataccacagggatatgtgtgctccaccatgttcattgcagccttatgatagccagaaactagaaacaaccaagatgttatcaatggaagaatggatatagaaaaagtggtacatttacacaatggaatactactcagctgctaaaaatgacgacttcaagaatattgtagtcaaatggatagaactagaaaatatcatccagactagaaaggaagtacatggtatgtactcactgataagtggctatacccatgatgcaactcacagaccatatgaagcttaacaagaaggaaggtctaagtttgtatgcttcaatcctacttagaagggggaacaatagacacttataggcccatttgtgtttgataaccattctctagctacattctatgtcgaaggttggataatgttgataagtagactaagagaccaggccctgagcaggttgcagtcacttcatggtatgtaacaatctcttaaccaaaatatttcctggtgttaggtctgaaatgtcatcactctttcattatctgactcatgtttctgcctcttgactgtaaatgaacagcaggagtcttgacagatgccttactgaagtatgggctaattaagatgtatcctgtttcttttacctgttattctgatactttggacttttctttggaaaaaaaaatggaaactctttatttaaatgatcaatgtaatttacaagttttagttacttggtttggaaatacaggatataaggtgttttgttaaaactattttccttctgattttaaaatgctagggatctttttgcccttaatttcttatatattgctcatttatattgttttttgttttgtttttgtttttgtgttagtaaatagcccattatatctttccgtcgttcatttagacaaacaaacaaacaaacttgtaagttccagagaagagccagatacttcctcacactttcttcatattttagggtctcatgctttcgtgaactggcagactggaattaatttcatcctaagccattggctgagttccatccataaatcacggtagaatgttattctaacaacatagaaatggatgtgtgtcctttccccaacctttacttctttggtcaggagtcagttatgagctaggctgcccaaacttcacatgtgctcccagaccttttattgatcttctttcagaatctgtctctattattactatttcaagactcagtgtcagcagaatattgttttgagagagcaggtcatatatttcattaggatgacatatggttgttctctgacctctctcctctaagttaattctcagtgttttggccatactctttgatgcctgatatctatgactcctaagagaggacacaagacaatttttttttgtatgccagtttcatagtttgtcaacacaatcaaaaaatggaataagttgacaactgtttgcacagctgtgttattttctctggaattgataataagactcttaatttaaaagacccatccaacagtttagtttgatttattcttcaaggaaacttttagaagcttatctctaggttaaatgttcagtgtgcacgttattgaattattttctctacgagtttgagcacaaagcaaaaaggttagagaaatctattcaggctgtcataactatgcctggctatgtgtgacagatgctaagtagcagaacctttacgttttttttttttgtgtgtgtgtgtttttgttgttgttgttgttgttttgtttgttttttttgtttttttaatacacacagagaaggtttagaagggatcctttatgcctgtgaacaaacactctgcaaatgaggaatccccatttggacaaaaaaaattgtccatttttaaaaaaggtttaaaaatatatacatagtttgctaaaagtttagatttgtcaaaacatatagatctggattaaaacatcagcttgaatctttttcaggcagcggtcttgaagttataggtgagtgatagaagtaatggtcgggcaaggtcatttgaaattgcgccagactttctcccctcacatttccccattttcttcccaaataaaaccagatctgtagggacaagataagtctgtgtcctggtggtatcgtgtcattttatcagagtccattgggaactgcgtgctgcatttattgctacaaagcttagagtctgtgcatggatgtctaatacagagagttaaatgtttattgtaaaaatacttgatatttttgggcaggggttaacctatcctttcagccattactagtcttttctaggatggagtcataaacaatgtataaaagaatatacaacttgagaaaatgaatttgcttctttacaacttctgttttgtgatgagagacaatatttttactattttaaaacattttgttaaattcatgtagtaggtttaaatttatatttatattacttatagataacagaaaactctattttgtacaaaaagagtactgttattggttgacagtgtgtgtgtgtatttgtaactaaaacctattgtcacatattaatatgctttaggtattaatcactaaataatcaaattttatatatatatatgtatatgtatatgtatatgtatatgtatatgtatatatatacatatatatatacacacattatctcactgaaataagtgctacacatggtttataattatattgccaccattttaaaggcttgagcaactattttctttcagtccccacaaaataaagacagtatatcacatgcccacagaataagatacaagattttgaaatcttaactcattattattagtatttcattaagtatatttttttaatgaaatttgaatactgaacagacctgaggaagaattttgcccagttttctcatcatatgagctcaaaggattggagtcctgcaggaatattccacagggtgatgttgtatacttcattattcttgtattaggggtcagagccccatccttggcaggagtccatgtgcctttgtatttcaccatgtcccttatggcaatatgtactataattttagaactctcaagtgactattagaccttctgacattggggccatctttatctcctgattaacttgatatagagttgaacattctgtatgtcattggctgtgacttagttagtgaagctttggaacttcctctccagaaaggagcctgactgtcttcctgatgagtcagaatgatgagtctgctgtaatgggtaaaatggagcagtttcatgccaggtattactagtaaaacacagagtttcatgtacatggttagcatgtatattagcatgcctcagtgatctatggtgacaggaacatactaggcccatagtgtactaaattagagtgttcaaggtggttgtatatcagcaatgtgaggctgtgtttatttttattgtctttggggcttaaaacaaaaaccaaaacctttcttttttttcttgataacctaaactgacacagaaaaatatattcgtttccatcaagccaaaacatttcagcccatctctctacacattaaatacattgacatgtctctgttaacttataggagggtacttttgaacgacctgtttagacagattaaagatatttttatgactctttatgtggcaatcattggaacaaactgacatttttatttctgtgggaataccagttgattgtttctgtaggccatctgcctgggggactgtggcattcttttacctttattcaggagaattgtaaataccaggaaatactttaaatggacaattttaaaatgctcacacaaatgttttccatctgagtatcatgagtcacggcattaattatgccaggaggacctcaaggaaactgtctgcgctgcctagaaggctctatggaagcctgggttaaataccatgatcatgacacttaataaagcaacacaaaaagcaagcacacagtgtgtttcatattgagttttctaaataatcttttatttttagacccagagtaaatttagtaaaactctagataatgggtttcatttttttggcatttttgaaattgaaaatatattaatgagatggaaactagaaatgtagcttatcaaggacaacctttcaacagatgacatcaagccttctgtggtgtcagaatgcgattcccctaaaaactaataatagaagcaaaatagttcttttgtgttgtaatttgtaagaatcatgtttatatggggggaagggagcatcaaaatttcaacttgctataccagcagccagttttgtaagtgtaaaatttgtataatctaaccttagtctctggatgttgttaatctattatttctgcaattttccctcatactcttaccaatttccaccgaatatattttatctgagtagtgacataaaagtaacatgctgctacttttgaatcaagactagtgttccccccctgtccccgaacatctgagaaggctgtgtgtgtacttaaaggagacagtgctggacatcccccatctaaaataggactgttagctatggcacttagacaacatgcatttttgtaagattcagttgtcaagtggctgcagggaacggtctataccattagtttgaaagggtttttaacagctgaggttcatcatttggggtatgtgtatcactaggtttctttctttcttttttttttcttaaagatttatttacttattatatgtgtgtacactatagctgtattcagacactccagaagagggcatcagatttttgttacagaaggttgtgagccaccatgtggttgctgggatttgaactcaggacctttggaagagtagtcagtgctcttaaccgctgagccatctcaccagcacggatcactaggtttctgtgcttcaaaggcttgcaaactcaattttacacactcatttaagatggaagaaatttgttttttgtagaatgagttctgagacttctcaaagattaagtactactgctgtccaaagagttgaaactttcttgtattctatgtagaaaaggaatccattgtctgtggctttaatttatgttttaatgattagttcatatatgaccaaatacactacaataaaagtttaaaacttcgttgcctttgatatatttatgttgttttaagaaagaaaattattgctgtatttaactttactgttaatatagcatctttattttgttggtaaactccatacactttctgttttctattgtatgtgcgtttacatgcacatatttctctgcataagcacatgtgtacaagtgcccaaggagaccaggagatagtattggatctgtagagttgcaattgtgagctgtctgatgtgtgtgaaccaagctaaggtcctctggaagagcatcatgtgataagtaggctccttaaactgtctgtgcagttcaaggacctttggttttaatattcattttaggcatattcgatccaacttttcccagataatggaaataaatcagtaaaatatgctacaactacaaagtttcagccagtggaatttcatctgtagtcttagaactgacaaagatccacaatcacagtagaggttgagccacgagtctttcaaagttgagaccatatcttgccagcacttcctgaattgctgtaaactttgatggaggaagggctactgagtttagtctagtattgcccacagggatttgtacccgattagacctttctctttttgagtagttaataactgcttctgccagaaaaccagatcaaagcttagcgggggagatcagtacattggttttatcagccattttccagccacggctcttctaacactgataacagggtggtggtgagggaaatcaaatgcttgcaaccttcctgtggtgccgtcctcttgatttgtttaagaacctgggaggaacatgttcacagcagggacacctggacagtcctcgctccatcctgtcagagtgtaaagctctttctgtgaatccctgctctgactctggcaactgggtgccatgttttctttgctctgtacttggcaagtcaccatggctccttcaggacctggtcatctgccagccatctccctggccttggattgactgcggaagagttttgtgaggcttgtgtttcttcccctattatcaaggcaaagctctgctgcttctgttccctccctccatagactccaggactcctgaagccttttgtctctcctttttactcattcaaggctgctgttaacagggagaaaaagtttgtgacaattgaagtcacaattatagcacttgcctataacaagaccttggcatcttagtgctgtctctccttttatccatcacattagcagctttaaaacaaaaactaaaacaacaacaacaacaacaacaacaaaacagagcagaagtcacaatcttagtctcttgatgcttgacacatgtgaagatttccttatgacaagaatctattctggctaaatttctacagaaagacccaaaagatcatatgtttcagagccttttgggagtagggaatgtataaaaatctttgagcagcattctgaagaaatgtgttttatgtaaagtatcaccagaaatatattcttagggccaccgattctgcatctgcaatctcactagaagtccttgtctaaatggtgttcctatatgttgtacatgaggttaggaatacatggataatgccaggaatggatataggagaactgaacctttagcaagcatttgtttaccttgtagtaatggacaatgtgaattaacaattgctatatgtgggctgacgaaggacaaactataatcacatgtgaaactgcttggcctttataccgcttgatccaagtccatttctgttgtaaacagaagtgtggatgcttttgaggtcggatcaagctagaaacctcacgttttaatttgaaaaaaaaaaatcgtgacctttcatttagagattttataagattttcatagtataaaaatcctaggtgatatgtgacatatttgtatggcttaaaatgttaaatgtgtacatgattatatattgacattttgtcttgtattaataatcccttgttaacgttgctgtcacatattgatacctgagtcttttatctgaattctagcatcagtccagtgggaagacctaattccttttatagctatttgtttcataatgtggttccaagaaactatcatgggccccaagcaaggaccagctgtttaggggctcaggataatcgactagacgatataatcatcagaaggaaaagttaatttaatttgtttgaagactttcttgcagccacagagaatgccggattgatttttgttttactacatggaaaatgtgcaacatgttataggagaagaggcacatttgtagaataaattatcttctgtgtattacatcactaaattcaggagacttaaaaaatacctaagaaatttaagaggcattcgttgcatgtcaggtttacactgtggcttgcacggtcagcacaagaaaggcacataaacagattttatgtagttgtgctgggctattttatttataaactgtccccttgcctgtgatacaattttatctggtcctttctgactagaaactttgtagcgaggtgactcagctgtaaccctgtgcagcctcccctcattcacaaagaaaatcaattaatgaagggtggtgtctttgtaacttatgccatgtctctccattccactgtcacatagattcctccatagattttttaggcaacaggactccctagctctaatcctaattagagcaaattataaactttttctttttaactccaactttggcattaatcaagtccatttgcagatatttagccctgtgagatcatggctcccttttccttcatgtgagttagagttagctctgaggccatgcacattactcttatgctctgtcctctgtggtcttgcacgtttatatagatgtctctatggaagatcctcctacagatcctcctggaaccaactttctgtttcttagtttctagcttcttgcctcaattatctctattttagccttatattacactgccccatagaaatgcctggcacattatagatgtatgtatttggtgagtttttttcttcagtgaagacaggacccatatggtttataatttaatcctccttttcatgccgacttctacagtaccagtcacaaaatttggttctccagttaagagtgactcctcagctccttcttgctattccttacctattcttgatttatgcttggtattgttttttgtttcacagatatttatctgtacaaaacattctttgttttattacttaaatgttacagacttttttaaaaaaaagtatgtgcagttgtgagtgtttattactggttatcctgaagtacttgctaatgataattggtacaaagtttaggtttgcttagctcttaccctgccaatgagattaatgagcttaatgggtaaagcatctatactcttcaggacacttaggaaccaattctccctcctttcttataaggttagtaaactttggaatttcagaacaacgttttaagaggacatttttctgaatctcttttattttactgaaggcaataaaattcctgttctgtgggtctttgctaatagtaattagatttcaccaagtgagataggagattcttgtaaagttgtgtactcgtcccatttgattttatttgataagggcattactgattgtgtacttgacatcacagtgataggttattatgtgttttttcacccagtttgttcctttcaatcagagtgatgctacaggaaatgatgggagaaaatcatatactgggtgaatggccaaatgtcattctcattaagagttcttattcacattgtattcatgaagccaatgataaaactaataaatgttccctcagaagaattaatcctacagtttccagttcctacaaaagtaggagcataaacttagacagaatttctccaagggatatgggaagtgttacttggcagacctgttgattcagactttatctcatgaaaactagtaaagaataatatggtgagtgtgagtactaaaactgttttagttttgataactgtatttaaggagcactaggtggttcggatacgggactgaatcagactttagaaatgggatattgtgcagcagtttaacgggaagccattatgttatagagattgtgaaataaatgaattgttaaaaataattttactgttcaatggggcatagtgattattgcaggataatgactttctattggcaatgtaagcagttaatgtaattgtgatggtctctgttgcctcctgcctatagaccctgtcctcaaagaggttgccatcataagcatttgttaaagttttaacttcttttacataaacctcacttaatggccccttcactttcttttcatttatatatttcttctcatgtagaaaagatgctttttcctgctcaataatgtatggcccttggaatttagtggcaaatgtgctttaatttaaatcatcatcatcatcaatttaacaggcacctctggtaatatgtttttcacttttaaaaagtgtgtcatgaagcaaaatgtgtttctgtggggaacaggaatgattataagataatcacggacccggagggtatagagatgggaaaggtgcaagccaatgtatctcttcctttgacataatgattatttcataataactgagtgcctcattccagtcttctctgccagcaccatccaatttctccattccattctaccagactgagacaggaataatagaatttttgtgctaaaatataatgcaggtgattctatgatggttcagtatatattttagctgaaccgtgcatttccttataagaagtaagaatggcccattaacagatggagttgaaataatagagaaaataagttcttccaccctttgctgggctatccctgagttgatttgccaggattcttgtttaagagaactgcagtttgtgacatgacagtggtgtgtgtgtgtgtgtgtgtgtgtgtgtgtgtgagagagagagagagagagagagagagagtcttggggacaatttctccctatgagatcctggcttgtgttgaactcatgatcttatcgccttggactcctgagtgctcaatgcccaacttttcaagagtagttttcactgttccttttagaaggtgtagtttactttattaacctttccaagcaagatgctttctacattattaatacaaagaaaagcaactgttaggtacagagttatgtggttttcaaagagcgtaagtttgaggaccaagtctagatataatgaaatctcagctgcgtcttgctctgtgtatacttacttatttcgtccagtctcacatttgtttagaaatgctagaggctccgtcttgcagatacatgcatactgaactttcatgaatctttcttcccttggacgtcctattctgactttggttggagtatttggggtgggtaaaggaggggtagattaaggtagctgctaatggctttatggaagagacccaggccttgctgttctgttctgggataatgtgattgactccagctttctgacctatgtcagggaggactgtttcttgtcagccagctggaggcctctggtgagtgcagtgcatatgagcccctcactgaagccatgaccctgtcagtaggaaattacagatttattgagtctcttcaaacagatcgcatgattgcatgtccttctctaaggaacacagtttagggttcaaaaggcttgtgaggtaaagtcactagagtcacacaaggggccagcctttgtgtgtggaggttgaagtgtcacagctggaaatccagtttacactaacagtcaaccttaaaggtgcctcttttagctaggtatgtaaaatggtttcaggttatcatgtttattaattgtatacccagctgattttgaatctcacactttccgtatccagctgcctcccttagcttctcttttcaccttgctgatgggcatgcaaaactaaaagaatgaaggttttcttctcaccctgtacacacccagaaacacattgattttaaattatacaccaccaaaacctagtttgggtgaagtaataaataaattaggaacagtggaaggaacataaagcaatccatattttattgatactcctggtgatttcccttcttggcctatgggttgaaaagtgaattccagtttttgactgatgaaaaagtagtagtgtgtgcttttccagcagatacccagcaggttttgtggcccttctagtagtccaccgttgatgctgacttcctactctccagctgtatattattgtgtatacattttgtttctgcttatttgtggaatttaaatatgaaagttcacatgtagttgactatgatgttatacatcgagaacataatattaaatataaaatgtttcattatgctgttttgcatatcatgtttttattaattctttgagaatttcatatatatatatatatatattcatattcactttttatttcctccctagcttctcccagattcatctctacacctctcaaccttgttccttattttctttttagaaataagctactgagtccaatatctgctctctgtttagttttggtacaggacttccactgggatgtgttcggtctagcaagaaccatattgagaaagttgtctgactatctttcaaaccatcaactgtcaacagctacagccaggggtagaggcatatgaccctcttgctcttctatgctggaagactgtctgacttgatcttgcctaggtagccatagctgctctgattttactcaggaacacagtgatcctgtcatattacaagacacgatatcccttctatcctcctcatgctctggctgttaaactccttccacttccttttctgaaacagacccgagccttgcagggtgggatacagacatcccatttgctgagccctccagagatacttactctcatcaagaaaaagttcttggataagccctgagaggtgttctcatctataagtatagagatacagatttagtttgtagtttgaattatgttcaattagcaaaataatagtagtaactttacccatcaggtccttcgaattctctaatgatgaagtagattaaccataccaggtgtacattttctcctctgaaataaaccttaattgtaagcagaaagtgtttggttgcccgtataacattgctgctactattgcattcatgggtatgccttaccacacaggtcattgttttagctcacaggtttcatagttggtcaacattattgatttctgttttcccctaagcagtcaacatagcaccttttgttaccatgaaaattagccagcagcgatatgcaactattactttttaaaaagtgagatgtaattttcacttgtatttttcagaaaattttcctcaaattttttctcctgtgttttcttttgcattttatggcttacttgctcccctatggaagctctatcagttggacttgcttagaaatgttttgaggagatacataaaactttctgagttgatagtcaagctagcacttacttgtttctgatagtataagcctattgtgaatttttcccattccctcttttgtgtcgactcccttgtactaatagatgtgttgctttctgtgtggaagatgcaggattataattttagaagaccttttagctattatggacagcatttgagtttatgagaggagcaccgcatagattgagaccctttgttcagcagatgcacaggtgtcagcagcacaactaagatacaacatctgtgcctgcataggtagcttatctgagagtatgcagtcttaaccctgaatgatgggtggcaatgggatgcttggttaatgccttctgtgtaatgagctgtgtacactcattacctataatagtctctacagtttggataatgatgtattattatttctcagtttcaagactttgtcttctgcaccttcagccatatttgatatttgatttgtttctacaattttgccatcctttgtgctaagaaaaggcgtctgccctattagtgcctcaggctactatggcaaaataccatgagtagggtaactgataaacaacagcgatttgtttctcacagttctgggaggtgaaaagtgccagaccagtgtccacaagccagtgccttctagatctgttttctgactcatgggagaactgcctccccatgtcttcatataggcaggcgtgaggcgtatctggagcctcatctgcaaaggcaggaatcttagtcctgcctcctaactacctccccaaatcccaaagacctcaccttctgacacatcacttcaacttttaaattctgaacagacaaatactcagcccacagcccatatggccccttttacatgattttatggctttcagatgccctctgaaggatccagtgagtattggattacttccgagattatcaggtccctttttgtttgcctttgagctcaagggagcagaactgaagagtgctaccaaggatgaatctgtgtgtagctgatgctgttcaatcagtatggtatcaagctattaatgtgtttaaatcctagaactacctcttttttgccgtgtttccttggaaatctaagcatctatatcttcagtgcttctctacactgagtgacaccgatgtccatctgaattaatgttttaaagcagttatgatgagttgtgtgtgtatatgtgtgtgtgtgtgtgagagagagagagagaaagagagagagagagagagagaaagagagagagagtaacaattattaatgtgttagtaaatgagtgacaataatgtatgatgcttactttaatagttaactttcctggacactgaaagttgagtctgtgttagcagagtttgctgctctgctcaacaggtatatgcatattagccacagctttaatagtagtcaaattgttcctaactatggaggttgtcctaatacgtttgatgctgaccacttggctgcaagagactttcagcatgctcacgtgttggcttttaggtgaacgtgtcaatttttctcagcattggttgttcatttttagcatctgtaaggtgttagtattagtgagtgttttacctaccccggtgtctttccttgagaatcaaatgaactaatgtacattaaagtactttgtaaactctcaatgcttctctaaagtggctgcagtgtcactgttaatgacagagacatgttcatttaagcacattattatggtactttgcattgcatttggtttaaatctatgctggaataatgcccacatgaaaataataggaatacacatgctcacacatgcgcgagcacacacacacacacacacacacacacacacacacacacacacacacacacactttgttagcactggcatctcttctaagtcatatatcctttgtgcatatttgggtgtcttctggaggtagcaggctgtagccaggactggcctgccatgaaatggcccatttgttgtctaaaattgctttagaatataaaatactaacactttcctccttttggatttatgaccccagtttcaaaatcatgaaaagatgcaagagctcacctttgattttaaaatggaagagtatttcatgctgtaagattcatttcctaaagtagatacttcattcaaatgttgaaatgtattcaaatattcaatattcaatattcaaatattgaaatgtaagtcacaaaggagaagggagacattaccatagcttctatgcttacactgattttccaaaatattggagagcttgtctgctgctggggaagggttggttttttgttttgttttgttttttccttctatttctccagtaagtacctccatagcctgttagtggctctaattttttcaagttacagaacttaattctttcctcatgattgttattctgttatttggatcatcaaatatatttcaaaagagctcacagaaggtgaaaaatgtaggattacaaaatgcaaatattgattattatttcctattttaaattaggaatcttaaacatattttccaaagagagagatgctctgttttgaagcatcatggtttttattttcacatgaaaagtgtggttgtattctgtaatttaatcgagtttcgcacactgaatctagggagaaaacatgttggaactggatataacattggggtatcaacaattctgggttggagtataactttggtgctgtgtaatttgtcatccataaaaattgtgatggcatccaaacctggaaagtaatatttgacagttatagcaagccatatagccttatccacacaaagcatgcttggtcgcttctgtcatttgcacatgtggacaagcttgtttcgggctgagtaactcttcgtattgtatcctggacttagtcaagtgactcttgctgttaatgccatgaagtaattagtccatgaaagggtctagcttgaaactgtccttaaaattagacttgactcttctggaacttgtgttatgtgaaaaaatttcaataacaaaccagttgctccttttccctgttgattgcactatctttgatgcacttacaaatgctattccatgagcctgcggacatttgtatttcagaggttcttgtgcttcgggatagccaattactatagttatttatttgttgattcaagctaaattaaattttagaagctagacatagtgctgggtcaagagggagaaaacaagagaccgttgctagccatgatcaggataaaataccacgtagtgatgccagcttgtaactagagagaaagatggagaagctagcagaaagtaaatcagcttggtcattttggtcaaaataaaattttcagatttttagatgattttgtaattaaataaacacttttgcaagtggctttaatgatacccagtccccccaccaatgtctctcagtgtttcagatacatgccttggtatcagttgtctttcagctttataaacattgtcatgcaacctacctttnnnnnnnnnnnnnnnnnnnnnnnnnnnnnnnnnnnnnnnnnnnnnnnnnnnnnnnnnnnnnnnnnnnnnnnnnnnnnnnnnnnnnnnnnnnnnnnnnnnnnnnnnnnnnnnnnnnnnnnnnnnnnnnnnnnnnnnnnnnnnnnnnnnnnnnnnnnnnnnnnnnnnnnnnnnnnnnnnnnnnnnnnnnnnnnnnnnnnnnnnnnnnnnnnnnnnnnnnnnnnnnnnnnnnnnnnnnnnnnnnnnnnnnttgcctattcctcggaataagcttctttaactcataattcaaattatatccctcttctgacatatacctgtactgcaacattggcaacattatctaagctattaaaaaaaaaaaaacttaactctgtgtgtgtgtgtgtcctgtataagtgcagttgtgagtgtggagagcaaacctggtcatcctccctttccacctcatttaaacaaggttccttgtggtttacctctttgtatgccaggctaactagcctggttgttttcagggattctactgtttacccttccatctcaccataggggcatgacaattacagatatatgttattctgtcagctgtatatgggttctgggactgtctctgtacgtccttatgctgtatcagtacctttcacattgacttaccaccaccaatctgcaaagaaactttggaggaagccatgtcatcaaatgtaatatgcagaggatatgcatatactctgtaggccaagaaagattttctaaactatatcaatgatatattgattcatggttataaacatttaaatacagtaacctataaaatttttctgtctaggtgactattgtaaggttctgtgaccttaagaccttcttcaatgaaataaaagccatcttattcattgctttttcctacatgcagcatggagaatgaaaggcattgtatgaatgagtctctttcctttttaacttcataagctataacttctagtgctaaaaagtaatgtcactaggaagtttataatcttttcctgaggattatgactttcacataaatgaatgaaaattgaaaatgcactgaatcattcttggaaaatatatttccaacttctctctctctttctctttttttcttctattctcaaggatttatttgaaagggtctattttatttttatggaaagaaagagaattcaaacttttaggaacacagcccatgaccttctttattcaactactgcaagtttgtttcacataatgaaaccattgcagaaatacagccaacctgatagtaaactacagatttgcccgcctttctccctagggatgggcttggtcaggtgtgtccctctggcctatatctatgtgaactcagtagtatgtgaacagtaacacgtaatgtttcagtttctccaatgacttttcagagagctttcctctccatacaggttgtccacaagctgtccagatctaccagactcttacaccttagcgcttccactgtggtgtgtgtttccatggtggtcagtattcttggcagtgtcattgcaattgtaaaagaagtctcatgctgggaactcagcctattaattggagcctagaactctgagctgccatgtctatttctcaatctgccatacagcagttatctttttacttgctccatcatgtgagttacctgttagaatccatatgtccgtctctgagttcctgtgttgcctttttagagatctgtaccattactctgtttcctcatagcttctacggctccttctccatgcagggcattttctgtgatacattctctgtagttggatgtttttcataagcctcttattttcccctcatgttgttagcctcttatacactattagatactgggtatgaatagttgtcttctatgcaggtataaatgctatgccaaaatgacaggagataaactcagattttaattccatgtttatcctttttaccttttacaggtgccttggatttttgttatcagttatatctgctataagcatgggcattgttaaaagaagcaaagtacagctattagctaattagactgcatgattaaccttgagatttcattgagatattttgaccttttcagtgtagtcaaatggagggtgtaattattaccgtgtttccacttagtcctgtttatcaatctttattaaaatatttcaaacactttcatgaagctaatttccatctttcagaataaaataaaaagtatggtgctttaaatatgctactaaaaaataaaactggacactttagtattaaggaggggatttttattttttcactactcctggctccatgtgagtcctcagattatattgtttaaatcattcttaatcctaattgatttctagggaaaacatattctactcattatccgttgccacaaggtcattgatgagctcctaagcagctaagtgtaaatctgcttccaggtcagtctcgcagttctgagagctgagactctgaacgaggctagtccagtcagctgggttgtttttgatgatctgcactatggtgactattaaagatgaacttaactgccctatcggtaaaaactaaattaagctttttaagtgaagggcacagaaagctgtcatttgattccccagactttaccctctttctcttacagggaaagtttatatttaaaccacaaattaaatctaaataaattctctgtagaatatttaggtattcatcttaagaatttaccttattttccaatttgggatttgaaaggcatttaaaactgctggacttagtggagcacacctttaatcccagcactctagagatacaggcaggtggagttctctgggtctgtggccagcttgctctctgtagagagttactagacagcccgagctatatagagagactccacttcactcaagaaaaaaaaaaaaatcaaataacaggtaggtcaactgagaaacctagtctggtagatagaaatatctgtatggtccacagtaaataaataaagtaaagcagccatataatctagaactcctttgcttgtggtccacaatggaagggcagtatttgtttccttgcaggctgcctgaagcctgtgcatgagtaagtatgcttgttgttaatgcacttttgattttgccaataagctttcaatcctgcaatcttcctgttgctactacactgactgtttttggttgcagatcaatcacatcctctcttttgtaaacctatcaaaggcattgctgttctgtaaggagaaagggcagacccaccagtgtcgctgcaagacaaggcccatcttctgaccactgttctctgtttagtttatcgtttgcactaactgttaggacatcctgttgtcagtctttcagaaatgggcctgatttggtagatgatgcccctcacgccctttctttgcttcaagttttaacattctgacctggaatcatttgcaatcagtgctttccaagtagaaaatcattagtgactccctcccaggtcccatgccattgctcacatgttcatagatgggtgccttctggtgattgttctctatgtgcctcctgcctgaaatatgtaccttctggtcactgtgacttactgtacttagaaatatttttcagaaaggactgctgcaaaggactgtcacttcctcagaagctttttgtttctcactaggtggacacattttctgactcctttgaactctgttatcctctgaccttgtttaacaccaacctctatgtgtaagattgctgaatatgtttttgtcttctgccacactgtgactctcttggggacaggaatcaaatggtagttattaaaattttagaattcataaatgttcaggtaaattaatatataggccatccatgcctgtatttttgttgtagctgggtatctaatgaagagactgcaacttctcattcggcttctcctctgctgattggagcacagtctagatgggtggtgcatcatcgcctatgtgggcatcacagcatttccgaaccattcccagtgtcctattgcctgtaggtcagaggactacatcttgagagaatttgctctgctttctcgcatgattctccaccttcagcatctatactatgtattgttacttgcccatgtacagtatcaatgcaaaggtgcagtaggttaaatatttcctgaagacactgggaattgcctctgatctccacaagtagtctatttctttgaggtaccagaaaggaagtaggtatgtttctgctctttgtatatgtcattaaactatgcaggtagtcaatgtggtatttctcactttcccttacttccgtttaaatcctaccagtaaaattaaggatttctatcctttggtctttcacccaccagatttaatctacaacctttgtttcatgtagctttcacaactaatctatgaaccagtctcagtctcatatttttggtagattcttttaagtctttgtagttgtatgagcagaggcaaggcatgttttaccttcactattataatttcttaaaccttctgccactcatatgtctactttattcgttgccataggctagttgtatttatcacaaaggatgctggctttgtgggccattctgttcttgtttggattgatcccttcatgaatctaaatattataaatagcaacatttcctttgattttaaaacatttatttctaagattaaaagtcaggatttgttccacacaaaaactatcagcatacctctaagaaattaatttaatcataatcataactgttgtaccttcatggtttttccaagattctaattgttttttgagagagaatcttgctatatagtcctggctgtcttggaacttgcaatgtagaccaggttgacctcaaactgaatgaaacctgcctgcttttgcctactagtgcttagattaagggcatgtatgagcaagctaggcttccaaattcttaaattcttaattctgtatgttgctgatttatgagatatgagcctatcagatatttatttcaatattttgcaaagaaggaaacgagccatgcatttttagtttattcatcttaaaaggcttccttaattaaaagtcaatacaaagtccacaagtgtgcttttgggtttacccttcatgtttttaaacgctaaaatcctggaaagcttcccgttacatttcctttgtcaaaatggtgtagaatgaattgtttactgcttcttatggttttgaactttgaatagtcctttggatagctttaaactccaacatcattaattatataattgtgtttaaattatttaataattatagtcaagaatgctactttccttgatgattgtatactcagaataaagtagaaagataatttttctatccttaatttcaactaacaataggtactctagctattctgtgaagttttgtaaaaacctatccttaccaaaatcataatttaattctagtgaagtaaaactgacagtaccatggatattatttaattcttaaagccgtatctttttttttttttacactatcgtattctttacaggtgttccctctccccccacccccagacagagtttcagtatacagacctcagtcttgggtcattctcctgcttctttcttgcccagtgttagtgtgcaccaccacaacaaactcctcctaactggttgtgataaaacgattgactattggtatgcttgactctgctgtgatgggatgagtttagcttgtgtgttaccttcagttacagcccatcacctagtttacttaaagcttacctttcctccttgtgcatgtaattctatggattccacatgaaaataggtatttacctatgacagcacatgttgaacttctttttttttttttcttaactgaatcatatggttctacattgaggcccatgagacatgagaatcacttaaaattagcagacagcaggcttgctgtgtagcaaaataagctttttttttttcagatatagttgtgtgagaatagtgatatacttctgctatgtgtaagattggactgttggtgttaaaacttaaaaggttctacttgtagattgtaggaagacaaatggtgcatcttggcaagtgagggaaaatagtactgtaattcagtgttacggtgaaagaaatagaaaccttaaccagtcatcttttatttttagctcagacaagtacctataaaatatagcccagatggggaagctatgatagtaaagatacggaaatgacattttgctgatgaattttctcctgccctttacttcccatttttatttttatacaaaatcttttatgctgaaagttgcttgcttatgtgtccaaggacagatccacagaatgaacactgtctttttcctttttttcttttttcttttctttcttttttttttcctttttgtggtgtgttctgatcatgaattatttcagtatacatttatttatttatttatctatttatttattttggtagaaattcattccattctcctctgctaattgtcattctggttctttctgtattgcaaaactccaatctaaataaattaggatattctttgaatagtgtatcatatttcatgcttacttctgaatgtatcttgttttgtggttactagtttctttttgttgttgctgattgttttgatttagtgagacagccttaatatatcacctttggtggtcttaaactcactgtgtagacaagaatggtgtaggactcactatgtagacaaggattgcctggaactcactatatggaccagacaacactggactaaaatttactatgtagacaagggtggcctggaggttgctatgtaaacaatacttgcctatagctcactgtagacaatgatggcctgaaattcactatatagacaaggcaacacttactctatagacaaaactggcctgacgctcactatgcaaaaaaacattggcatatatttcattatgtagacaatactggcctgaaagtcacttggtagacagggatgacctgaaattcaatgtgtagacaatgtttgcctggaactcatatcctgcctgtgcgtcccaagtgatgaaattaagccctggctagctctttaggtttgttttctgagtgcatcttttgcaggctccacctgcccatttgcctactgaagctgtaactgcctctacatatatcaaaacgttgatacagtttgttcagtggtctctaatctcaggcagtgtcaccatgattatgccttgaattgaagtgagaaaggaacccaggaaggatacataatgattgagatgtgagaaatgcacagtgtggttgtgtgatctgtaatgcactgagaggtgcctctccagtcttagagcctcctgcactacctcttctgcttctcatcatccttgtattctggttcttcttatgatacatcagtctcctgaggaggtcatggaatggatccctgatgccttgtaaactgtatatgatttctttgacagcctaaaattcactatatagataatactatcctcccagtggccacatgaagtaggcactaggatttgaatggaagtcagttactcagcacggaggctctggcatttcaagctgctgcacatttgtcttgcatggatctttgtgtatgtatatgtgttgtgtttgtttgtgggtgtgtgtgtgtgtgcgtgcacacgcacatgcactcatatgtctgtgtgtgtttgcttataagcatgatagatatataaaataatctttgatatattcagggccccaatacaaaaacccttgacagaatgtagatgatactgtttcctcaaaggtatatttgtgataggaagaccgactgtgcagagaacccaaagacttgtatttatttcatgaatatcattaattttcaatggaagttttaagagctcttttcagaggtgaaaatcttgtacagaacactgtttatcacattgtgattaagaaatcatatctttgtgacctatattaactggtgatctatattaacttgagctgatacatactaaaatttaaaagtccgttggcatctttttttttaaagtgaaagatttggggaaggaacaattgacttaaataactaataagtatcatcatgaatgggaaacacttgagcataagctgtaaaagtgattattgctgaatcacttaggtttttctcaagcctttgttgacactgttagtgacagccaattctctggctcacccgaagcccagcaatgcactgagcttccatgtttattgcagtgtgcagtctttggagggactttccttcaggcctttcctttaaacagtctgacatatcagagataaattctacttggcctttccacccctcagtagtcattattgtttcctgcattctgcctatagctttgactttcattgttttaataagtgttgaattgtttattgaggtgaggtggttctgtgcatacagttttaagtcacacaataaattcaaatcactattatactagatagatggatcaaaagaccaacaggtgataggatgagaggatgtgcactcagtgctgtgtgtaaagacaaaaaaatatatgatagcacataccctggttattactgtttggcccatcctagatccacacaatagagtgtttagttgactgtctctgaagccctgattatccccttcagactgttgcggtaaatttttccaacccaaatatgccctggcaatgaaaacacaactcagttaacatgaatacacgctgtgagactagattgggcagatctaccattacattaccatcttccacatctatgagaccccttagaacttgcggttactaaaggccctgtgcttctgctctgcttttcttcttcttcctcctcttccgtatcatctccctcttacattttctccttctcttcccaccttcctctccaccttcccttttatctgcccaatcatcagctctcctttattttacaaattaaggtgggaagcaggtttacaggaaatcacctgagtgctgactcattcctcgttttcagccactcacaggagaacagaattatcaaatataattagccccagggctatccacaacatcagacaattaaatattgatgggaagtttgatagactagtctttctaaggaaaagtggatcgtaaatatatctaaaggaaaatcaccagttttgagtgttttatgcagagtcatgaaatgagaagggtgcccaacaatcaaaatgggaaaagctgagatgaagaaggaacaggatggctcaggggttaacagcacttactgcatttgctaagtagtttcagttcctcatgattatcatggctcacacctgcctggaaccccgattccagatctttctgctggcctctgaaaccacaggctcacctatgtagtccaaactcaatgcagtcaaacgcttatacatgtaggacaaaaggaaatcttaagaaaaataaatttggacttgattacctgccataaatgtttcctcgattcagttggcatttaatgagactacgttaattactctcccaagcagcttacacccaaggaatggcgctgtatttccatttccatgtacttaatatatgctattgtcaatccaggggcacatctcctttagatattaaacaaatggctaaaccaacagacaggaattgttaaaaattccttggtttcagagaacgtcaaggccttctcttgagttatttttacaagttggattcttagaagggagctattaccagagctagccagcaagctgaccacacatgccctgacaccttccactctactgttactttctgctaatctttagttgaaaagaagtgcaaactgatcctgggtctgtagttgctaccatggcagatgattggcatcaccttttcttctgtgtttgctcatctttacatgttcaggatgcatgctattcatagtagagggcagataagattgctcactgaggaaaggtctttgaaccaagcttgacaccacaagctccattctttttattttttctttttcttttatcgaaaatagttttcccctcatataatatagcctccttctctcagtttcttctcatctcccctcccatctggatccatcctttttctatctctcattagaaaagaaataggcttctaagaaataatgataaaataagatgaaacaaaagtaacactttagagtcagagaaaacagacaaaccaacagaaggaagagagctggagagaaggcacaagaaacagagacacagttttcaaaaatccaggaatcctatagacgctatactagaagccatattatatccacaaaagacctatcagataagacagaaaaaagacagaaggaaaaaaaagtataaataacataagattaaaaaaaaaagagagataaatttaaggggaaaacaaaagaaacagcctgactaggcagcatgagacaaagctaccacagacttcattttctattggctgtttactgctgggcatgccatggacctcattgtccattggctgtttactgctgggcgtgtttgtatacccactgtggctcgcttagagggaagtgatcttatgaatttcattctaaacaaaagggatggtctgcaaattttacacatatgcatatacacatgagcacatgacacccccccccccaaccacgcacatatacacacaaacacacatacacatatatacccgcgcacatgaacaaatgcataagctcagacacatacatacacaggtgcacacacatgtacacacacattcacacacactcacataaacaagtaaatgaaagtaatgattttttattttaaagaaaatatgcttaaaaagagactcaattcttgaatctttagtttccagttaagatactctacagaagatcctttggggcctatcagcagaaacggatgacttaccgtgttttaactattcaagggcaggaattatgttctcgtgattcctaaattagtgtggtaaaattatgtctaacggtctcaagggagcatcagtttattatgtcaacaaaattttatgctaggtaaaatgagctaaatacccaatcctgcctttccctaagctgcaaaagagttaactagaatccactgatattaggtcgtatctttctgctgcacactgatacatgttttcatctctgactaacaagaggattctaggggttctgccatgatgtacagagtatgaactgtcagtgccccaagtgaccttgtatttcactaaaggagctaaacaacaacaacaacaacaacaacaacaaatttagttttacagggactgaagaagtgagttggtagatatgggtaattgttgcacaagataggacctgagttttaatctttaccttctgtacagccacacacatggctatcgctcgagtggtatgtgtggtgagataggagatttgttaggcttttctgagaaacagctagctttggttaaatggatttttagaataattttacgttggacataactttctacctacaaatgctgcttcttctactatagtcatcccactcagatctcccagcatcctcttctactatagtcatcattcttagctatcccagcatcctcttctactgtagtcattacacttagctatcccagcattctctgagtaaacttcagtataccaagccatcattcttgtcaattcattatttcatattaaagtttgatcatattgtgattttcatatagttttaacattttaaataaattctttgtttatttttactgtagccattttgtgagggtgtttaatcaacagaaattatgctaacaagttataccacccggtacattttggcggatagttcttcatagctctcagcttcagtttgccctgtaatcacactagctacagtgttttcttccattttcttcttattccccttttctttctgacatttggtgaattctatactccaaatattgttccctttaaaaaaaagtgggaaaattaaggttctcctctaatcatacattctaaagtttctcgtcaattgaactgtacattcaatgttacatcattatccattctcactgtgatgtcctcaaatatttcctatcaagatgaatcatctccattaacatagaaccatgcttagggatttctcctcttaacaacacaaaacaaaacaaaacaaaacaaaacaaaacaaaacaaaacaaaactctcctttgatgtcatatgttcttagacccttcatttaattcctgtgtattcactcatgcttcttttagaaggtcaacaccttttctcctgtggtcaagtcccagaatggtttcagttctgctagctccatctcagccctctggcctccggggcacagaatgctttacagctcagtttgtccagtagttgaacagtattgattgtgatagcttccctgcttctttcaatccttgatctctctttttctccaaggtagagttgtccttttacatcttgtagttaatgctatctgtaaccttgtccttttccactcatctactttgttcccagaaattctgagacttaataattcataaataaatgtcgatccaaaaactttgtttgttccccagctagctcataacttaattatccatttattctattctaagtcctgccacatgactgataattttatcctcagtttgactttgtcctcagtttcatgtgaccatcttcttctgcgtctggagtgagtctccttcattcccggctctcttcccataaacccctctctctgctggatgccccaccttgtaatcccacattggccaataagcttttattgacaaatgaatgcttttgtacaatgtataagacatactctctacaacatccctacatatttatatctctttcaggttcttgaccttctcttcctctttaactcagtgccattgaggtagacagtacgggggaggtaggaagtcccagaagctcaggctttcaggggcaataatgctcaaattcatgtgaataattctagtattggggagctgaagcaggctgattttacatttgaggtgattctgtgatgtagagttgagtctagcctaccttgtaagacagtatctcaaaacaaaaatgaactactaatgtttatgtaatgaagcttacataaggaagagaagtcagcaatacaagagtgatttaaattgtttgtaagacggtagaatttgaagatcaacatccacacttaaatgattggactttgaaagtcttttgtgtgatgagagatatgagaaatattgactgttgaaaacttctgtggttaggagctttagtcacatttatatggatttcaaatgaccagtttgtcattatttcagtctgcccctttataaatgaaggcaatggctaattagtgcatttttcttttacactagcacagtttcctatttaaaagttcaaatcacaaaaccacagatttaagattgtgagagtaaagtgtcagattattttgtattctttggaaattgactgtgtgcttcatgttttgaagagagaagattaggaggaaatttgacatcgaagcatttgtctttaaaagatgccccccccccccatatcgctgcaatggcacttttcatatacgagtctctgtaggccaggatttgtgctgtttcatattcattatctcagttaatccttcacaaagctctgaggtagatattaatagttcctgctataggagaagaaactgaagtttaaattttatatgagctaaagctatataagttaatttatttaagttttttttatgattcgaagtgataattaaagaacgtgaattcaatatatatctgagttgggagcttgagcatttacggcaaggacatagtgaaggaaaattacgagtgaatgttattctcatttctctagtgctcgcagtatcttacatggcctttcatacattgtttcatcgttttccttataccattcagtcttcacagggatcttgctttttaagtggatcagaggtgtccaggtgaagaagctatacagcctcattttcagctagttgtttgaggtacacagaacaccaaaccgaccactagatgcaagcttgctaacaccaagtttggcaatcatgatgtgagatgtttcctcctctctattaattccatttgcaggaagataagattgtccttcttctgtagggaataccactttacactctcccactttaattcaattcatttatttagttaataatccaggaatgttgctggattagcagaaatgtgattagaatcatcaccttcagtatttcaggtaatggagtggaggagaaatagcacaaaaggcagaacccatgcaccccatttccagggtgcctccaaggacaggttcacactgacatctggcgtggcttctattgctctcctcttcctggaagccccagtcaaccacttgacacccagcattagctctgacccgaagatcagcctcagcaagctacataattaaactgttgggatttgtttcccctgactggacagaagagcctcccaaggtgaggactgtgaagtgataatgctgattctgactttaggagggaaggaacacgagcgcagaaatctcttgaagcttctgttaatgaggcacagacggtacttagtagagaaaatgaggttactagaaagaaaacttacccttttcccctctttgataaagagccaatcattgcgccttcttttgaatccaggcctaaatttattgtcctgaataaacctcattttaattaaacaaataagtttttctcaagggtgtagtaatcttgcttaaagtcacatttaaggggaacgaggaaagttagagtattaagaagtagcactaagctgtgtcttgagaagttgaaatccttgaattggttccgacaaccacaaactgaaatagctacaatgattagccgtttgggatcctgtgctttatttgttaaaatatgttttaagaagccagtattatgttttctttgaatacttactctccttgaaacattattcaagcaaatcaaacttattctcccaggatctaacttcactgccattgcatatagatactacaataatagtcatgatgaccatatactactatttaaatttgatcataaaagtgatattatacacctataatattcatgttgtgtgtgtggggggcttctgatctctgtgactttcggaagagttggggactaggacagcttaaggtcctagcatggccttccatgcttacaggccagccctgtgtctcggtgcctccatgaaacattatttaactgtttatattctgttttctatttcttaccaaactcacccctgttcatgtctcaaaccaatggagatgtgatgacattcatactaaatacatttgcttgaagaaagaatcatgtgcctgtgagggccccctctcaccttcactcccaattccgtgctcatgaattaactgtctttctctcctgaaaccttttttccctcatataagaccacattgtctttcagtttcgctccgttctagtgaattctatagtcacaaagaacacagtggaaacagagaagactgaccaggagaggttgtggctggagtggatgaaataaagaggaaccacatattcctgactattttttccccatttttattgacttttggcaggtgcagggatatggcaaatgaatggggtttcatgttaaaaactctgtcgttctgccccataatatctcatcagtgtactcattgaaatggcaaaaattttttaaacaatttaagtgtatttaaacgttagattttttttcaaagaaaactaaagcctaaactctatttcagtgaaatcccctggacctgttggcttcttcctgtcaggaagttatctgatgaacttaatggaaatccactccaggctgcagggcctggtgcagtatggctccctctgtctcttcctgttctgaactcattttaaaaatggagtagtggaaaagtatatagctatcttaatgtggctgtaggaagagtcactattccagttatgagggagaaacggtagctggaggccagtccatggtattgggaatcatctgggctctccagtttgtgtctattagatggacagatagctgctgtgttctgatcattgtaactcagctgatttaccaatcagtgttttgccagtgctgacatggccaagcctcctgggatctctttttccctagccaccaggcctgggtccagctctgttagaattcctgctggctcccttgtcagccttgacttccatggcagtgctttcttctctccccttctcttcccttcccttctcttctctgcccttttagtctgccatcttgccatcatgttagctcttagctcatttccttgcagttcagttcccttctcttctgacttacccattcttcctcagagctgtccagttatacatagctaagcactctccccctgtaggtgtcacagggaagtcagatttgaaatagtaaaatgtatttggtagtgaccttgaccttcaagtttgtgtacagtcctttattactgctctgacttggttcccatccgtcagccagtagcctacactaaaagccattgacttcatctgtgtttctccacacctcctgaatcagcatctctgtcctgcctgtttcaatataattattatcttttccctttggttatcatttaaattctatcatacctactagaaactgcctgtttgctccttttggatagtctcccacctaataaccatgtttttccattagcctcattttatattacattgttactttaaacataaactcccatagcatttcctaaagtggttttcagaataattcacaaataatctatttaattccatgaataaaggagtcaagtagaacattgaattgctgaatactaaatctgtttttttttcttggaaaattgttgtaccacacattattttaagagaaatgactgaatacaattttgttaaatataatgtgtgtgtgtgtgtgtgtgtgtttgtgtttgtgtgtgtgtgtgcagggtggggggattggtgtgggtgtgtgtgttgactagagcaacaaaactctacaacagagcctctataatttttttttcctgaaaactgataatttgggacttttgacaggttagtgtcctgagctaattggcaaattatcacaaagtatcacaaaatcttgcaatacttgctagtacgtgcttaagcatattggaactttgtgaacacagcagtttagttactatgcaaactctactatggttatatgcagatggcttaagaaatcaaagtctagataaggtatagctaaaagtttctaggagaaaaaaaatcggattttcttttagggcgttataactatcatctactgtggacattctttaaaagtgactgttgtaaatgttttctatttcttcctgacaggtaatatttgaagctgaagtctcaggagggagaagtggttatattgccattgatgacatccaagtcctgagttatccttgcggtaggttttgattaagagttgtatttttctgtgtccttttaacacatggccaggactggcagaggctgttgatcgtttattgcctggccattgttggccattttgttgttattcccagccttcctggaatagaacaccaaaatgcttagtagaattttcaaatcaaggatttttcagacttccaacgacatgcatgataggattctttcatttctttttgattagtgaaaacaaaaatgtaagtgcaaacttcattccagtcagatgttttaagctgttgaggtatcttataattctataggggaaaaaaataaacaaaaaacaaggaacaaatctgagttcaataacagagcaagcaaacgctgccttgtatttgatctgctaagtttatactggaagaaatgaagaaaatgaatttactcaactcattctgaatttaggtctgcatttttttattattattccaaatgtctgagttaatcagtattaaataaatgacctcaaattcagtctgggttaattgactccatcttgtgaggtccttgttcaagcactcattgtttctcagacttcatacttaaaattgtgcttaaccacatcccccaaaacgactatcgctatcattcagtagggtcaggcagaatttacagacagcagtttacacttccttcatgatatgatttcccagcagaaaaatgtgataagtcctgtgtaagaggacttcgtgttccatagtcctccatggtgagccatttctaatgcactgaaaaaaaaaggatttatgatgtcagcatgttgggagcaagctttgtaccgcaactgagtggttatatcatgataacagagaacacttaggctggctcctttctggataattgtgtctagactggggcctgtgtgtgatatgcgtggaacggtcacaacctgatcctgctccaagttcaagttagcttagtaagcttgtttattccacagtgcaactgaactttatatctctccgccttccatgtctacacctcatgtatcagatgacaaggaaaggcttttgtgaatcaagaaattgatggtcatgaattgggcagaacagtcgccgttccagggtgattggtctcttgaagatgtttctcattgttcatattcaccaaggcttaacttggcctgtgtgtatttttcttcaatggtaaacacttgacgggacttcagattcagaaggaaatttgtaccaagtactgattggacagtcaaatcacccatgcgaaactatgtgactacagacatctcctttgttgctctgatcattctttggataactttcccatggctataagcaaacaggaaggagatactccttttcttttaataaacaaaaatgtcttctctgatgtacagctgttaaggttttttaaaaaactgaaagaacggtcagcttgtgggtgtgtagttaaatgtccccatagctgtcagagtgtgagatgtctttatatgcaccaactctgtttcccattagactctgatcggaacttgtttcatcaagcctgcttactttgatataactgttattactatgcattaacctatgctatggcagctattagaatatgcgtactagctctgcagagtcactctgcatcgatccatctcgaaaaggatgagttactttgtatgagacctgttaagaaggaaaactgtgagtgtaaggtaggaagcagcgtggtctagaagaaaggaacgtcaagttctttctggatattaatcttaagggtaggcttattaagaatgatattcttttgtgacaattagcatggcatgtcttttcttgtgaacaaaacatgcatttcccacccacccccctttttttaaacagataaatctcctcattttctccgccttggtgatgtggaggtcaatgctgggcagaatgctacatttcagtgcattgctacagggagagatgctgtgcataacaagttatggctgcaggtaaggccctgtgagctgctgagctaaagggatcacttggtttaaaaaacactgcattgtttgtggttgtgacttttctctctcttctccccgtttctgtcccatgcacaagggcaggctatttgtatgcgtttgtttggatgactggagattttaaacacacccttcacttttaaataatccaactaaaaatgcatgtaactaattgatactggccttggggtctagtaacactcagtgattccctagtgtcaggctggaactctaaagaaaaattctctggatactttggaaaagcagtaaaaatgaaaatttccttccttccttccttcctttcttctttctcccccccccccctctctttcttttcttttcctttttttttttttttttgttgtttcttttttgttgttgttgttttttcgagacagggtttcccctgtgtagccctggctgtcctggaactcactttgtagaccaggctggcctcgaacacagaaatccgcctgcctctgcctccagagtgctgggattaaaggcgtgggccaccacgccccgcgcaaaagttttcttaataaatattttgaaaagtgaacttctaagaagataatatttatgtgggaactgccagacatttttaggataagaaactaccatggacacacacacacacagagggggagagagagagagagagagagagagagagagagagagagagagagagagaatgaatgaatggaagagaaacaatgtaaaggtttctttgtttttgtttcttttgttcttttctttttttctttctcttttttagaagtttgtgtataagagttgctagtagatctcacatttgagtatctcccttgtatatgttaagtccttaatacctccttatttaattgattataattgacatagacgttgttggagaaatgtatatgtcatgaagcttccagggcatcagagaaaaatctgtagaattgagaattgttttgccctcgtagaacgtgttaaaggtgttgctgtcactgttaggtgctggaaagagggtcacggtgcaaagtgtgtgccaagtgcattcctaaccccagaagactggagctaggaaagttgcctgtttagctgactgtttcaaggcaatttttttttaacaatgtctttagcatctagacttccatttttcttctctgtgtgtggagtttaaataggtcgtgtgtagatgtcatgagaggtgcacatcggggatcttctttcattgttgtctacattgttttgagaggagatttcccattgaccctgggaaagctttcacagtgcctctgagctggaggtttgcctgcctttccctcttcagcactaggcatgtgctgccatagtcccctgtctgttggtgatttttacccacccctgacctgttagtagcctgtttctttctgcatcacggtaaggaaaaggctttagtttctttagaattttaaatacctgagaatcccaggacatttctaaaagacaaacctttaaaggtcaagttagctttttgagcatggacatcatgatttacttttgctgcatccttcagaatagtgcagttagtgctaggggtccttattagcttccccgtatttagggatgatgcttctagtgcatcatcattaaaagcaaatttagtataatgtctccaatgatggttacagggattataagtgtcacctgattcctctttcagtccaatgagatatgaccagagatgtacctcacattacattagcccacaaatcactactttggtaatttatttgatttgtagttattataatactttctgtttggcccaaatttgaaaagaaaaaaaagtgttttttttttctcttgtcatgttaatttttcctacctatagtttttgggaattagaatatttgacccaagagcatattatataagctacagtctatttaatgctgaacccattttctcatactttcagtctgtgagtggtttaaattatttcaatcctatttcctcatttttttttatttattttttttttccaatgggaacgttggttgatatttggtcttagctctgagtctggtcagcccactcttcaggaagcagaaatggctcctcagccagccactggttttatgctccaggatttaatgtgacattgagataaaaagggtctgtatccgaagacaccagctggcttgtggcaacaaagcccttctggaccgtgctggtctgagtaggctgccgagaaaacactgctcattttttctcgtttcctttccctgtggattggctcatttttattatggtcttttgatattccttctgccattttctgagcagtgctgggagaaaatgctctcagagagttttactctgtttctctctcccctccttggagtctcggcattggctgcacaaggtgattttgtgtttgtttccaacgttgacatggttgtcacatggtccccagcctgcacattgcatggtctccagcactgcacaagtttaccttgctactttctcaataatgccacataaatttccttaatatttttttgtcaaaaattcttctttacactccaaaaagatattaaaatataccatttacttagtttagtcatgttttcataaaaacatttttaattaaaaaacttatatgtgtgttaacctttgtcattttttgagacaggtctcagtgtattgccctgcctttcctaaacctcactgtgtaaatcaggctggccttgagctcacagaaatttgccttcctgggcttcattagtgcagggattaaaggcctacacaggcttattttgcctttttgtatgctgtggatcacattcatacttggttctgcaagccaccagaagagggaatctctgggattggagttataagatagatcaatgtcagctgttatgtgtgtgctggacattgaacgcagtttctcaggaagagcgatagtgttcttaaccactgagccatctgttcagtccctgaaataaaacataaaacattttcgtagtggcgatagatagcaattaatcacattggactgactgttccttacatgtgtatgagacaaccaaaaactgattattacttcaaaaactattcatcctttgcccaaagtcgtaaaaccacaggtaaacaggaagaactgtggtcccaccatggatgcctctactcagtcgttgaaacaggtaccaaattatttttatttcctatagaggacaacatgcgaggggtcgggatcctcaactctgactgcatttctacccttttggaacctagttaatcgtgacaggcttagatttcattggcccatctgggcctgtatttccttatctagaaaagaagatgtttggtggaaactaaaatcccttccacctatcacatgttaaattagggctctatattatttgtgtggatctgaaacatgaccttaatgacctccttttatttgatgaaataatgtagaaattttaggctattagttttatatgaaaagaaaggagctcttaaattaactttcattgtaagaacaagtacggaaaatgtctgcccagagtccgaagaaggaatgtacttgaatccactcagttaaaggtttcccattctgtcagaggaagtggaagagtaatagggcaactaccatgtaatagtaatagtaatagtaatagtaatagtaatagtaatagtaatagcaatagcaatagcaatagcaataccaaaagcaatagtaatggtaatagtaatggtaattgtaacggtaatggtaatagtaataaatagtaatagtattagtaatagtgctctaccatgggacaggtgtaataataagtgatggacatcctcctaggtcctccacacgatcacttggtagtgcctcagttagcagaatggcttgatatgggctaaagtaacaaaagctacagtggcttccaatactcaaatggaaagaaaaactacttgccacacccctccctgaaaggtctttacctgattcctcatcatagttgtcctttcccgagttcccgtgttcaagtacacctgaagcacacgtttttcctctacgtgtagtttgcaggttgtgctgctcatttcatctcagtggggatgcctgttaggtggattgagaggtgatggagaacataggatgttcagagatattaaactaacccacaacacttcgcaacctcgctcatgagggatttagatagttaggtaattaaannnnnnnnnnnnnnnnnnnntaaccagaaccacagaatcttcacaatcaaaacagcaatggccctgaaaagagtctttaattttccctctgaaatttcacaagccaggcctccatcttctgcactgttttcaacattatcttacaagctcctacacaacatctgacagagctcttaacactgaatggatcttctggcccaaagttccaaagtccttccatagtcctccccaaaacatggcctggttgtcacaggaataccccacttctggtaccaatttgtcttagtcagggtttctattcctgcacaaacatcatgaccaagaagcaagttggggaggaaagggtttatttggcttgcacttccatgctgctgtttatcaccaaggaagtcaggactggaactcaagcaggtcaggaagcaggagctgatgcagaggccatggagggatgttctttactgacttgcttcccctggcttgctcagcctgctctcttatagaaccaagactaccagcccagagatggtcccacccacaaggggcctttcccccttgatcactaattgagaaaatgccttacagttggatctcatggaggcatttcctcaactgaagctcctttctctgtgataactccagctgtgtcaagttgacacaaaactagctagtacaccatctgcataggtttgaggctagcttagcatatgtgtcacttaactccaaaagggcagagagaatttaaaagccaccgaccaacatgctgcctctgcatctttttacatattgactcaagagatattaaggcacttcttaattaatatattaagaatgtctataacatatttattcataatatttaataacttaaaatttctaagtatccttaacaggagaatttatcaacaggttggtttgctttcaagcaataggatactgctctagtgtttaacagtaaaaacctgaactgctggtgtgtgtaacagtacacatgccatggattttacatgtatggaatgccaccaccatgtattttaaataggggacagaataaaattaattcagtacatatgatcacctttgcattaacttttgaacacagaaaatgaggagttaaaataatggcctttaggaaaacgaaaggctgaaggaaaggctatccagagactgccccacctggggatccatcccatatacagtcaccaaatgcagacactattgtggatgccataaagtgcctgctgacaggagcctgatataggctctgtcagagcctggcaaatacagatgtggatgctcgcagccaaacattagactgggcacagggttcccagtggaggagttagagaaaggactgaaggagctgaaggggtttgcaaccccatattaagaataacaatatcaaccaaacagacaccccagaggtcccaaggactaaaccactaaccaaggagtacatatggagggtcccatggctccagctgcatatgtagcagaggatggccttttggggtatcaatgggaagagaggccctttgtcctgtgaaggctagatgccccagggtaggggaatgccaggacaaggaaacaggagtgggtagatttgtggggggatagggggaggagaatgggataggggatttagggaggggaaaccaggaaagggggtaacatttgaaatgtaaataaagaaaatatccaataacaaaagtaaaacaaatattgaaaaataatggccttttcatgactttttaaacatttgtttattttatgtatatgactattttgcctgtatgtcgttatatgtataccatgtttatgcttggcatccatggaggtcagaagagagcattggatcccttggaactgtagtgacatacagttgtgagtcacattcttggtgctaggaagcaaattcaggtcccaattgcctttaagtgttgagccatttctccagccccaaatcctggtcatgtataggaaatgtgaactagactggcactgagcaactttctggggtgccatgatcatgaaagaacgtagatgaaactttgggtcagtgggtgtgctcctgtaatacaacagttaacacctgctcaatgctacagtatacattttaactaaagaaagaaaaatggggaatactgaacacaccacacttgcttttctagtgctccactcactgactgaactcatcatcatattgatggcaatgccccaatctttgtaaatcctgccacctaaaatggttccattatgctccaaggtaatttgtaaccattaatttcactaaaatataaaagaaggttgtccttggtattctgaggataccttataatttacgtatagaggagggttgaaacgggtcatcctgtcatgaataaatggcagttctttcatgaaggtccagtataagtggacagctacatggcaaatcaaatagagaccattgctggaacatctgtcagaccatatgctttggcttcaggttctgtgtaaaaccgaaacgctaatgacgccatccatcatcacagagcttggcaggcaggcatcgttgaactgggcatagaaattcatgagtggatttattgaatggagcgcaatacgtgcgttggtttggtggcaccatttgttttggtgagttcaaatgaggctgtgtaatatgttactggtaatcttatgcagactgtagtcagagccatggcaattgggccaatctgtcagtaatctctgcaggcactggcctggtgcctcttcagtggacctgccaaaactagagagtcagccaccgctttgcccttggtgagtgaggcacattgctgctaatgtcctgtgatacagtgagtttctcagccaaaggaaatgtcattccttatggagcaacagataatttaggcaatggcttgagagtagtaattggagagtgaaattagtaaaatgagatgcaaattgctttgcaaaacaactagagagaggctgacctcttcaagtcccagctgttgccagctgtgagtcaataaaagtggtggatttgaaacttctggtcatgtagtatttaaaatggtggctcagttgccacaaatgcctccctctactgcacatgaacatttacatgtaagtgaaaatatgagacctgagctttagaaaattgaggggtaaatatgaaaaatcttcacctgagcaactgcactcctgcccagtccaaatgcctatttgctttcagcggtttcccgaagcattgttgaaggctcctctccaccatcctaggaagtagttggaacttatagcataccccatttctagggattttactgttcatgatagatactatttcatttagagaaaatatcttgaattttagcattaattataatgagaaaagaaaagctttctgaagaaattgatcaacattaccatagcatagtttatattgcaaacttcatccagaaataacttgaagggtacttttcaaagctaacctgattgcatatgttaatacctggtcagttcactctataagacattggaaagggagaaatgcaatacattgaaaagagtctgggaggtcagaagtttcaaacttctgacatttatagataattgatttgtaaactctcgagatgtgcatctgaaacactagaatagcaaagatagcaatgtagttattaagacaggaagtaaatatgaaaaacggatgtcagaatgattacaaggatatctatgctgattctattacctagctatttccaataaagcatcagtgaagatgtatgtgcatgcatctctatagaaggatggagaatcctttgtgtatgtgtccaggagcagcatggctgtatcatatgnnnnnnnnnnnnnnnnnnnntaatggtaattgtaacggtaatggtaatagtaataaatagtaatagtattagtaatagtgctctaccatgggacaggtgtaataataagtgatggacatcctcctaggtcctccacacgatcacttggtagtgcctcagttagcagaatggcttgatatgggctaaagtaacaaaagctacagtggcttccaatactcaaatggaaagaaaaactacttgccacacccctccctgaaaggtctttacctgattcctcatcatagttgtcctttcccgagttcccgtgttcaagtacacctgaagcacacgtttttcctctacgtgtagtttgcaggttgtgctgctcatttcatctcagtggggatgcctgttaggtggattgagaggtgatggagaacataggatgttcagagatattaaactaacccacaacacttcgcaacctcgctcatgagggatttagatagttaggtaattaaagattttgaggttatttgatgtttgaagatagttctgcattctagatatatagaaaattataaaaaatatgcagctcagacttacgtccttgtccacagtgaataaacccactgtccataatgcagtgtgtaggaatacttttggaaatggctgacagtgaacagaatagaagcagagtcaaattatgagcctttctgggagaaagtttttaaaatacgtattttcatatctataaaatatactttaagatattgtaaaggagacataggataacgcctgtcatcctttgtaaagcactttcctctcctttcaggaagcccagtgaactcacatgtactcgaggcttaaatgctaaacagttttggcaaattatcgacattaattttttgtacatgttttttattcccagcactatttaagcttttagttgtatttctaagaaactctcaattttagaaaattagtagttcacaataaaaggcttatgatcaggttacaagaatttagaatgacagtagaattttacatatatactgaaatcatttttgaatatcagcccgaatttgggagacaatacagggaatgtttatgtaggaaactaatatgaggttacatcttttataaattgatgttgttcatgtttcttttttgtgcttttttttaccccaagaaatataaatatcagttaaagtgattgagaagaaagtagataggacttgggtttattcagctcagttgatagagtggttgcctaaagtgtatgaggctctgagtctcaatattcagtaagcaagacaatgattagcaaattcaagtcaatctaggttaccatctgtcttagtcagggtttctattcctgcacaaacatcatgaccaagaagcaagttggggaggaaagggtttatttggcttgcacttccatactgctgtttatcaccaaggaagtcaggactggaactcaagcaggtcaggaagcaggagctgatgcagaggccatggagggatgttccttactggcttgcttcccctggcttgctcagcctgctctcttatagaaccaagactaccagcccagagatggtcccacccacaaggggcctttcccccttgatcactaattgagaaaatgccttacagttggatctcatggaggccttacctcaactgaagctcctttctctgtgataactccagctgtgtcaagttgacacaaaactagctagcacaattgaccccttgtcaacttgacacacaaacacatcactagtaagcctcaacccttacattcttattcatccccaaggtctaaataactttaaatgccccacagtctttacatattctaaaaatttcgatctctttaaaatatccatcttttnnnnnnnnnnnnnnnnnnnnaagtagttggaacttatagcataccccatttctagggattttactgttccatgatagatactatttcatttagagaaaatatcttgaattttagcattaattataatgagaaaagaaaagctttctgaagaaattgatcaacattaccatagcatagtttatattgcaaacttcatccagaaataacttgaagggtacttttcaaagctaacctgattgcatatgttaatacctggtcagttcactctataagacattggaaagggagaaatgcaatacattgaaaagagtctggaggtcagaagtttcaaacttctgacatttatagataattgatttgtaaactctcgagatgtgcatctgaaacactagaatagcaaagatagcaatgtagttattaagacaggaagtaaatatgaaaaacggatgtcagaatgattacaaggatatctatgctgattctattacctagctatttccaataaagcatcagtgaagatgtatgtgcatgcatctctatagaaggatggagaatcctttgtgtatgtgtccaggagcagcatggctgtatcatatggtcacttttagtgcctacagtcgatatggtggctaactgttctctttcccaacattctcatcagtagttgttatcatttgttttcttggtgctacctgttttggaagtttatggaagatgaagtgagatacgtaaactctcagcttttaggggttaatacaagcaccatataatttactctttatataaccccaaaatgtagtaatctggtcttaagttttaaagctctgtgttcaatcatatgaactgatttgaattctgagccctgtaattgtgggctgctgagacctgaacaagctgatgtaaagccgtgtccagagcctagggatccaggcatgttccaggatgttcatgctggagaacagggacctcaatcatttcagagaggaaagtaagcaccaaagactggggcattgggtgagatcattagagaaaccttggctcaagagctggaattcagcaaacacaagatgcacagaaaggaagatctgtaggctgttgctatagggttagaagacacaacacatccgttcggttgagtgaagtggagcagccatataagaaggatctcattgagagatcacggtgagaaaaggtggtaaataagatggatgatcaggtaaggacatgaacggaattggaagtagcaacagctgctgttggcaggactgacatcaggcaataaacgacacagactgggcagtgcagtcaaattggaaagtctgcgggaggcacagattaaagaagatgaatggttttggatccagtgggtaacagttaacagattttggggaaatgtgaatgctgtatagtataatcctctaagcctcaaggttttacttttatacttagcctgtttctcattttctggcttgaactaactggtcattagaaccattgattattttcattccttttctaccttcataatggccttcatacaaatgatcttaaataagaataaaggatgagacattctaatggattttggcttttataccacagtaaggtttgctagtatagttacttaaagcctttgatggtcttcatgttgtctatgagaatgaactttttggaaaacgccagatgcctctcaccttctggatgcttcagaatcactgttctcagaacaggagtaagaatagttctttctttcatagtgtcctaacttcgtgttgcctactgttgacctaagctgatagacggagtctagcctgatatttaattctaattgtctctgtggactttctcattaaacaatagtgattcttctaggcatctctggctttacaccgaattctgttccacccaagaggctttgtgctactactagtagctgccacctaatatagccagttgtttccccttgggtcatttgatttttatagttcacacattgtagcctgccttcatgtctttgttataacgcaccttgtgtgtaacgtttgagataaattcactaaccatgcatcatggctcaagaagtctgtctttgatattttagcatctttagatgtgtgtatgtgctgtgagcattgggaagattcatggtatgtaaattttagggatattactctttttgcatttgataatttcattataaagtttagtaccatagaatttttaaaatagttatataacctaggtgaaatatccaaaattaaccaggtattataacagactaatgtgtgatatgtgttttactcccttatcttcttccaagatttcttctcatcaaagtctataaataattgttactctttgcatgatggtaaaggcagtacccacacaatgggtgtggaggggttccttcggagtgttttcctatcagccatttcacaaatttcccaataagccacagtgttatatatatgtatgtatgtatgtgtatacatatatcagattttgacaaaacgttttcttctttccattgggatattttgatattctcttatttcagttttggttccttgtttgttgttgttattgtttcatttttgttgttgggtctttttgtacttaaaaattgcttatttttaacattagcgttcaaagtaatatatttcattgtgctattttcaaacatctttgttgattctaccaatctgaaaggcagatcaatatgtagatctaatatttatgagatcactttatagtacaataaaacatacatagtgaaagccatcctaattaaatatgactctgattgggggggatagtgagatagatagatagatagatagatagatagatagatagatagatagagaatgcttgtatgtatacttgtgcaaaaatctagagcagacttctattactgagctacatctccagccatcactgtcatgacattgaaatatgtcactgctcactgtaatgtggtattagtgacttaaaacaaacaagccccttaatccttaggtctttcctccctttcttttcctcattgtttacctattaagtactccttagaccttttatagtataatttcttagtctttgttttgccaattacttgacttcaggtcaatatggttccattttctctgtattttccaggaatttgcaggtgggtctgaggtcaaatctgatcctttgatcatagtataagtggtgtctggtgtgatagcaaagtccaaatggtcccatctctccttctcttagcgctgttagtccttaaaatccttaataattcttgtcgaaaatcatggttttaccaaacccagacactgtggcagatgccaacaagagcttgctgacagaagcctgatatagctgtcttctgagaggctctgccagtgcctgggaaatacagaagtggatgctcacagtcatccattgggtggagcacctggtcctcaatgaaggaggtagagaaagtacccaaggagctgaagggatcttgtagccacataggaggaacatcaatatgaactaaccagtacccccagagctccttgggactaaaccaccaatcaaagaaaacacatggtggaatttgtggctctccttatatatgtaataaaggatggcctagtcagtcatcaatgggaggagaggccctaggtcctgtgaaggttctatgctccaatataggggaatgccaggaccaggaatggaagtgggtgggttggggagcagggggaagggagagggaatagaggatttttg

SEQ ID NO: 1325 - DNA, 5896 bp, Mus musculus
actttaactattgctattgctattgcttctaagttgctaagttcttcttgcttaggtcttccgggctggcttccttcccttctgctatccctacccagagctctttaggctctcggcccacactgcaggtggggtcccaggaaacagaagacagaacgaaacacttctgtgtggttagagccccgttctctttgtgcctctgcccatttgtcaactgggacaccaacccagtctgacagactccaactgcaatcaagaacaagccaacgaaagccagcaacagatgttctaccctctgttttagaatcagtatttggacttctaacgttgtaactattatcaacaatacgattataagcagccaggtagaatagcatcagaaattaaaatgcatttacaacatagttcagttctgttgacaaaaccaaagtcaggagctagaggtaagatgaatgtgagttcaagaccagcttgggcttcctatcgaactctgtctccaaaatactagccctggggattgctactccgtcaaaaagcatttgcttggcatgcacgacagaaccttgggcctgtgactacagggaacagtactcaggtgtcttcttcacaactgcataaaatgtgagttgtaacatgaactcactttatgcgcatataggcactgaggtgcaaccttaattttttttttaaaccaaagccagaaatttctgagttccgattcttggcactgtgccaacgctcagatatgcttgtggcgcaagcaacgaaaacatggaagactagagcttaagatagggttccatggaagagtgtgtgtccagggaagagtgtgtgcttagcttgggttcaatctctagcaccattaagaaagagagagcaaactaactctggactaccctgagcagcctctgcctagcatggagagcggcggccgcggctggcggccgacgctggagaccgtttcgcccgcgaggtagttggccgacgttgcgcaaggacgaaagtgctggcgggtggccgcggcgtctccgcgagccccccgacgaggccgggcgggctgctggctggcggatttcaccgcgattcccccggaggctctttgcaaagctgcttgaaacttctcccaaactcgccatggatgtggcggccgctgcgttgcctgcttttgtagctctctggcttctgtacccgtggcctctcctggggtcggcccttggccagttctcagcaggtggctgtacttttgatgatgggccaggggcttgtgactaccaccaggatttatacgatgactttgagtgggtccatgtcagtgcgcaggaacctcattacctgccccccgaaatgcctcaaggttcctatatggttgtggactcctcaaatcatgatcctggagaaaaagccagacttcagctgcctaccatgaaggagaatgacacccactgcattgatttcagttacctgttatatagccagaaggggttgaaccctggcactttgaatatcctagttagggtgaataaaggacctcttgctaatccaatttggaatgtaactggattcactggtcgtgattggcttcgggctgaactagctgtgagcaccttttggcccaatgaataccaggtaatatttgaagctgaagtctcaggagggagaagtggttatattgccattgatgacatccaagtcctgagttatccttgcgataaatctcctcattttctccgccttggtgatgtggaggtcaatgctgggcagaatgctacatttcagtgcattgctacagggagagatgctgtgcataacaagttatggctgcagagacgcaatggagaagacatacccgtagcccagactaagaacataaatcacagaagatttgctgcctctttcagattgcaagaagtgacaaaaactgaccaggatttgtaccgctgcgtaactcagtcagaacgaggttctggggtttccaattttgctcaactcattgtgagagaaccacctagacccattgctcctccccagctgcttggtgttgggcctacttacttgctgatccaactaaatgccaactctattattggcgatggccccatcatcctgaaagaagtagagtatcgaatgacatcaggatcttggacagaaacccatgcagtcaacgcaccaacatataagttgtggcatttagacccagatacagaatacgagatccgcgtcctgcttaccagacctggcgaagggggaactgggctgccaggaccaccactgatcactagaacgaagtgtgcagaacctatgcggacaccaaagactttaaagattgctgaaatccaggcaaggcgcattgcagtggactgggagtccttgggctacaacatcactcgttgccacactttcaacgtcactatctgctaccattacttccgtggccacaatgagagcagggcagactgcttggacatggaccccaaagcccctcagcatgttgtgaaccatctgccaccttacacaaatgtcagcctcaagatgatcctaaccaacccagagggaaggaaggagagcgaagagacaatcatccaaactgatgaagatgtgcccgggcctgtgccagtcaaatccctccaaggaacatcctttgaaaacaagatcttcctgaactggaaagagccactggaaccgaatggaattatcactcagtatgaggtgagctatagcagcataagatcatttgaccctgctgttccagtggctgggcccccacagactgtatcaaatttatggaatagtacacaccatgtatttatgcatcttcaccctggaaccacctaccagttttttataagagccagcactgtcaaaggctttggaccagcaacagccatcaatgtgaccacaaatatctcagctccaagcttacctgactatgaaggagttgatgcctctctgaatgaaactgccaccaccatcacagtactattgaggcctgcacaagccaaaggtgctcctatcagtgcttatcaaattgttgtggagcagctacacccacatcgaacgaagcgtgaagcaggggccatggaatgctaccaggtaccggttacataccagaacgccctaagtgggggcgcgccctattactttgccgcagaacttccccctgggaatcttcccgagcctgctcccttcaccgtgggtgacaaccggacctataaaggcttttggaaccctcccctggccccccgcaaaggatacaacatctatttccaagcgatgagcagtgtggagaaggaaactaaaacccaatgtgtacgaattgctacaaaagcagcagcaacagaagaaccagaagtgatcccagacccggcaaagcagacagacagagtggtgaaaatcgcgggcatcagtgctggcatcctagtgttcatccttctcctgctggttgtcatagtaattgtgaaaaagagcaagcttgctaagaagcgcaaagatgcaatggggaacacacgtcaggagatgacccacatggtgaatgctatggaccgaagttatgctgaccagagcaccctgcatgcagaagaccccctttccctcaccttcatggaccaacataacttcagtccaagattgcccaatgatccacttgtgccgactgccgtgttagatgagaaccacagtgccacagcagagtctagtcgtctcctggatgttcctcgatacctctgcgaagggacagagtccccttatcagacaggacagctgcacccagccatcagggtggccgacttactgcagcacattaacctcatgaagacatcagacagctatgggttcaaagaggaatacgagagcttctttgaaggccagtcagcctcttgggatgtggctaaaaaggatcaaaacagagcaaagaaccgatacggaaacattatcgcatatgatcactccagagtcatcctgcaacctgtggaagatgacccttcttcagattacattaatgccaactacatcgacatttggctgtacagggatggctaccagagaccaagccactacattgcaactcaaggcccagttcatgaaaccgtatatgatttttggaggatggtgtggcaagagcagtctgcctgtattgtgatggtcactaatttagtggaagttggccgggtgaaatgctataaatattggcctgatgatactgaggtttatggtgacttcaaagtcacctgcgtagaaatggagccacttgctgagtatgtcgttaggacattcaccttggaaaggaggggctataatgaaatccgtgaagtcaaacagttccacttcactggctggcctgaccatggtgttccataccacgcaacagggctcctgtcatttatccggagagtcaagctatctaaccctcccagtgctgggcccattgtcgtacactgcagtgctggtgctgggcgcacaggctgttacattgttattgacataatgctggacatggctgaaagagagggtgtggttgacatctacaactgtgtgaaagccttacgatctcggcgcattaatatggtacagacagaggaacagtacatttttattcatgatgccattttagaagcctgcttatgtggagaaactgccatccctgtgtgtgaatttaaagctgcatattttgatatgattcgaatagactctcagactaactcctctcatctcaaagatgaatttcagactctgaattcggtcacccctcgactacaagctgaagactgcagcatagcctgcctgccaaggaaccatgacaagaaccgtttcatggatatgctcccacctgacagatgtctgccttttttaattacaattgatggggagagcagtaactacatcaatgctgctcttatggatagctataggcagccagcagctttcatcgtcacacaatacccactgccaaacactgtgaaagacttctggagattagtatatgattacggatgtacctccatcgtgatgctaaatgaagtggacctgtctcagggctgcccacagtactggccagaagaaggaatgctgcgatatggtcctatccaagtggaatgtatgtcttgttcaatggactgtgatgtgatcaatcgaatttttagaatatgcaacctaacgagaccacaggagggctatctgatggtacaacagttccagtacctaggctgggcttctcatcgagaagtgcctggctccaaacgctcgtttttgaaattgatactgcaggtggaaaaatggcaagaggaatgtgaagaaggggaaggccggacaatcatccactgcttgaatggcggtgggcgcagtggcatgttctgtgccataggcattgttgtggagatggtgaagcggcaaaatgtggtggatgttttccatgcagtaaagacgctgaggaacagcaagccaaacatggtggaagccccggagcagtatcgtttttgctatgatgtggcgttagagtacctggagtcctcatagttcgctgagactatttgcagagcatccaagcagaaatccattcgtctgttgagccagcagctgttgtacctgttactgcaccgagagattttaatgtacggggtgggaggcttttacattggagaggcaaatgtatttttcttataaagttgtgtatcttaataaaaaggacttgatcagtttctgtgactgtatgagagcatccacatttcatgccacctaattttatctttaatcagaggcagatttggatgagaagtggtctgtgtctgtccagtgaccacacagccttttctctcctgctttctgtagagcagctaccacacattgcatgcactttgtaagtggcatttccctctctttttggggtaaaaactgtgggaccccc

SEQ ID NO: 1326 - DNA, 4374 bp, Mus musculus
atggatgtggcggccgctgcgttgcctgcttttgtagctctctggcttctgtacccgtggcctctcctggggtcggcccttggccagttctcagcaggtggctgtacttttgatgatgggccaggggcttgtgactaccaccaggatttatacgatgactttgagtgggtccatgtcagtgcgcaggaacctcattacctgccccccgaaatgcctcaaggttcctatatggttgtggactcctcaaatcatgatcctggagaaaaagccagacttcagctgcctaccatgaaggagaatgacacccactgcattgatttcagttacctgttatatagccagaaggggttgaaccctggcactttgaatatcctagttagggtgaataaaggacctcttgctaatccaatttggaatgtaactggattcactggtcgtgattggcttcgggctgaactagctgtgagcaccttttggcccaatgaataccaggtaatatttgaagctgaagtctcaggagggagaagtggttatattgccattgatgacatccaagtcctgagttatccttgcgataaatctcctcattttctccgccttggtgatgtggaggtcaatgctgggcagaatgctacatttcagtgcattgctacagggagagatgctgtgcataacaagttatggctgcagagacgcaatggagaagacatacccgtagcccagactaagaacataaatcacagaagatttgctgcctctttcagattgcaagaagtgacaaaaactgaccaggatttgtaccgctgcgtaactcagtcagaacgaggttctggggtttccaattttgctcaactcattgtgagagaaccacctagacccattgctcctccccagctgcttggtgttgggcctacttacttgctgatccaactaaatgccaactctattattggcgatggccccatcatcctgaaagaagtagagtatcgaatgacatcaggatcttggacagaaacccatgcagtcaacgcaccaacatataagttgtggcatttagacccagatacagaatacgagatccgcgtcctgcttaccagacctggcgaagggggaactgggctgccaggaccaccactgatcactagaacgaagtgtgcagaacctatgcggacaccaaagactttaaagattgctgaaatccaggcaaggcgcattgcagtggactgggagtccttgggctacaacatcactcgttgccacactttcaacgtcactatctgctaccattacttccgtggccacaatgagagcagggcagactgcttggacatggaccccaaagcccctcagcatgttgtgaaccatctgccaccttacacaaatgtcagcctcaagatgatcctaaccaacccagagggaaggaaggagagcgaagagacaatcatccaaactgatgaagatgtgcccgggcctgtgccagtcaaatccctccaaggaacatcctttgaaaacaagatcttcctgaactggaaagagccactggaaccgaatggaattatcactcagtatgaggtgagctatagcagcataagatcatttgaccctgctgttccagtggctgggcccccacagactgtatcaaatttatggaatagtacacaccatgtatttatgcatcttcaccctggaaccacctaccagttttttataagagccagcactgtcaaaggctttggaccagcaacagccatcaatgtgaccacaaatatctcagctccaagcttacctgactatgaaggagttgatgcctctctgaatgaaactgccaccaccatcacagtactattgaggcctgcacaagccaaaggtgctcctatcagtgcttatcaaattgttgtggagcagctacacccacatcgaacgaagcgtgaagcaggggccatggaatgctaccaggtaccggttacataccagaacgccctaagtgggggcgcgccctattactttgccgcagaacttccccctgggaatcttcccgagcctgctcccttcaccgtgggtgacaaccggacctataaaggcttttggaaccctcccctggccccccgcaaaggatacaacatctatttccaagcgatgagcagtgtggagaaggaaactaaaacccaatgtgtacgaattgctacaaaagcagcagcaacagaagaaccagaagtgatcccagacccggcaaagcagacagacagagtggtgaaaatcgcgggcatcagtgctggcatcctagtgttcatccttctcctgctggttgtcatagtaattgtgaaaaagagcaagcttgctaagaagcgcaaagatgcaatggggaacacacgtcaggagatgacccacatggtgaatgctatggaccgaagttatgctgaccagagcaccctgcatgcagaagaccccctttccctcaccttcatggaccaacataacttcagtccaagattgcccaatgatccacttgtgccgactgccgtgttagatgagaaccacagtgccacagcagagtctagtcgtctcctggatgttcctcgatacctctgcgaagggacagagtccccttatcagacaggacagctgcacccagccatcagggtggccgacttactgcagcacattaacctcatgaagacatcagacagctatgggttcaaagaggaatacgagagcttctttgaaggccagtcagcctcttgggatgtggctaaaaaggatcaaaacagagcaaagaaccgatacggaaacattatcgcatatgatcactccagagtcatcctgcaacctgtggaagatgacccttcttcagattacattaatgccaactacatcgacatttggctgtacagggatggctaccagagaccaagccactacattgcaactcaaggcccagttcatgaaaccgtatatgatttttggaggatggtgtggcaagagcagtctgcctgtattgtgatggtcactaatttagtggaagttggccgggtgaaatgctataaatattggcctgatgatactgaggtttatggtgacttcaaagtcacctgcgtagaaatggagccacttgctgagtatgtcgttaggacattcaccttggaaaggaggggctataatgaaatccgtgaagtcaaacagttccacttcactggctggcctgaccatggtgttccataccacgcaacagggctcctgtcatttatccggagagtcaagctatctaaccctcccagtgctgggcccattgtcgtacactgcagtgctggtgctgggcgcacaggctgttacattgttattgacataatgctggacatggctgaaagagagggtgtggttgacatctacaactgtgtgaaagccttacgatctcggcgcattaatatggtacagacagaggaacagtacatttttattcatgatgccattttagaagcctgcttatgtggagaaactgccatccctgtgtgtgaatttaaagctgcatattttgatatgattcgaatagactctcagactaactcctctcatctcaaagatgaatttcagactctgaattcggtcacccctcgactacaagctgaagactgcagcatagcctgcctgccaaggaaccatgacaagaaccgtttcatggatatgctcccacctgacagatgtctgccttttttaattacaattgatggggagagcagtaactacatcaatgctgctcttatggatagctataggcagccagcagctttcatcgtcacacaatacccactgccaaacactgtgaaagacttctggagattagtatatgattacggatgtacctccatcgtgatgctaaatgaagtggacctgtctcagggctgcccacagtactggccagaagaaggaatgctgcgatatggtcctatccaagtggaatgtatgtcttgttcaatggactgtgatgtgatcaatcgaatttttagaatatgcaacctaacgagaccacaggagggctatctgatggtacaacagttccagtacctaggctgggcttctcatcgagaagtgcctggctccaaacgctcgtttttgaaattgatactgcaggtggaaaaatggcaagaggaatgtgaagaaggggaaggccggacaatcatccactgcttgaatggcggtgggcgcagtggcatgttctgtgccataggcattgttgtggagatggtgaagcggcaaaatgtggtggatgttttccatgcagtaaagacgctgaggaacagcaagccaaacatggtggaagccccggagcagtatcgtttttgctatgatgtggcgttagagtacctggagtcctcatag

SEQ ID NO: 1327 - DNA, 96589 bp, Homo sapiens
  misc_feature (2687)..(2966): n = a, g, c, or t.
  misc_feature (13107)..(13304): n = a, g, c, or t.
  misc_feature (21488)..(23254): n = a, g, c, or t.
  misc_feature (26987)..(27006): n = a, g, c, or t.
  misc_feature (32504)..(32527): n = a, g, c, or t.
  misc_feature (73853)..(73921): n = a, g, c, or t.
caagtcgtttacatattcagttaaaaataaaactaatgtttgttctttgtgtaaaaggaatacatttgacttcgtgagcacgtattagccatccaaataaccaaaaataatcctagatcactggaaatgaagaaatattttttcttaatttaagaaatgtattgacaaaagaatacaaatcataaagggaactcttgagtcttgtctggctaaaaatcatgagaacactataccagagaaaaagagttggctgagggtgtacttgtaatataaacacttatgaaacactggctacttgaaaattcaaagtacgtatatagtgctgttcatgaatcaatgatctgtgagtgaatctgattgctgatccaaagtagaaagagaaaatgcctgcactcaacatcttttcctattgacaagtaatcagggtcattcacatgttcctacctgtgataaaatttactttttaggtgttcacttctgttactggtgcttaaatcagctaccagctacttgcatttatcttttaagagttagatatttgggtgaattcaactttattttacgtaagttgcaaacacagcatatttttattatttttgcatcactgtactatataatgtaacttacattaactctttattcacttaatcaattttttccacaaacattgattgatcatttattatgccagtcactgtgcaaggtattgtaaatcaaagataaaatgaccacaacaaaacacagaatctttgcccaggtttgtcatagaccatcagagatgcctgcagccttgtaaatcatttgctcatagctggtgttcaggaattttgttaactcagtatgttattgatacacgtttttaaatttaaagtcttttactttattacctttatataatttctaaagaccaattagaaacactcatctttgtatttgttggcaagatttttgaccttttctagaattgagccagaggctgagaacttcaaattatacattgttggagattagtgctcagaaaaataaatttaaatcctggaatattacaagaagaagtaatttaataataatataaacaacagattttttttgaagtgaatgttactaccaggaaaataaaatctgctttctaactgatatgctaatcccaccaagtccatctttagtttttgtaatgacttacccagttcacctacaggtgggtgccaggtggtgggaccagactggtctagtcaagtaatctggcttcagatgagccctgcctcctttaccctctgaatcctttgtgctgtctttctttcctctgaccacattcctactttcagtctccctaccagccaactgtagccttatcgtgaggcttatctgatccagtgccttaattttttgaaaatgaagattcaatttaatgtaatcatttttccttaccattgaatttatggtctggtatctcaaatctttgattggattcccatcactcacttcaaatgtacttgaagcaattttactttccactcaattttttctttgtttatgtcagtctgtcaaaatctcttctctgctaatgcttgatgctattctactctgtgacccttccccctgccacccctgtcaccttcccaaataaaccagaactacatattatccaactaaatctgagagcatccaggagttagcttgctggctgtcatagaccctaaatactgggttctgtccttccctaattatagcattactagcctctgccattttgcatttcaccatctattcatcccacctccagtggaaatatgtattctttctgcctggtcttcctaatatcaaacaaactccagttctacagtcctctgtcataccaactagaaaatcttgttatatagagttttcgtgtttagttttattaggaaagctaaaatcgccaatggattctataaatttgttgactcaataacattctatatgtgccaagagctgagctgcatacttgaaatagaaatctacttaaggcaattagtatgtgcacccgtgtgagtggtagactcctaaattaatgactggtaacaatgctgtgtgataagtgcaataataacagctagaaaatgtggtactaaagctgaatttgtgaggagaggtagaaatgagcatggccaaaggtcacaatgatgcatttacgaattgcagatagcctaggtcatggagagtgaagggtctgtgggagaattgacagcagctgaagctggagagacaaaacagggagcaaagggagaggttgtttagtgccagccccacaactgaaggtgggcacaagaaggactgtaagcagaagttaccatgggcagttttacgtttttagaaagatcactctgatagaaacatagagaatggactggggataatccagaaggctggagtagtccctgtgagaagtgctaatgggccatattaagaaagtagcaatggaaatgcaggtaagactgtggctcctacataaggttttagatcagtaggatgtgtaaagcttcatgggaagggagtttgagtggagactttaggtgagagaagatggtagcttttatatttgaagtggtagcagagcaaaaagacatctcagaattcaaggttttgttttttgaggttattaagtgataaatattttcagtattgctaccccaaatcaaaaaagtaannnnnnnnnnnnnnnnnnnnnnnnnnnnnnnnnnnnnnnnnnnnnnnnnnnnnnnnnnnnnnnnnnnnnnnnnnnnnnnnnnnnnnnnnnnnnnnnnnnnnnnnnnnnnnnnnnnnnnnnnnnnnnnnnnnnnnnnnnnnnnnnnnnnnnnnnnnnnnnnnnnnnnnnnnnnnnnnnnnnnnnnnnnnnnnnnnnnnnnnnnnnnnnnnnnnnnnnnnnnnnnnnnnnnnnnnnnnnnnnnnnnnnnnnnnnnnnnnnnnnnnnnnnnnnnnnnnnnnnnaatgaccacagtgaaaaatcccattctgcataatgcagcactaagtttcaccaaccacattgtccttctgttacccattactgcttccctatgctaatgtagaacatgtgcgatgcagtgctggcaagtgtggttctttgacgaaattaatttttgattttataatcattctaaaaactgaacattgttgcctgacttaagtagaactttgaatctccttaccaactttttgagatctatccttacaactgtcatcacttgacaatcattactgtgttcaaaatgaatattgtctacatttagaatgcaattccctaggaatacataattccttttcttttctttctaaaaggtttcttcgtaaatgaattaaaactctaacctgggaaaatataattacaaattataatgcatagaacgtcccatttattaaaagattgacccaatatagctgtgttttcaaagaatgaaaataacagcagcatgttgtaaaaacacaaaatagtttctctgtggtgagactgtttattgtaaagttaataaatgaatatatattttatttcagcattttccaaatagaaactctacccattttgcgctgcaggaagctacccattctaaggttactttgttttgtggagaacatctaatttgcatttcataacattaagcaccacctatttagtttgataattaaaatatagtcatgaaataaagtcaaaaccaccatttcttccacagttaaattaggaaaagaaattgtctgatgttctaagttcactgatagcttaacagacaaatgtatgttagggttgcatagctttaaaatctggggctatcctcatccacctgcagaatagtctgtttcattacataaatttaaagatatcaaatagttctaattttcctaaccactatcctgacctagagcttacttgaattccaaataaaaccatcttgaaatttaactagagatggaaataatctttttgccctcttttatgggcataaaggtcatatggtccaattagatcaaatagatgttactttaattttatgtttattctctagaatcatagtaggtagaatcgttataatttttctaatcaaaaataggaggaagtatgcccttcttgttaaatcttctttctggcctctagaatcccagtccacagcttgcttatgaccttgtgagaagccctgagccagacctgtcttagcttagcaactctggaattcctgacccactgaagctgtgagataatgtttgttgctttgagctacagaatttcagggtaatatgttatgcaggaagagattatacatgtacccaagtagtataaatcttctctttcttcagatttctgcccaacggatacttttatcacataaggatttcttgaccaacccatataaaatagcactctgcattcccatcattccctctttcccttagcctgctttatctttctctagagcacttatcccttcttaatatgtgttggttttctgaatttatttttttatttgtgtctccccactagaatgtaaacttcatgagaacagagacttttgctactatcttcattattttaacctcagtacttaaaataattcatgatatgtaacagatactcaataaatatttggtgaacaaatgaactggatctaaaaatataacagccacattctgtagtaagcttatcatctgctaaaggaaagacatatacctaaaaaactatttttaacagtataatatcaaatcatatttgtaatgtaccatgttggtgcatgtaatgtgctacggccacatactgatgtatcatataagcaataaatattagacagcaatgctaggtcttttgttttttccaccctagagtttttgagaataccatttatggttctgataaatggatctttggcattataattgtcagtgggttaggaactagattaaacatgcatccctgtgattgtgacttctacccccatgtcatccttcagtcatcctcatcttaaaaattactccattgcctttagaagacagagtactgaggaatgaagatagttcaagaagccttcatggcagaagtagaaaaactagacaagaaaggcagaaattcttgactgtatgtttagtatatttgggtaacaatggtcataccagcttcgaatggaaaataaatatcaggagataaaacaagaatggagatataaggtaaggaatgtggtaatttatcaaccccagcgtaaaaagtacagagtttgactttgaatttgactgtacttcaaattttaatgttgctattatcctgggctagtgatatgtaatacatgagatattaaacactttattataaaacaggttttgtattagctgattttgccaactataagctaatgtaaatgttctgagcacatttaagttaggctaggctaagctatgctgttcagtgggttagatgtattatattcatttcaatttacaatattttcaacttgtaatgggtttattgggacataaccccatcataagttgagaaacctccatataatgtagtaaaatatgtcattttaattttttaaaaaataaggaagtcacattttgtgtattgaatgattaatgataccaatatattgatttaacctaattacagaaatatttttgaagtttattaaaaggaatggggaatatattaactatgggtagagtgattaaaaatattatgatgactttggaatagttttaattactaaagtactgagctcacctaatatttagatctagctagagtttagttccattaggtaattagacaaccagaagaatgaagaagcacaatcccatttcatgtaattagtcaactcacttctaatgcgatttcttatttcttatttcatcttttaattaatttgtattgataaataagaaaataacaaggacagaaacagatttaaaaattggaaatgtggttagagaacagcctttcagattgaacaatgaaggaaagatagtttcttttaaacatggactagtgtgactttttgttatttttatagctgtttttcactaaatgtaaatacttcttaaagactcaccatgattacaattgatttctgtgtgagttataaaaacgcctcttcaatgggcatgaaaaaaggtagaaatagatgcacaaagtgatgcatccagaaagacactgactaaagactgagcccaactaaggagagtaaaatgccactagagaattttgagggatactggtacaaggaaagatacttttcatattttcagtatcttgaaaaggtagcatgctgcggaggtccagaacagaaagacagcagtacagcagacaggtgtatatcaagattttaaactgaaacgggtatttctgggtgatgttatagaaaagtagtacaatttcagtttcgtttgggtgtaaaagcaaaagggagtatgagagatgactttaaaagactctgaagatctacttctgggtagctgtcccagtcactttaaatgcttaccatggacagtcacaggttcctaagtgaacagagttgaaaagaaagtatacattttagttttgttgtcgttttaaactgtatcaaacttgagaggggcagaaagcattctaaagatggtagaacactagaagtttcagtaaataaaagtgaatataaggtccgtgaaagccaggtgttttttttttaacctctctatcctcagagcctgcatgatacctgttaaatatataattgttgaatgaaaatgagttaatggatacaatgtcacaggaagaaaggtaaatgagaaaattcttactcttcaaataatgctcgggatttttcaggtgaaaaatgtactttcatggagaaagaaaaagagtatcttagatatgtcctaagcaaaaatatcaacagaaaaggcaaaagcaatgtattcatttcataaacacttaaacgtccattatcctatttgaaaccacatattccagtgtggtttcaaataggataatgggcgtttaagtaagtataatatgtgaaaatgtaatggctattgtatcagcttttggagttaaacatatttgggattaaaaatatctagaaactggggtgaatgttatatcatgaagacatttctcctggtatgagtggtggtagagtgggagggttatagagtgcggtgaccaggttatctccaactagctttccatctaatgttactcattgcacaaagaatgttttagaaagtatgcttggaagccagttctcagaagtctttttgtatttatgtgtcttagtttgctcaggctgctattacaaaatactaggtggcttaaacaagaaatatttctcacagttctggagactgggaagtccaagatccaggtgctctcggatttggttcttggtgagggcccctcttctaaacctaattattttccaaaggccccctctccaaatactatcactttgagaattagggttttaacatgaattttgggggagggggcacaaatattcagttggtaacactgtagtataaagtagagaatgaacaaagtgaggttcctggtttaagttttaaggggagctctattcttctgcctcagtttcaatagtaacagaaatgtaatacttcatttctgtaatgaccattcaaagaataaatgaataatattggtagagaaaagatatataagattaaagtgcatggcactgtaatttatatttgtatataaattatgtggaaatcattttcttaattctttatgaaacaagcatgttacttgtattttagaacttataaaattgaaataatttatctttcattttaattgagagtagggccaaatctgaaagttcaacccaaggcattgatttttattttctatgggaccatacttaaggctctttcccaaagagcctattgcaccttttcttcctttactcttctccaacactggcaatttactttgctcctcacagatctagatagacaagctgtcttgcatgaagtatccttaatttgtaatgtagaatctctgtcaatgtaatagaattagttaagattgaatgttcactagattttgtgtttttttttctagaggtatgggataattaatgaagaatctatttttaaggattagattaatgattaacaaggataggtaattattattattctttagggcaagaatataaggttacatttgtttggagagcatgtatgagggagtttatatgcatatgtggatgtatccacaggacatgcaaatgtataatatacaaatatgaattataaatttaaaataaaacatagcatatgtcagctatgatcattctcgtctttctccagggctatgcgtatgtattttctatatcttaaaattgacaaatgcctgctccatggatgcctcagagaccatgcatcttgtcagtagcattcttagaagcttagcaaccaacttggcagaggtatagggaatgatgcagcacatataatttgaaataacatagacttctgccttgcttgctcaaatcacaatttctaacattaatacaagttctgttatctttttagaggaaacaagatggatatgaacctactgatttattagcaatattttaatggaaaatgggagcttaaataactaggaagaaaagaaaatctgtaatttatcaattaaattatgatttaactctttcttttgatgtccttttgtttaatctatgaagatcttttatttgtaggcataagagtttatattaaattagaattttatgccagagtctaaactgttttaattttcatagatgcatgttcagtgtatctctctctctcctctctctctctgtctctctttctccctccccctctcctccccactcccctctacctacccacctctttctttttcatggaagtcttttaaagaatgtattctgttcctcctggagatccattgaatatcaatatgcagccctgcatacaatttatgttcaacttacctaagataccacatatatttttccagaatttttaggaattttaaaacattttaaaatatatttataatgtataaaatatattataataataatgtcaactttcatggtaatattttacctgaaaaaattttaacgtaaagaattttctactaaaaaagaatattgttaatataccagcttcagagttgttaaaaaatattgttagatatccgggggatctttattttaaatttgccttgtttttctttttgtttttttctctcctttgtaaagtaattgcaattatagaaaagttttaagacttaaagatatcagaaggtttaggttagagctttaataggccaaatgccatctgtttctacaatttgtaacattttattattaacaactccagaagaaggaggcggtctatttcggttgtgaggacagatttctgtccatctgtgcccgtattgccgcatgtcacttgtattttagatctacatagctctgagccagtgtagatgccatggcaaggtcaagaggtggagaagcctgtcagtacattctgtctctgaggctgtgacaaccacaaatgggtgcttctagcaccgccctgaggcagtcattctgttagaccttggagctggactttctgtaatatcatttcaagggaaaatgttaactttaaacatttaaaaatatcagacaaagaactgaatctatgatgtgtctttggttaatgtcagaatccttattagggtggctcattcctcaacatttaaaaatgttgaaagtcctacggtgattgttcttctttttatcagtttctttgtaactacagtgatgttagggacagcagcatctatatggatttttcattttattgcgaaatagctgaaaagagtataccaggttaagactaactttaaatactttgaaatgtggtgtgttaatagtcaaccccttaaaaaaaatcttagtatcttaaacctctaaatatgtgtgtatatatatgtgtgttctttttttcttttccccaaagtgcttatcagattgttgtggaagaactgcacccacaccgaaccaagagagaagccggagccatggaatgctaccaggttcctgtcacataccaaaatgccatgagtgggggtgcaccgtattactttgctgcagaactccccccgggaaacctacctgagcctgccccgttcactgtgggtgacaatcggacctaccaaggcttttggaaccctcctttggctccgcgcaaaggatacaacatctatttccaggcgatgagcagtgtggagaaggtgagcttcctccaggatttgctttttccctgctttgaagaaaagctgaagtcaaattttatgaatactcagtagcatccgtcaagaaaaaaaaaaagaaaaagaaaatttgcatgtagggggttctgttctcaacagtgtgcgcagttttggggctacagtagggctgaggccgcacgccagttccatttcacagggttcctgtttcctagtaactgcttctactcgagccttcctcaggaaagcccacaatagcaattgagagtaaaatgatttgaaaacgtgggtgtgctgctgctgggactccaccctcagtaacgatcaggcattgttctgtcttccttgctcagtggtggcacacttcaagagattaaatttactgcaggataaacagaatgcgtgttccacagcaggctaataaaaccttataaacttttcagggttttcaagccaaatagtaaataacatgtaacaatcctctgattacaaagtaatagggcgcctgtggtatatctgactgaacctaaacaaaaggcagcctggcgatgactggctgctgagccattacagaaggctgctctctgtttccctggttgcccctccttttcccattttggacacagttgtttttgaacactgctgctgatcccaaatgaatattgaagaggaaaacacaacaggacattagaaacgaccggcagttccgtatgtgagaaaacaacctggcctttcatgcctcatgctgttctctttggaagattttctttcctaaaacttatttttatttatttatttatttatttatttatttatttattggcagacagagatagagggaagacaaatgttgaggatagaaattttcacaatttaaaatccaatagaatgatgacattttaatagacttgaagccgtataggaaattgctgggtttatgtaattgagtccctaaggtgagcacctgggagtgatacatgatatacaattacatcagtcatattatatcttagaagagtttaattggaagacataacaatccttttgcatttctgcaggggccgtgagagctttgggtattgattggctgcttttgaatcaaagctttgttgtttgcttgcctgtatgcttggcttgtaggtagcaaagaaaaaggccacagcatcttctaagatgtgctccagagtcagaggctgctcatggttgaagatgctcttctcgtttacctttaaagaactgaggtctttagagagtagtccagtgtccactttctgcctacatatcattccataccactgttacaactgggctactataaaaacagaacactatggaagttattagtccattctgggtataatatagcattgagtaggaagcatagttttgtgtgagggttttgatctttagagaggttccaaattaactttggttatttggtctattataccagaggagtgttaatgaatgtctgttacttataaaggattttctctgcattctttaaagctttttgatatgaattttctcttccaattgttaatatatctgcactgtggtttaatcaaagtacagaatagcaacaatatatttcacagttatcttggcaaagagttttaaagttgatgtgacttctacaagtagagattggtaatgccattagaaagttaaacagcaattgcttttaagaaatgaaaatcctttggggcctttatgggaatgtgaaataatctcttgcaggttaccatgaaggtctcaggccacaagtaatagaagtgcaacattttatttttaattactaattcccccctcactgctttattttaatttaaaaataaaaaaataaaaaatgcttaagtggaaattgtaaactcttttataaattatcaacatatagaactactcaagatagagttataaatgcatcttgcaaacagatcgcctctggtttgttcactggctttgataccttttctcacctcttgtgtattcagggatgtacgctgactcaattaagtcctagaggaggaagagtggggccaaaagtagctggcagggacatgtgtctcctactgccacctgacagcgttaaaaataatcatattttttcttgtcctttcctactgcttctactttgtatacccgctctgtctagcaagaggaggaaaattatgtatgctgagaaacatttaactcctaatagctaaattaaaagaaagaaagaacagataaattacaccataactatgatgtaatgttttgatgatctttctaactgctatcatttagctttttagtcatgctaggatccagatgaaagtatgtaatgttcagctttggtctcagtctacagttctcagatgaaaattaaatttatatttggaactgtttttattagctttgcaagtacatttttctgatagtttacgaagcactatacatgaaaatagaatgctatactacttgtcacaaactaacctgtttcattgcaaggtaaaaacaaatatttacatctctataaaaactaaaatatttttcaaagttcttactttagatttttaagtatccctaggggggcatattttttaaagttttcttaatattaaaattctgttgtttataatccctttttatgaccccagatggatcttcataataattatagtttacgaaacaggaaacattatctgtacattgactcttttttttttcatttttactctatcaggaaactaaaacccagtgcgtacgcattgctacaaaaggtaagaggtttgctttttttgcttgttttaactactctcaccccctttctaaaatggaaggannnnnnnnnnnnnnnnnnnnnnnnnnnnnnnnnnnnnnnnnnnnnnnnnnnnnnnnnnnnnnnnnnnnnnnnnnnnnnnnnnnnnnnnnnnnnnnnnnnnnnnnnnnnnnnnnnnnnnnnnnnnnnnnnnnnnnnnnnnnnnnnnnnnnnnnnnnnnnnnnnnnnnnnnnnnnnnnnnnnnnnnnnnnnnnnnnnnnntttctgttatagttagttctgtgactcatgtgggtgtctttaacaactaatggggtgctacttcccatcctctagtacttgactgaaggaatcttgttatgataacaggaaagatctagaaaaccttagaagggcttatttctgccatttagtgtctgaaaaatcttgtgctgctgatcaaccaatatcttaggaaagcgtcagcaatagcagatgaaaatagcaagttgcttgtttaaaaacctctattactttccattgtagacaatcaaacataaaaagaaccaagctaattcatgtttacataagattatagggatagagattagtccatatcttcatcagtagtgcagttagcttgaagatcatttactttttttaaaacttattctgagaaaccagatctgtgatggctagctcataaccagggcaattcctgctgacctggcatattatggcttagctgcctagtttctttgacaagagaaaacatttgcatctttgaatgagtatttagagttccaagtgggggaaagtctcctacattctctgtgtttttaattcttcatttaagagttacttgattgtgccaacaaagaataaattgctacttggtgtattctagcaagagaaacatgaaaaagctgtctgcatgcagacgtgggcctcctcaaagggttggttcttggggtggtttgctgccggaattagtagcagacccacatttgtgtccagtagttgattcatttggggtaaaaatgaatggccatattctgtttgtactggcatctttcctttcatcagttttctccatctaatcatcagtctgctcaatcagcatttgtgctttactcctgatttgtaaggcaataaagaaagactttctctttgacgcttgtgaataataaagaagctttatggaagagaaaaaaatatactttttcaattcacttatgaagattccttttggtagtttttatttaaaaaagcaattcttaaagagaaaatatacacagatacatacgatgtataaggattttattttaaaaatttagcttactgatcaggaacgagagttgaaatttttaaaagataatagaagaaagcatttaggtctatatcacctgtgtttttccagatttaaagtagaaccaaaattgtaaaagtgtcccacattgacctctgaagttctttagatatgtcatgctatgtttctgtaactgagaaatggtagctatatattaccctaacataacttttttattcagttatttcattatttgctcttgcctgagatgtttgtgtccttttatcgctctctcgatacaaatttaaaaaaatgacaaatatcacatgatatttaaactataggaggattgagatcctggaaacagtcttaccatgtggcatagaataattgacagaaactttgaagtggtaaaaaatagtccattatttgtctaataatccagctctgctacacttctggatctcaggaatgcagtgtggtgtggtgtagtgagtaagagaaaggactctggccttacactatctgagttcaaatattgactgtgtcccttaggaattttttagtattgagaaacttatgtaaaccctcattccaaaaattaaataatagagtacctacaccttcttattgttgtgaggattaaaataacatatataggccagacacggtggctcctggcactttgcaacgccaaagtgggaggatagcttgaggccaagagtttgatatcagcttgggcaaaatagcaagaccctgtttctactgaaaatttaaaaaaaaaaaaaatgttagccaggcttgatggagctcacctgtggtcccaggtacttgggaggctgaagcgagagcatcgcttaagcccagaagttccagtttacgttgagctatgatcgtgccactgtactcctgggtgacagagtgagaccctgtctctaaaataataaaataaaatatatatgaagtgcttaaatagtgcttaacatattataaacagtacatgtgttaactatcttatcattatgctaataattttgtacttaagagggacataacttatgttagacagttatgaatgaaatatgtataaaaacaaatctaaattttcgtgatcgagattgctaggacaggggagaaactaagggttttttgttcgcttgttttttaatgtttctgccctggtctaatatattttcttctctgaacctttagcattttttccacatatgaaaagctaaccctgtttctacaaaaactaaaaaaaatgagccaggcatggtgacttgtgcctgtagctccagctacttggaagatgggaagattgcttcagcctaggaatttgaggctgcagtgagctatgattgtaccactgcactccagcctgggtgacagagtgagactatgtctcaaaaggaaaaaaaaaagaaaagaaaagaaatgaaaaagaaaaactaccacatttgttaaagtaacatcaacttattgcctgactacattttaaactaacatgcaagtatggtcagctttggtgtgaaatttttcaatatgaaaataaaaagttttctgacagggcgttttgaagaaacatttaatagtcaaaatggcataatcatatgactgggaagaggcatgaaggaaccttctggtgaaggagtggttcagtatttcacaggtgcatatgtaggtaaaaatctgtccaactgtacatttaaaatgtgtgcactttactcttataaatttgtgtgtggatatataggtagataggtaaagtatttcccaatataaaaaaatgaattatacattaaaaattgcatggccagagttagaaacagcactgagaatattatagaggagtctctggagtttgaaaggctcaccttgctagcttcagtgaaggtttccttctatcagacgaggtgcatcttcagtacataagccactttcagtgagaaggacaaccctgcccaggaatccctgggctgaatgaaaagggtctagaaaggacctttcttggtcctggatgactcctatgggcaagtcttgtgtttcagctgccctacagtcagaccctcccctgcctcccaacccccaccccctttccagtgtcagttgtgagtactgaagagctagaaccttgctagaaccttgctttcctaatatcctttgtatttagatcaattttgctgaaaagaacttagttctctggaaaatctggtgtccctccataagacattccagtttgcagtgtgtccttttaccacacaaattttctgttcaggccatatgcaacagtctgttgctttttttctcatttttttgaaaacttaaaacattccaaatgtagtctgggacaaagtaccttgaacaaagtgtgtgtttctctcactcactctctctctggaaattattttcacatcccctttattttagaaaaagttgtattttgtatggagaagccagagttcattgttacatgttagtatcatatttataatagaaaataaaacattttactaaaacaaaaaaaaattatttagccaaatttgaagctctgatttaatagtcttatacatcactatatgccagggacaaatacagagtgagagtcatattagatacaataaatatttgttgagttggtaattgaatttgaacaaaacgtaaggtagatgcttctgctttcacgtttaatcaaacaggttacagtactgtctgcaattatgaaaagtatcagagcaatatgtgagttaagacaaatttattaaataactagagttgtttttatttctttaactgtgcatttatattgtgatatatatttcatattctaatatagaatacttttgccaaagctaagactttattttagtaacaaagcagtcagttaaaaatataatctataaactaatgtgaattaaattaaatttaatcctagtctgtgtctatatcagttttattcaaatgagttttcttcagctgaattctgtgataggaagacagtttagctcaaattgtcttttcattgtaatcactgctattcttatgaccatattctatagcttctttgctttcctggtactcacatttcaatgtgaaggacctattcaaatgaattaaccagaatgaatgagttgatatattagagcacagagtccaaagagaatctagctattattacttcttataataagtcttaaattcgggatacaggacattataatgagagattaaaattctatcaagtgtcttaaggatggacataactaagtagcataagaatgtaccatgttttgctaatgagaaactctgacttcattggtggatgtctttaaattttacagtcaaagtagaaataatagctctgaatatttttatagttctcaagcataagatcagaactagaaattaaaaaggagtaacacatacaattttcaacattcatcttttcccagcattttgaattattcttaaagttggcgacagttcaccattactactgtatatctggaataccctgtgtctaactgatttcatcttaattcacttcacattggaccccggaacctctctctctgctctcattgctagtataagtagactcttctccaccatgttcctagagaaatagccaagtcaccgaaacagaaaagatatgagttgaggaccttcaagggtgcatgatcactgttttcatcccaaccccaagttagatggaagttaaatatttctttgctttaaaagtaacaaactattattgtttgcatatggagtattactagtctaataatttttgacagaatgataactgggatgctaggatatagagagaaatggaaaaaaatagaacggacctgaagatgattcaagcattttgcttttatggaaattaaactgttttatgagaagatttctgacctattaccctctctttcctgaggagcctgttgcaggtaccttacatttatggccacgtctacgggagagaagtgatgacattcattcataaactgatcaaactgtcagtgttaactgtggaaaggatagagtttctaacctaatttgtaatgctgtaatcacatacttagaagagactggaaaaacataaattggtacaacctaagggaactaacttataatccatttcagcaaaaaattcaaaaggtaggtggttatatcatcaatattcaaaaatcaatagtgtagcagcaacaaaacagtattttaagatgttgtcatttataatgtatctctaaaaattagtgtaggaatatatctggtgaaagatagattacatctctacactgaacactacaaaatcttattgagagaaattaaacaatacctaaattaatgggatggcacaccatgttcatggattagaagattcaatattggtgaaatgtcagtgctcctacattaatgtgtagatttaaagcaatcaaaatcccaattttgttaaaaaaattaacaatctgattctaaagacaaaatggaaatgcaaaagaataagaatatgcaaggctactcttaaaatacagttcctggatgttatcaaggccaatataaagttagagtaattaagacagtgtggtaatagcacaagaataaaaattatgaccagtgaaagagaaactccagtaatagatgcacacacacgttcaccattttttatgacaaaggtaaaactgtagggaagaggggaaaaggtacccttttcaataaatgacagtttttccatatctatatggaagacattatatcttgacccctaactcacactatataaaaaaatacagctacatataagagttataacagtatagtttttagaagaatatagaacatattttatgatgttacaatagtcaaagattgactccaccatcctccaccagaaaaaaaaaatttaaacaattttttaaaaaaataataggcaaggattttttagacaggagatagaaatatgctaaacaaaaaggaataaatgataaattctacttaagacctctttcctgtcaaaagatgccattatgagagtaaaatagaatttacagaggagaaaagatacttgtaataaatatatctgaaataaggcatatcaaaaacatatttaaaaactattaaaactagtgaggagacaagagacaatccattagaaaatggagaaaacacttgagcacttaagagagaaggaaatacaaaatgatcaattaacctatgaaatggtgctcaacaggaaaatacaaattgaaaccacaatgtgattccactacacctataccaaaattagtaaaatgaaaaagtgtagaaaataccaagtcttaagaaggatgtaaaataactggaaatctcctaccatcctgctggtgggggtataaatttgcacaaccactttggaaaactgtctagcaacatggactgaaagtaaacccatgtcccaacaattccattcctgggatactcaccaaagaaatatgtatgttaatacacccaaaaacatgtagtacaaaatttatagcagcactgtttataaaagcaacaaactggaaataacccagcaacaaccagtagtagattggataagtaagttgggcatattcacataatgccatgctctaaagcaaagaatgcaaactatgactacacaaaataatatacataagtataaccaacattatttgagtaaaagccagacaacaaagaatatacactttattgtttaatttgtaaaaaagagataaaataactaataaaagttaaaaggtatgcagtacctatatagatgtattatgatttaaatattatattatctagatatgtatctgtctcaggggttcccgagactaccctcagattcggtgattcacaaggaggactcagtcatcctgtgagttgtcctgttctcatggctacgacttattacagtgaaaggatacaaagcagaataaggacagggagaagtcacatggacaaagttcagaggaagccaggtgcaagcttccaagagcctcttcctatggaatcacacaggacatgcttaatttctccaggatggaattgggacagcacatgtgaaatgctgtctatcaagaaagcttattagagactcagttcctaaggtttttagtgggaactggtcacatggaccccttcttgctatcatctgccaagattcccttctcccagaaggaaactagacttttagcataaagcacattatttgcacagtttaggcacaatgaaccactcttctcagggaatgatgggaaccctcccaaatccgagttcccggacatcagtccaaggtcaactttgcaagccgccctttccaagaatttcagtcttagtcctgctacgttaactcttttctgtacaatatctatatcaagtgtctcaagggctagttaaaagaatatttgaagaaattagagaaaattccaaaaattatacatacaattaaggaagtagaaaattggatgtagaaaaataattagaaaattaatcattattgacactaagagagaaatctgagggataatttaaggacttcctttagataatgagttatgacataagataaagtcacccatagcctgtatctcccccaaatccttccctaagtagagaatatgggcctactttatttgaaacacttctgaaaagtatttcttgaaaacactctttagaaccttctaagaaatgacagctcatttagtcatttgccattcagattgtataccagcttatataataccttgattcattaattatttgctgaacaatcctaaaaattatgtttatccattacccattcatacttttactatctttctacacccaatatgtatgcagttcaggttttcaaactcttacttgagtaaaaagggagaacaggtatttaaaagcatatttctagccaggcgccgtggctcacacctgtaatcccagcactttgggaggccgaggcaggtgtatcacaaggtcaggacttcgagaccagcctggccaacatagtgaaaccccatctctactaaaaatacaaaaaattagctgggtgtggtggcgggcacctgtaatcccagctacttgggaggctgagacaggagaagagcttgaacccgggaggcggaggttgcagtgggccaagatcacaccannnnnnnnnnnnnnnnnnnnnnnnnnnnnnnnnnnnnnnnnnnnnnnnnnnnnnnnnnnnnnnnnnnnnnnnnnnnnnnnnnnnnnnnnnnnnnnnnnnnnnnnnnnnnnnnnnnnnnnnnnnnnnnnnnnnnnnnnnnnnnnnnnnnnnnnnnnnnnnnnnnnnnnnnnnnnnnnnnnnnnnnnnnnnnnnnnnnnnnnnnnnnnnnnnnnnnnnnnnnnnnnnnnnnnnnnnnnnnnnnnnnnnnnnnnnnnnnnnnnnnnnnnnnnnnnnnnnnnnnnnnnnnnnnnnnnnnnnnnnnnnnnnnnnnnnnnnnnnnnnnnnnnnnnnnnnnnnnnnnnnnnnnnnnnnnnnnnnnnnnnnnnnnnnnnnnnnnnnnnnnnnnnnnnnnnnnnnnnnnnnnnnnnnnnnnnnnnnnnnnnnnnnnnnnnnnnnnnnnnnnnnnnnnnnnnnnnnnnnnnnnnnnnnnnnnnnnnnnnnnnnnnnnnnnnnnnnnnnnnnnnnnnnnnnnnnnnnnnnnnnnnnnnnnnnnnnnnnnnnnnnnnnnnnnnnnnnnnnnnnnnnnnnnnnnnnnnnnnnnnnnnnnnnnnnnnnnnnnnnnnnnnnnnnnnnnnnnnnnnnnnnnnnnnnnnnnnnnnnnnnnnnnnnnnnnnnnnnnnnnnnnnnnnnnnnnnnnnnnnnnnnnnnnnnnnnnnnnnnnnnnnnnnnnnnnnnnnnnnnnnnnnnnnnnnnnnnnnnnnnnnnnnnnnnnnnnnnnnnnnnnnnnnnnnnnnnnnnnnnnnnnnnnnnnnnnnnnnnnnnnnnnnnnnnnnnnnnnnnnnnnnnnnnnnnnnnnnnnnnnnnnnnnnnnnnnnnnnnnnnnnnnnnnnnnnnnnnnnnnnnnnnnnnnnnnnnnnnnnnnnnnnnnnnnnnnnnnnnnnnnnnnnnnnnnnnnnnnnnnnnnnnnnnnnnnnnnnnnnnnnnnnnnnnnnnnnnnnnnnnnnnnnnnnnnnnnnnnnnnnnnnnnnnnnnnnnnnnnnnnnnnnnnnnnnnnnnnnnnnnnnnnnnnnnnnnnnnnnnnnnnnnnnnnnnnnnnnnnnnnnnnnnnnnnnnnnnnnnnnnnnnnnnnnnnnnnnnnnnnnnnnnnnnnnnnnnnnnnnnnnnnnnnnnnnnnnnnnnnnnnnnnnnnnnnnnnnnnnnnnnnnnnnnnnnnnnnnnnnnnnnnnnnnnnnnnnnnnnnnnnnnnnnnnnnnnnnnnnnnnnnnnnnnnnnnnnnnnnnnnnnnnnnnnnnnnnnnnnnnnnnnnnnnnnnnnnnnnnnnnnnnnnnnnnnnnnnnnnnnnnnnnnnnnnnnnnnnnnnnnnnnnnnnnnnnnnnnnnnnnnnnnnnnnnnnnnnnnnnnnnnnnnnnnnnnnnnnnnnnnnnnnnnnnnnnnnnnnnnnnnnnnnnnnnnnnnnnnnnnnnnnnnnnnnnnnnnnnnnnnnnnnnnnnnnnnnnnnnnnnnnnnnnnnnnnnnnnnnnnnnnnnnnnnnnnnnnnnnnnnnnnnnnnnnnnnnnnnnnnnnnnnnnnnnnnnnnnnnnnnnnnnnnnnnnnnnnnnnnnnnnnnnnnnnnnnnnnnnnnnnnnnnnnnnnnnnnnnnnnnnnnnnnnnnnnnnnnnnnnnnnnnnnnnnnnnnnnnnnnnnnnnnnnnnnnnnnnnnnnnnnnnnnnnnnnnnnnnnnnnnnnnnnnnnnnnnnnnnnnnnnnnnnnnnnnnnnnnnnnnnnnnnnnnnnnnnnnnnnnnnnnnnnctggaagtttatgttggtattggacagcatcttgaattcaaactgcattgtaaaggcaacagcaaatcactgaaagtttttgaagtgaaagcaagttaatcccagctatatgtaacattttgggttaaaaaaaatctcaatagcatatatgttagattgatgcagttaaatagtagaggtgaagaaacaagctgaaagcctggtgtagctcttttttctcagccttttctcttttcttccctttttttccttaaaaattcatctcacaaccattggggtggggcagagcatggtaggacccacaccagtgagagatgaaagcagcagcagtggtcccacagaccttgtcagagcctgagtcggatggaggaggcagtctcacagagtatcagcctcgtgtggcatttcagaagtcagttagattcagaagcttgtcttcatggggacggtgggtggcacaaccccatgtgggaagtcagagcttgagcagggagtagagtgtccacatgtggaggtgaactgttggggttttggagcccaactagggtgagtagaacatcaacacagtaggcaatccaccttgggaaatcagagcccaagtgtggtgaaaaggggacttgtcagggacgcatagcatggtgtgaggtatcagaatccaaacaagatgaagagcttgggggtggggagtcagactctgagggaggttaagagggtgtccacgcaagagggtggcccatacagcatgtcagagccttatcagtctaggtgtgtgaacttccaggcagaggttgatcatgtgccggttgcctgagtctgcatggagtgaggagcacagccgcacagggaaggaggtgacagcagagatggcagagattacgtgtgtggcagggtgtgggggtgcagggagaaagttaaaaaacacaggtgaaactgtgtgtataggggtgtgtgtgtgtgtgtgtgtgtgtgtgtgtgttccatacacatagtccactgagacagcctgggagcaacaacatactgatggaaaatatgcctaatatccagatgttggtgtctaaataccattatccaataaaagtacctggggctctttggataaatggctcattccagggctggaacaaggaaagtacaacatgaaactagattattattattatttgccagaaagcgctaaaaaaataatgagggcatagcaagaggacacaattgccaacctcaagggggcccctcattggctgaactagaggcctattacttgagaatcaaaataaagatggtgattgattataacactgaataaaataggaaagcacaagtccttactgatataaatagagaaagatggatgagaaaccaggtatttacatagtttcaaagtagctcccaaaaacttaataattataaaagggtacagattaacctcacattggaagagcctagcagatgctttgaccaaatgatgaaggtgaacagtatccatgttgggaaagacattatggtttcccactaggatgcaagaaaagcacagcatcacttttgtgatattccaaccaaagatgtatatccttaatctaaacatttaaaatatcagacaaatccaaattgaggatattctacaacataactgagctataattttcaaaaacgtaaggccttgaaagtgaagggaaggctggactgcgcaggctgaaggggaccaaagagatatagcaactaaatataactaattagatcatttagatacaaagaacatcattaggacaattgggaattttgaatgggatctgaagtttagacagtagttaattttcttaagtttgaacgtcattttgtgatctataggaaaatgtccttgtttatgggaaatactaaagtattctggataatggaggcatcagggcagtcacttactcttcatgcttagtaaagtgaaaacaagggagtagtgtatttgcaaattttctgtaactttgtgtgtttttccaacatataagtgaattttaaagctgttatactaaaatatggggagcagatgagtgattacattaaagaataagaaataaggatatggaggatatgatggtggagtacaagttaacatgtcttggtgtgtatctgctgtgaacaaggaagctgaagacttaaatatgatgctgaacttctgtcctgagccaaccacactaggaagatgtgatgtcagtcacagagacagaaaacactagaaacaaaggctgagattaaaaaaaaaatgatttattccattttggaaaagccaagtgtagggtaccaaaaaatagctaacataaatgtaattggaaaaactagaaataaaagtgtggagaatgtctggaactagagaacttagaacttgggagtggtaaaaacatatgaacaagataatatagaaagatgaggagagctccttgcaggatacccatcttgagacagtaggaggaagaaagtgaggtaggagagaagctagaatagaagcaaccggatcgaaagatgcataaccagtggagtgccttgtcacaacactgacgaaaggaagatataccaagaaggggccttataaacgatagttaatattttaagcagcatggaaagctcaaataaaataggatgagaagaggcaactgggtttgcaaactgggatgtctatggttgagtttagaaaagggagcattcaattagagtgactgggcaaaaagatagcgaatagaagcaagactttagcatgaactggagctgagaaaataaagtggttggggagactttcttttccagaaatacattactgataaaaaggagattgctaggactttaatttaggaaagaattattaagcatggtagagactggagcatattttatttatcagaggaaacctaccaatggagcaaaaaatattgaatatatataagaaagaatacatttctagaggaagtaggcagtgatataattgaacaaatgcagaaacatatcttttaaaacaatagggaataattgaacctgtgagggcaaatggacaagtgacaccaacagaaaaaattgagaagtgtattagattatccatttaaacaaattaaatgaagtcctgtgcagagagtacaagtatcagatgtggaacaagagaccaggaaatttttaaaagtttgaaaattcttgaagaacaatgtgaaagaatttaaatctaagaacaattagcatacatactgaaataacatcattttgaaaatttttcagcgtgtaaaaatcattctaaaaaattcctagtatcggctgtatgccatgactcgtgcctgtaatcccaacactttgggaggcagaggaaggaggattgcttgagcccaggagttcaagatcagcctgggcaatataacaagacctatttctataaaaacttaaactaaaaattaaaaatgcttagtgtaatagtttgtttcctgccttgtatctctggtggcagccagcacataaagagaataaagaccttggcttgactattaaacatatgaattaaataatcagcatcataatgtttaaaataaatagtcatgtggttacatattatgatgcaagagaagagatatcctgggagttatgttcattgcagttgagacaaataaagtcactgagaagatatgcttcaagaatggagtggaagagtttatctcaattgtactagaaatcaagaaaggctttccatttataaaatagcctattnnnnnnnnnnnnnnnnnnnnttataaaatagcctattcaaaaccagaattgttctaaaatatgaaacggaatttggttagctgtatatttgaaagcaaaaaggagaatacgtctcaaggaaggtgtctgtgatacattaagaacatggagcaacactagagagtcacttgtacaatgagacaggatcattgtgcaacttgcatgctcactgtctttaggttcagttctctctactgaaaaaatactgtttgagattgtttgatattgatttgctctatctatttttttttttcttgaggcggaatttcactgttgttgcccaggctggagttcaatggcgtgatctccgctcaccacaacctccacctcctgggttcaagcaattctcctgcctcggcctctgaagtagctgggattacaggcatgcgccaccatgccctgctaattttgtatttttagtagagatggcgtttctccaggttggtcaggctggtcttgaactcccgacctcaggtgctccacccgctttggcctcccaaagtgctgggattacaggcgtgagccaccgcacctggcctatctttgtatatgtaatttataaagtgccctaattcattataccctcatgcacgcacacaagtatttgtaaattagcagctaagaattttgtgccatgatgccatcaagaatttatactgcgattatttgtttcttaaggaaactatcgtaacaagtaacatttttatggttagatttaaatgtgctgaatcatgcaaatatataaattatattaaaatttacttaaagaatctttaaaagtatttcactagaaatatgctttatccatattaaactaacaaaagaggcatttcaattgaatttttattttatattatttaataatatttagcatattatgtcatttaaaattttctcaatatgtaaatagttatttgtggaaccatgtacttgtttacataaaattattcttaaagtaaagcaagcgggcattgataagaaatcaagatgctgaataatccttagactaaaactaagaaacaaaaccaatggtatgggaaattgcaagtattgtaatctgtttatgtaagtagtttatattttgaaactactttggttgtatctaattttcccatcctgtgaacttctggattttttagaacaaaccttgttacttagcatttagttttggcagaagtttgtatgttagtcaaatctatttcttaaaaaacctgacatttccatagataaaagctatgaaatctgatagaatggaaaaatttctaatataggtaaatttatttgaacatagtatttatggtgaaagaggttttttttaatttaataatgtttcttgtctattcatgagccattttttgatttctgatttcatttggatatcaatatttctatagcaaatatttattttatgtccatagtataccagacagtgttgtaggccctggggatagaaaagtgaatagagtaaagcctttgcttttatggaacttaaattctagttgaaggaaatagaccaaacacaaacaaataagtacagtcattccttagtatccaaggaggactggtcccgggaccccgaggataccaaaatcagttatgctcaagtccctgatatgaaaaggcatagtgtttgcctgtaacctatgtacatccttctgtatacttaatctctagattacttataataccaaatacagtgtaagtctgtggttgtttgactcttcggatgcagaacccatgaatgcagagggctgactgtatgtggcatggcaaatggtgataaatcctttgaagaaaaataaagggtctggggataggaaatactggaagaatgtgtctagggcattactactttatatacagttatcagagaaagtctcgctggtgaggtaatgtttcagcagaaacctgaagggaatgagggcatcacccatgtagggcaggagcattagaggcaaagggaacatatgcggaaccttgaggagaatttttccttatctgctcagagaaggtgggtcaaatccaggggatgagctagaatgttctaaatcagctcttctcaaagttaagcttaagtcagaatcacttgggggcttgttaagcagattgctgggcctcaactccacagtttctaaatcactgggcctggaaagaggcccaagaatttgcatttctaatgagtttacccctgacactgctggtcaggtcaacaactggtctaagcaagtcccattcaccctctgccagtgattggtttagcgtcgtagatgtaatcctatcttggcatgagagatctaaggctacatcttcttagaacgtaggacttcaaagaaatgttttccttcctgatttataaacagagaggtgggaaggacaacccccaactcatcccttttacctaggggcattgttttatcaggatatggtgttcagaaagttgagccatattgtctaaacaaattagccaactcagagccctaacaaccatgaggttctcagatatccattgctggacttccttaattttagatatctgtatttgaaaaaaaaaaagtcattatggaaatcactactagtaggtaatctgttatttgcagcatatagtgtttgaactgatattaagtttttattttcccttaggaattttagtaaaaatagtggctagtttccaatatgtagtgtaaaggttcaggtatttcacaaatgattgcaagaaagcacttaaagttcatgtaacctaatcattaccatgatatttttaaaatagtgaatctctttcttggtgtcagtctaaaataccagaaaacactttgactgccttgccataggtactttggtggaacttatcttcactggcaccagatatagctggaaatcagtaacagacagtatccctagaagccatggaaagaaaaaaattccaaaagctaaggtatacatgtgggcattcatttttcatttgtttgataaacctaaagttgatgtataattactaaagattcatatagtctggagtttacctcttcattttgtatgtttatatcctgggaatgtctaagtcagattattatttactcagaatattacttatggtaagcaatgatgatataagtccttcctcactccctctaaaaatctttgacttcagtgctagcttgcactttaaacatgtattccaatattaagaaacaatcacttgttacaaaagagtagaagtacatgcaagattttatccaaaatccaaatacataagacataccagcactgatcatgttttgtctaatttctccattcttctttcttttgtggtctattcactaattacttgatgaagaatttgtttttttaaaagcattttcttcataatcttaattttgtctgatgctgcctttgtcaaatctttcattggtgcccttttctctgtgcagatggatgaaatgcttttgtaagtgacagacattcaaaaataacaaacatgagaagaaaaagaacagtttatctgtcaagaagttacagtaaaactgtggaagctccatttggttgtactccatgcgtttagaaactttttgactgaattcatttccattagagtcaccactggtgaacttgaacaactccacaatctccactcttaaattgcactcttgtgtttcatccctcacagaatttacaaaagtggagggtggtttaaaagcaagggtttaaaaaaatctatatttaaatgggcttcagggcctgaaatcctagtcttaatttcttaaattgtactaagatgttttatttttagtctgctgcacgttgaaggaaataggaaaacattagcaataaattttcagatacttttttaccacttttttttaaagggatggaagttaggatcaactgtggtagattcgcctagccattcagaaactttgggcagggatgtggcttttcttggtccctagggtggaattagcctggggaaagctgctagcccttctgaaaacttgtaatcagtgagcagaattttgtagtttttcctctgagtgcctgagcactcttgctgataatcacactcttttctcctgcaagggagcaagtgtgtatcattcttcctgcctgttggatctatgcacaagttgtcaaaaattaatctgatttaaggtttttcttttcctgaactcagaagggaggaaattacagaaaagtatattagtaatagagtaatagactatagcctgagggaaatgaaagcatatctaagcgaagccaagccaggaacaagtacaattttaatgaaaaatcaatgtttcatgacttagaactgacttttgttaggcactaatatttcctgcttttctgtcaacatccttatcattataaattcttttttgtttcaatataaaggtactaaaaaattaacagctaatagattattttcaacctgtttgcaaggctaaagtctctctttgcctttgaaaaactggagtagaataaaaatgttatattaccacaatggatttaaaggctaacgagtggtcaaattgttaattattcagaaatttcttattgaaatgaagaactgtctggatggactggactgtaaagttcatgagggtatgggtatcaacctccttataattgtgtgtgcctgatatttaaaagatatgtattaatctctttggaatggctgaattaattaatattgttattcagaatattatttagtacaataattcataattattcttttcaatgccctgaagatgtatcagtgttttttcctgctatattttaattttattgacataatttagaaacaatgtggagtggtcatttttcttttaatctaatacagaaaaagataaaatgtttatgaatagaagttctgcctttgcttttgctcctgtccccacataccctcttagaatggacaaaatacaggaagaaaacttttacctgagttcttaattttatttacatcttacattaattttcacctttttgtgagaaaaataggtttaaaaagtagttgattttttaaccttgcctccacctactagatggagagtattgtcattactgtaaatagaggaaagaaatgatatagaagcccatgacttcaagaagtttatggtccaactcatgacacataaacagatctgaaaaaagtaaagtctaggtaaaatacctcaaaaatgtgtgtgtgtaatataagtatgtatactatacgtaagtattctactaaagagataggaagttttcaagaacagcgatgatgacttgtggaaaatttctgagaagtcattaattctcatctacatcttaagaagtcagctgaactttcaactgggactgggtgtaagcagaggcagaaaagttgtaacagacaggctatatgaggattttccccaacaaatttattcatttattcaacaaaaaattttaaacactccctgtgtaccaggcatgattctagatgacagcattaaaatgnnnnnnnnnnnnnnnnnnnnnnnnctatatgtatactatatatatatacacacacacatatatacaaattaagtaatcaagatagttttgaagttttgatacataattcagtgaagaaaaaaagagcagtataatgtgattttgagtgagtttcctgagtaaaactaattttgaaaggatttcggataaatcctcactgagttgatgtttcagctgagacttaaatggaaaaaaaaaattagcctgtcttataagttgccagaagagcttaccaaggagaaggaacagcagatgcaaaggccttgatgttggaacaaactttagatattcaaggaatagaaaggatcatgaaggcctggtaaaccatggtagagaatttgtgttttaagtgtgaaggagagccactggagcatataaacagggaatcatgatttgatctgtgcttttaaggatcactctggatactccatggagaagagattgtaagctcctcagagtgtgtttagagcacatactgctgcaatggtggctaagactaagggagtggaagtggcatgagagagaaatgggtgtatttaatacttttagatacagatacatagtacttgttgatagattaaatgtaatgtaggaaggaaaataaaatgaagaatgataggtttttggcatgtgcgactaagtggatgagtttgctatttcatttggttttgtgacattgtgcaaaaaataagctctttgaaatctaagtaagttgaaatctatgacttctttcccagataggatgaggattgaaaatgttggatttgatatagtagaaaaatctattgttattagaaaatagaattatcaaattttccagtttgagttacttagcattatatattccaaatattttcctagtttcttttgtaggcattttagggatttcaaaagcatttgccctacttttgtaataaactatttttaaaattaaaaaacagtgcttaaatacacaaatctgtcatatacagaatactaaaaaatatggtcccttaaattttgccataaagtttctttattcctgaacagatgtaaaaaaaaaagttttcttctaattcttttatatgtataacttgaaattgcaatgttagttactgagatgatagtgtgtaataacattcagattctatatattgataacatgcaaacaaatagtacattaaatagtttctataatatcacatctatctttctcttttttttttgccccttcaagcaacaaaatgcattatttttaaccctatgcaaccatctttcttaacctttggtttcaaatttagaacacttcttttcactgattggctttatagtatgatattggtcataagtgaatttaaacttataaagttattaataaaatagttatactccatttcatatttctttttcaaaatgatttcatactaaaaagtttggaatccttgacctaagtcaatgccctcttcctatggatgagaagactgatgtttattgatgatttgattttctgaggcagtacagacagttgaaagtgtgggaacagaaatcaattccctctacttttttcaatgcaccacatttatttcacactgtccatgtagaatcatcagttaaaatgataatatatgttcaatccctattttcatatcaacaagaataatatgagtatataattaccagaggtctatcgtaataatttctctaatgtgtttaaagaacaagccagagatttttatttgatagagtatactgatagcatcaaactgaggatgccatttgtttattagggagaattttataatttagagtttttttcaaataatatcaacagtaaagtctaaattacttattgcctttaattctaggaatgtcgcattaagtgactaatgaaacggaaataactactgcccatgtaacttcataaatgcccttcatagacatttatgtcagagcaaagatggcaaaatacttgataatgacattatctccccctcacaacctttattttaatgctgtcaatcaaaactgagccagttaacatttctagagaataatattttatcaaatagataagttatttgtaatcatgataattcttggttggggcctctgtgataggctgaataatgtccccccacaaagatgtctacatctaatccccagatgctgtaaagatgttaatttccttggaaaaagagaatttgcagttgtgattaagttaaggatcttgagatggaaaagttattctgcattttccaggtagatcgagtgtaatcacaagagtgctgatacatgtgaggtagcagaatcaaaggcagagaagggatgtgatgacagaagcaaaagtgggaatggcctgctttgaagaagactggggccatgagccaaggaattcaggcagcctctagaaactggaaaaatcaagaaaacagattctctcccttgagtctgtagaaaaagaaagccctgccaacaccttgattttagtcccataagactcatttatgacttctgatctctcaaatatataaaatataaatttgtgttgttttaacccacaaatttgctataacttgttatagcacttatacctaatgaatacaaattctggcacctgcaagtgtggtcttactgtaattgatatctaaaaacatgaaaatgactttggaatcggacagtgggcagaagcttggaagaattttgaggcatatgatacacggcctaggttgccttcaacagactattagaaatacgaatgttaaagtgtgtgtggcaaaggtgcagaagaaaataaaggacatattggaaactggaggagaggggtttcttcttaggtggcagaaatttagctgaattgtgcagttctggggaaagccaaatttataagttatgaatttggatatgaggtaaggtgatttccaagcaatgttgaaggtgtagcctttccagacacacacacaaatgtatattatatatacacacttttataaaactatatatatagctatatatacacagacattaacacacaaatgtgtattacatatgtatacacttttataaaactatagatatataaaactgtatatctacacatacacagtcacacatatacacacatatatatacatatataatatataatttgttggtattatcatctatatgtagtggcagttcaaccttcactttgattatgaagtagcaaatgctacagaaaagtcttaagtatttttatacttagcaattaaaaacagacctttatattgaaactctacatgaaaaggattacattagttttattgcagtattatggtaatatgatttctgcctcttttttctatatttatccaattgcagggaaaaagtattaaaatccagtttggcctcattgaagcacatttgcagagtgttatagagcattggtttatgactattgccctattatagacaaacaaagtattctttatcctttatcagtgtagtgactgaaattatgaattccattcagtttttaatgaaatgtggattacttcaaagattatctatctgatttaataaatgcattagagtagaaagttaattggatctttcttgaatgaatggtgaccactatgtgtgattcataggagggaaagatagaatatgatattctttgagtttgttttatgtgtttaaaacttttaggttagaaaatcaatttttgtgtgatcggttttctcaaataaattatgtaacccctattgatcttacaaaaatcatggagaaattttaattcattttaaaataaaaatatcttaaattttgtaaaaatgggttattaaaaaatgccatatactgaaacacatgtgtagtttattgtgtttttagtttacaggcagagaaaatgaattttaccccaaacatctgcatagttctagatttgccacctcctgtttttgacacagatctcaactgagcttctaattttggaatcttgttccagttcttatatttcctattctgtattcaagagctcattctgtattaactggtaaagaggttatcatttctgcttggtttatgtagacactctatattcttcattgtttaacaaaatatagaaattcaggtgcttgcaaatatgatggtagaggtgacaaagtgatactcatcacattttgtatatcgttagtagtggcaggaagagccttacagtatgagtattactaacccttacgtacaaatacagattatcttttcgttaacaatgttactctttctgagagatgttcatgtgagagatgttccatattttcaattcaaacaatcttgtaattgctggctgctgctgttgttcacagcacttggctttgcatctgtgcctcttacaattccagtcttgccctttgtttgaggaaacttcctggttcttgtatacctcctgctttcttgatctatttgctgctgtttcccaggtgaaaacccaactgggctatgcatctgaggtagggatggtttcactgtcctagcacatctttcctctattcaccctgatcaccatcatcttggttttgactcttatttaaaaaaaataaaataaataaaactgctttgtattatgcagctattatttttctgacaagttcagccactgtggagacagtttgaagtaaatgtggctcattgttggtggtctaagaatgtctaaagactagagcaaataagaaaatgttaatagagagaaggaaaacagaggataaaaattgaagttcctaagaagtatgtagctaaaatttcgccttatctaattcaggcattttctcttggctttcccagcacagtacttcttagcgatgataacaacagcaaccactttattaatttgctttttttaaatttagaattcacatcatcatggtaacaacaaccatcccttgaatatgtctttgttagttgcttaatttgctacacctaactcttccaccaggcgctaaatattgggactattggccatccattcagaaagtattatgtgcttcctgtctgtaatgcactaaatcagacattgtgctccaaagaagagggttgtaggagggaaggcatcacacctgtatgcagttactatgcagagcaggcttgggataaaaatagacattggccacatctgtgttaaatcatgagctgtgacccttctcatgacagttccccagctctgctaagacacgttctttggaagaagttgcttcacttttcatttgggtagaatatttacagtccaagtaatagatttcctataatttagaatttactaatacttcctttaaacaagtatatgattatccaaaatgtatataggcttttttgattccagttttataaaacaaatcactaatccaatgttgtgttttaaatagaaactttgctgtatgtaatttcagttggcattcgttatatatttacttaatgtgggcatttcttttcagacttatttatgaacatagaccctatctgtatttctacgtctacctgagtatagaaaaatacactgttttttaaattgttatcctaaaatagtggtctgaagcttgcatttttgaacttaaaatagtgtcttggacttattttcaagtaagaaaatataagtattccatagcatgagtatatgtttaatccttcctatactgatgaccatttagtttattcagatttcttgggattacatgcaatgatgcaattaacatccttggttaagatctttacattctctgttataggataaattcctagaagcaatattgtcaggtcatataatatgtatacattttaaataattacagccaaatcaccctcagaataattatacaaatttacattccaaacaatatgttagaatacctatttctccatatccttatcactactaattagtgccagtctttaaaagtttcgcttatgtgatgggcagatatggttaacattttgtgatgtttcatcataacatgattcagttaatgataacactgcttgttgtaaaattgttgcatgaagaatgaagagacagttgtaaaattgttgcatgaagaatgaagagacaaacgcagttaactgttcaacttgtgtggtgcattttgttgcactttgaaaaatgaaaaaaatcaaacatttaaagtttttttattgatggctgctccttaagaaaagcctggaaatactttagtttgctttggaatgtctttaagtgcatagtggtcctgtcgcatttcctgagctgcagtagattctaaatcatcttgatttaagataggcttttttgtaatcactgacagtctctgatttcagaattctgcagacattgtcattgagtggagcagtatctctagaagttataagaactgtactttttgctcttaataaaaagtaaagtgtgtcaaaataatcaaagtggaagaaagcatatgtaacagccatacaaataaattgagattcattagataagctagttggtagaggcaaatgtgaagaatatttttaaattcactactaagataatttttttaaaaaatgttaacttaaagttgctatttttaaaatttgcataatgctttgaagaatgacagtaagacaaatgtcatcacaatcataaaaaatgtgtataaagtacattagtattttaaatttctcctagaaaaaaaaattgctgcatctcttccaagatatataaccaagttagaaaaaaaagttagataaatatgcgtattaccagttaagttcagtttgacttctgcttaccagatgttttgatagaagtctttttcagtgttcactatgatgcctgtttctcacattgctgtgaaacatctaagctatatatactgttttttgataaataacatatggttttgaaaatcagtgttaaaaccacatgaaaatttttaaagtgaaaaattcagttttactctcaatataataattgttttaaaaatctttaaaaaataatgttaaatttcaccatgatatgtacagctgtctaaggagtctattacagggacaaatagaagaatgttatacattgctcaactcaggattacttccttttttttagttttagaagaattcagttttagatttaaccaaataaccagtaatgtatacatctccctgatctgttgtcatgagcacaaaatttatttactgacatgatgctaagaggttttctgcagatactccaaatctgactgggttttgctccatttttctttcactaatcaagacttcagtgaaataaatacatagtaaaattctaataatgctagacttatttcccaaatgtcttgatgttaagtgaataataaactccagatctgattttgtaaatattattttaagatatgcattcttaaatcttgataggcagatgttctaggaggctccaagagagctcaattgggtaactctctcagaggactgacttgctccatatttgcatcatacttttgtgtggtttcattcacaggcacagttgcccatcgtgcaggatatcattaaatgacctaaattaacttttctgcaggaagtggaggaatctcaggataggagaatccagttttaaatacccctgagacttaaattgattcagtcttaatctgggatgactcaaatgacttagtatataatgtctcttgtttctctaaaagagagtctctcaatgacagaggcctaagtctggagatcaagtatgtagtcctgttgactgagaacaggcagaaaaatctgattaatccaaaggaaaaaggcgagggaggtggcagcacagtgaacagatttgcacccaagcacaactaaaagaatgagttagggagggcggggagcggcggcttgtggctgtaatcccagtactttgggaggccaaggcaggcaaatcacctgaggtcaggagttcaagagcattctggccaacgtggtgaaaccctatctgtactaaagatacaaaaattagctgggcatggtggtgcatgccagtaatcccagctactccagagactgaggcaggaaaatcaattcaacccgggaggcagaggttgcagccgagatcgcaccattgcactccagcctgggtgacaagagcgaagctccatcttaaaaaaaaaaaaaggagggaggagacggaaagaaatcagttcgtttattttcaaaatgatcaaggatgaatggtaggttcctttacaatttttgatgtatctatttttttaccaactctttattttctttatttatttcagtattttagtttattaagtacttgcagtgttattaaacatagactgaagaatggaaatatgagtaagatatgtgtattaattttaggacactcacatcgtagtacttgtccatgttcctttttttgcctttttccattgatgaaggttatcttctctcttgctcatggctaataattatcactttttctcttaacaaattattttattgttgttatcatttcttacctacaaagttactattctctgtacaactctgttgctagcaaccatcttacaatttggttatccataagaccaaattttgtctctaaaacatctcctgggtgtagctgctcccatgaagacaatatagctacaatggagtatgaatccatataaaactcagtagtcttattgggctcattctctcacagccctgggagaagccttggttgcctgtgtctctttctcatattttgaggcatgcttatggaacagaggtttcccaaccctattcagaccccaaatataacaactgtttgtaagaccctctgtactatgaaaaagaaaaatccattccattccatttaccaacatacgtaatttcaaaagataaccaaagttacctaactttaatattaaaaagagctaaaggaactaaaacatatgcttattgcctaaactgttgaacacaaccacattagaagacagaaagaatactctgatgtttgccactattctgagaatcaccaaatgcaactactaattatgcagactgtcctgtagatctcaggatgtctatcagccctgccctttcccactaaatattatagagtcttaatctaactgggagacccaagtgtccctacacatttcctagatgcctccagaaggcactatctgctatactgagaaccattgctatagaactttaccttcaatatcacttcttatttgtaatgtctgtccctggtggctctgtagaagattttgctctcaatcttccatgagcaaatagaaacttggaatttttttttctgtttcctaaaatagaatacagatatgtccacacttggaaatatgatatatttttatgagtatatcttcaagtggcagatcataaggtgaaatcccaacttgccttatattgtatcattaccatgttgtcgttttgtgtccagatgacattggcagtaagcagcgaaggattcagtaatgttttgataaaaagagcattaatgtaattatttatttatttatttattttgagacagagtttcactcttgtcacccaggctggagtgcagtggcacaatctcagctcactgcaacctctgcctcccagtttcaagcgattctcccacctcagcctcccaagtagctgagattacaggcacttgctacaacgcctggataattttgtattttttgtagagccgggatttcaacatgttggccaggctggtcttgaactcctgacctcaagtgatctgcctgcctcggcctctcaaagggctgccaggcttgagccaccgtgcccagccaatgtaattgtttttaatctgcatcatcttttgaataaaaagacattttaaatatcagaaaatgaccactgtctaaattttctttaaccagcataaatggatgtaaactaagtagtttgcaaattttcatgtctgtttcacttttatctttctccttggtaatatgttttctgacattgctgtgaaacatttcatattacttaaaatgtgtatctttaacagatttttcacttttcagtttaaacatttcacacaatccacacgtatttattaaggacttatatacttgacataacaccaattgatgtttcagtcatcaaatcttgaacacctacttctgattgtctaacccttctttttcaaattaacaacaaaacaaaccaaaacaactgtctcatacaactactccattctccaaagagaagttgtaaattataaaactttaacagtcttattttttctttgatggcctacttaataaatctaaagggactataggtttacaaccttggagtgttgcttttgatttttttccccctgtatcagtccctaaaccaaaacatttacagtactgtgtatatttaataattttgtactgactgcatgaagatataaatgtgtgaatgaatacagcttgttaaacatgcaagtatatttcttcaaagaagagtttacggattctttttccttagcaaagggaagttgtattaaacattgtggtggttgaaatgctgctaatcaaaaattggtcatcgatttgaatacatcttatagcttttctatcatgttgttggtttatttctgaaaacacaagggagaagttgattgggctgccttagctgcctttttctatggtgacaggtgtttagactttaatccctctaactgtgcacatagatgtttctggtgaaaagaatgtactgccctttgtataaaaaacataataatgataataatgtaagtttgagaacggtttagtctacacagttattgacaagaggtacagcttgtactggaggaccagtctggattcaagaagatggtcctaagtgtaccgaagtatatcttttcgtatgaagatataaagaatagaaatatgagtggtatttgaggtgtccgcatcctctttggcactcagaggactctaatcaaacccaatgttgtgtactgaactattcctgacttgtgaaattcatcttttatcccctactttaactttttttttttgagacaaggtctcattctgttacccaggctagagtgttatagctaactacagcttccacctgggcccaagaaatactcccccctcagtctctcaggtagctggaaccacagacacaagccatcacactcagctaattaaacaattttattttttgtagaaactagatctctctacgtagcccaggctgatctcaaactcctgggctcaagcaatcctctcaccctggcctctcaaagtgctgggatcacaggcatgcaccactgtgctcagctaccccaattttaccttttaaacacaaaagctttcattaaatgtaaagccaccatttcctttgactttcaaatccatgtatcagtaaaataaaacaaaaatttatttgaatgcaataatagcagacatatgctgttctaaaatcctcagaaatctggcagtggaaactgtgaagatagttatgatctcatgaagtttgaatatagtcctaaactctttggaatgagagatttgtcagctggattttcatgctctaaatctgacttcaataactttcactttctgccaagatgtatccattatacctcagtatctcctgatattctccaataaaatccactgtcaaattaaaagcttagttctgtcgtttgtgccaggccccaagtgctacccttatattccaaaatcagtagcgctttttccaagttattactcagggagtataaccaactagaaaaaaatttagaaatactagaagcatgttctcctagatttcctacatctatccctaccaacttcccaaagagccctgtagtatcttcacctaccttcctatcagctattcagacataaaaacagctgctttcttcctgggaagatcacgtaatttagaactggcttggggtgtacctctgggttaccaaaaatgattttttaaaaatatctgtcattcaagaaaataagatctggggtcaggtccaggcaatattgtcctgagggtgcttttcttcttctcgtggctgatattcccgcagtgacatatgatataatatgcactaagctgatactgcttcagtaaccatgtctgtgtctgtgacaggtgctactgactcctttcttcatgttattgatctaaaatattttttaaaatgtagaatctacaaaaccctggaggcctttcatccttggaagctggaattattgcatcttttcatccttcttaaagaggggaatgttttcacccttacagttaagttgacagttcatatgcgatgtttacttgactttttatatctggttacaataaatgtataggctgttaacacataataaataatgactcatatatttgatttaaaatttcctggattatctataatcagaatttagaatttctctcctagaagtgtggcgagctgaagctattagagctgtggcctttacaatcctttaacggaataacccatctcctgttgctgatctgaaccgcataactggctaaactagtgcaggcagcatgattcttcacacacaaccagatgccagaaagaagaaaaccacaaaggggctgaaaaacacagcatagagcccagaagcaagagggtaaggtggggcagaaaccaaccagcagtgattggaagggaagattaagtcaggaggcagggctcaaagggcatctgaaggtgagaggcagcagcccgaggatgcctcaggagtctgcgttgtacaagaagctggacattagagataggtcgcaggtcaaaatcagatagaattttgcgatcagagcagacacagcaaaccagaagcacttgaactgttcaaatagcaccttctttccacagcaagtccttgctgttgtgactgcgaatacactggtccactgaagcctgtgacacttgcaatttgggagcttatcacagccggaggaccctgacacagggtgagggtgcaggaaagacaggacatgagattgaggatgctgactcagacaggtcactggaccgttccagtgtttttcttacagggaaagagtgtaggaggcagtgcatctctttgtctttgtcacttaacttttggtgttctttaaactgttctaaattagttcaagatctacaaattgaaggctaaagaagggaggataaataaagcccagcccaagcagttttgattgtagaaacatttggaagtatttgggttgttaggggaaaggagcatagctgattttttttaaattgatttggagtttggttatttgtcatttactcattagttactttcctccccaacaataacaacaaaagataattaccatagtctgttcttacatgaaacactgagaaattttatgtagacattgaaattacttcatcagtttcttctgtgaatgattcatttcacatttcccagtcttatgtaaattactctgcagcatttatatagcattagtgtcatgcaatttgtatcattattgaacatttattttcttttcaaacaaagtgcaaagtgccagaggatgggaagtatatctttagctgcagtttgaaagaaaatgtaccaagcttggtgtcggatgacctgggttctacaaagcagtcgtgtacgtttagccaaatcacctgttcaaatctaggttgcccaaactataaatgcacttgaatgagtgatttttcaagaatgtggggcaaaatgaagtcagagcattcaaggctgtggtatcttatttctgtttcagctactgtgtctgtgctctcagtgtttcatatattgggtccctacgtatgattttattttttaaatttctactgctaataaaagtttcacagatgtgatagtgtccagtatttctttcaaatttgaagtttcatttgatttaatcattttatctatcatgtcatttagtgtaatttttgaacctagtaagtgtctaataaatatttgctggggaaaaaaatgaatgctatggttcaatcatgcaatactcagatgttcgtaaccatttccatgtgaaaagtttagtataggctgtagagaatgacattttagacttttgaggggaattatttttatgtcagcttgaaattcttcttgaacttgatttctgacttgggggaaaaaaagcaagcctgatgtgcacaagctttatacagagaatcaactgtttttaaaagaataatccagctgctatctgatcagccaggtaggagttgttctgtggaaatgaagaagccctccattttcagtcagagtcacgcatataaaggctttgataagattaaaataatccaagaatgcaatttcaagatgcacagctagaaacagcaactaagaaatatccatatcttacaggacacagctaagggaagagtcaggttttaaggaccgtctacagataatgtcaggatgtacagataaatatgagcaactgctgattgagctagaaacactgctggttaagttataaatcttatgatttttacccttcaaaatgcctctttccttgctgctttatatttttttaaagagcggagtatgttgtcacttggaggttgtgctgctttcctgtgactttagtcacctttggtgccctggccagatcccttttaccaagcctgtaaaatgcccagtttccgtcagtgttagctgctattggctcacagcccccacttctcttcagaatcacttgtagctgaaaaacatttactttgccaaaccttatgtgcccatctcccagcactatcagctcatatctgatgactaactgacatggggaatacaaaaagccagtgccctcacttcattaggtcaactctggggcaattcatgctctagtgctccccgtgacatcaggctgaagttagacttatgctaatgccacattctcacttagctgctttccctttcctaccctactttcctctctccttttcatctgacaacactcccttaataaatcatgtgcatccaaatccttgtcttaggctctgcttctagggaacctaagcagtgatatttttgagagtatagattctttcttcttttatctttcatcctcaatctccagcacatctggatcatgatgctttacaagtattttgaagagtaagcaaagtaagaaatttggccttcatttggtgtgttagttagtccttgcattgctataaagtaatatgtgaggctggattattattattattattattattattattattattattattattattattttgagatggaatctcactctgtcacccaggctggagtgcattggcactacaacctctgcttcttaggttcaagtgatttttctgcctcgcctccccagtagctcggattacaggtgcccgccaccctgtccagctaatttttgtatttttagtagtgatcgggtttcaccatgttagccaagctggtcttgaactcaaatgatccacctgcctcagcctcccagagtgctgggattacaggtgtgagccactgcatgcagtcagagactgggtagtttataaagagaagaggtttaaatggttcatggttctgcaggctgtagaggaagcgtagtgctggcatctgcttctggtgagggcctcagggagcttacaatcatggcagaaggtgaaggggaaccatgtatcacttggcaagagagggagacaggagagggaaggtccacactctttaaacaaccagatctcacaagaacactcattactgtgaggatggcaccaaggcattcgtgagagagccaacccccaaaaccaaaaacctcccaccaagtcccatctccagcattggggaatacatctcagcatgagatttggagggcacaaacacccaaactgtatcagttgatcaagaactgaccatggaagatggatagttgaagtcacaagcagtccagcacaattctaaccttaccatgaatctgaattcttagctcactaaagatttaggaacagaattggggagtagaattatggtcatgtaaaaatagagtccgtttaacatcctaaccttaaatcagaaaccatcaaagcatcatatcaacaaaaaaattgttttcacttatgaaaaatatgaatattaacacaattttgttgcacacttactctctgccatatgtcttacactaggcattgagaaaatactaaaaatacataggatatgttccatgctctcaagaagttgtgaattgtgaaagaacctgatagttgaagtaataatttcatgcagtgtgcctaaacatgaaatagaattccatacaaagtgacatttaaataggtagaaaaaccagagaccatatccacactggtaacagcatgggcagaggtttgcagttagacatgaaagttaatgcagtgttcaagaatatactgaggagttagtaagaaattaggctaaaatgtatgttgatacagatatgagaaagggctgtaagactcaagattcactttatcttgagggcagggtggcagctatcaacagtgctaaagcactttctcttccactttaaaaattaaaacagtgtggtaaccttaaaaggtgttctgaaacaatattctaagcaactgttatcacttttgctttttccttttttttatcaggtgcttacttaaacatttctcataattgcaaagattgtgacttgtaattatttgtagttactattttaccatgagctttacccacatttttatgtgttttaattttaagtggctaaatattattataaatagtgtgtgcagtataatttatattcgtcattttcattttccctgaaatctttgtaggctattaagaagaacaatgataggatcatatttaagttttagaaaaatgacaccttaaaagctgcaggtagattaggatgagtaggacttggagtcagaaacttcaataagggagtggctgcaatatagactaggaaagaggtgataccaacctgtcagtgtcctcatcggtaaaagaagatacagctgggcacagtggcttatgcctgtaatcccagcactctgggaggccaaggtgggcggatcacttgaggccaggagtacgcaccaacttggccaacagagtgaaaccccgtctctactaaaaacaaaaattagtcaggcacagtggcacacgcctgtagtcccagctactcgggtggctgaggtaggagaattgcttgaacccaggagaaggttgcagtaacctgagatggctccactgcactccagactcggtgacagagcaagactctgtctcaaaggaaaaaaaaaacatacaacaagcctcataagtgcttgtgaaagctaattgaaataatatattaaaagagtttggcatttagaaagctctgaaacgatcattcatttaacagaggaagctatgaacattttttttttaaaggtcagtttgacttttaggcacctgatttcctgaaggactctttgaactctttgaatgtgggtactgttttatgcattttcatgtgataactaaacagcctgatttacattcttgcccaatatacgtatttcttcaaataatgaactaatgaattcccgggcaataaataccttttggttaaatggacaaacagttctgttcagtgggaaacatgctagtagagtctgcttttaaaggaattgctgtatgcagtattctaagaaataatgaggaagtatttttacttcaaaatactttgatcataatatgatgataggtattttcttctcttgcctgtgaaagtgtgtgttaggtatgtacattatggggccaaactagtgattgttgctaattaggatatatgtggcgcattctatcaagaatcccagttttctgggcactgtgagctgtaagtcaagtcataaaaaggagtgaattgtctttttcatatatagcactgaaattgactggagttaattatttaatgcctacctcccctactagactacaggctgtgtcacacacctccctcagcatctagcacagcaaatggatttagtaatatttattgaatagattaagaaatacagagtgaataaaataggacactggttggagtgttgggtcaaccacaattttggtgtgatatattctacatatcacagtgagaaggaaaatgatataaaatgaataatatcctccttaaagtactatacaaaaagaatacttcttatattttttcaagatgatgtaatcttgtcaaatatataatatgttgcatgccagtgctttcttaatccttaatagtaataccagtaattgtatattaagttcctgctatgtgtcaaatacttctaggtactttaaatgtatattcagtaatcttcagaacaagcctagagagcagaatttagttatttcattgtaaagatgagaaaagtgggtctcaaaaaaagcagataacttgtcccagatcacacagtagtttttcttggtacctggagtgattttcatccctctttcaaatacaaccctttggctattgggaagtagctattacaactgtattttttctttaacttgatgtaagggaaagaccactttacacatatacaaataggagaaagttttgccagaccttctgcagctagtatttacatgagtgagtagagaattgtaagaggttctggtagcagtaaaaacaaattacaaacaacggaacatgaagagaagatgttgtctaccaacatctgtcaaatatggcagatgatcttctttgtcttattttgttcaataccactcaatatcatcacttaggcctctctctcttactgtttagatctcttgggattctcttaattttttaaagcctataccttgaaaaattctgtttaaaaatacattggaaagcatatagattttagtaggctgaataatggctactggaagataccaggtcctaatcccaataagctgtaaatgttatcttttagggaaaagcggtctttgcaaatgtgattaagtaaaggatcttgacaaggtagattatactggattaacagtgtgggccctaaatccagttacatgtattcttataagagcaaagcagaggaagatttgacagaggagaagtcaatgtgaccacagaggtagagactggagtcatgtaaccccaagtcaaggaatgccagcagcactggtagctggaaaaggcaaggaatgagttctcttctagagcctcagcagcgagggtaaccctactgacaccttgattttggcccagtgatactgctttggggccctctagttcccagaactgtaagagaataaatatgtgtggtttttagccatcaagtgtgtggcagttttctgcagtggccttgagaaactaatacagacatagaaaattattttatgactttttcttttagatgcagttgttaagtcagcatttgatcttatttgagctagatagaaccagggttttctaatctacaaactattgattttcatcttgatttaaatgtgtttacttattcttcctctataaggtaggacaattttgcaaaagatgtataagaatgtgtgtctcctttcaggttcagctgaaataatcttcatataacaaaagttagagaaaacaatctgtctgagccagagacttcgttatatgaattcatacaaactaatgaaggaatacaaaacttggcctcacagggagagagtggagtgtcttatgcaaatctttgttgtcagccacattcctacatgcagaatgcaaaaaccatgtttcagtttgttgaggatttggaaatagcttgagataatcttaatttaaaaggactggcaaattctttcagctttgtagaatttattccacatatgtcaaagacaaacttgttgtactgcaaaataaactagtactgtgtgatcttagttgaaaaggtaaatattacaatttacattctattctctcatattcattcttttggtacatgttaataaattgcaaaactatattgctgaaaaatctaatgatcctgaaaaatctaatgataaattctagcaattatcagtgattacaatataggcctggtttgttgttgttgttgtttttgtttttgaaaaggaatcttgctctgttactcaggctggagtgcagtgccacgatctcggctcactgcaacctctgcctcccaggaggttgcaattctcctgtctcagcctcccaggtagctgggattataggtgcctgccaccatgcccagctaattttttgtatttttagtagagatggggtttcaccatgttggccaggctggtcttgaactcctgacctcaagtgatctgcctgcctcagcctctcaaagtgctgggattacaggcgtgagccaccatgcctggccataggtctcattttgtacactaagaaaatgtcaaattactaattttcatacttagtgctaaatttacatttatcataaatgtaaacatgtaatagagaaccagtaattttttattttccttaaaaatgatcctggtaaataagagaattgattcataagatcatggtttgttgatgccatagcaacataatcttatattgagaacatcatctgttacaatgcaagtagttgtggccatgtgcctagaatagacttagttattaaagtacattgtgatatgatagaataagatttgtccagatgtttacagagctcttacaaggaattattttagtctgtttctaaattattttagtgtgttcatctgggttgaaatgttatgtgcttaaaggattgagttactgtgatgacttggaatatttaagtagctttgaattgtgcgggtatgttaaatgcctgtttgggaaagaaaaataatatgagtgaacagagattaaaatttgtgaattatctgattgccctagagatgtctctatttgagtttaaaataagagattggcctggtgtggtggctcatgcctgtaatcccagcactttgggaggccaaggcaggcagattgcttgaacccaggagttcaagacaaacctggacaacatggaggcacctcacctctaccaaaaaaaaaaaaaagaaagaaagaaaacattagccaggcatagtggcatgtccctatagtcccagctactccagaggctaagctgggaggatcgcttgagcccaggtgggtgaggctgcactgagccaagatagctccattgcactctagccctggagacagagtgagaccctgtctcaaaaaaataaaataaaataagagatcgaatagttctgttttaaaatagtctaggtgagaaatgatagtttggttttttttgttttaatcatattgtttaaaagaatacttcccagcagagttttattgggaaaccacaccaaaataaggaacatgctgggggcaaattcagtggtgaacataaatctgaatgttaagaagacaaaggaggcaacaccagctccagggcagaaggagagttgagaaagttaggaggggctgacactaccaatctagcatccagagaggtttgatgaagaaaatttgactttagggagttgtgaatttaagatcagaagtgatttatgcgtagaaaatgatttctgtcatttcacctgattcttgtaacttcagcttgaagtttctaatttcaagaaaattagaaatcactcgtcagctaagatttggggaaaactgttaatagtcacatgtgatgttattaacaatttattggatagctttatcgatcctgtttctcaaattatacttggttttacagattttagcctttggtttgactcttcttttgccccatttttcttggctgctccagctccactgctgagttcactacaggtcagagaactgttcagtatttttaaagcagaaaatgcggtgaggatgggattttgtaatgtaagtttttaatctccgtatctgagcattttggttcgtgcagtgatcccaagtagctgagatgaggcaggctccagtatcttaacctactaagtatgtgtaaacttgatagagaacacaattttcctttaaatatcttagctctctagtctctcaaattgtgaaaacatattgggggcagattgtgaaagaaatatgttcataaaatataaattcagtgatatccatggaaagagcaaactcagagtgaggcagatggaagaggaataacttggatcatccaggtgggttaggtgttccaggaaatactgaggacccccagccagctgtttgatctggcaatactggaggacggtgcctcagcgatcccttcaaaatcaatgaagatttttcctttactccgtaagctgggggtcattgacagtagttggactcatttggagtgaggtgcatagaaactggcttttaggaattcaaaactctcatggaatatgtgaaccacttggattcagtggatttgaaaataatcgaaaaagtaaatatactaaaggtcaaggaaaaatgaagtcacttgcttaaaggctgctgagtattagattttaagagaagaaacgtaagggaccaaaagttttcatggcaaaaagacaaaacaagcacccctctgtcccccgaccttccagccccgctaccaacacacgcagtgttttatgaagtggtcgcaggagaatctgaagcagccataaagaagaaaggagtatgagagatccaactgtgccactaacaggcacttaatttcttctgagaactaatttataccaactactctagcttttcaaatagcaagcaaaagccaatttgcatttacattgtaaaactctgttttccaaacagtggcgtacagagtgttggtggtcaaatctctaatgtaagcgagggatttggggatcaaatatttcctgaattgttactctttgctagagagtcaagataggcgctggtatgtaccctccaagaagaaataaatggaaaacacacacaggaaacaaacctttataagctttcttcaacattatctcatataattcttagaatatatataaaagaatattactactacattttatagacaaagaaactgagattcaagttatgtaacttccccaactctatacattggtgaatggtcacttcagaaagccttgctccttctaaaactccagcctacctctattaggctgtgatttaaagttcaaatgagaaacacagccaacaagtgcagagaaattccgaagtcccttgggggattgagggctggaaaaggctttgtggaagagatgaaactttctttctttttttttgagacggagtctcgctctgatacccaggctggagtgcagtggcacaatctccgctcactgcaagctccgcctcccgggttcacaccattctcctgcctcagcctccctcccgagtagctgggactacaggcgcccaccaccacgcccggctaattttttgtatttttagtagagacagggtttcaccgtgttagccaggatggtctccatctcctgacctcgtgatccaccagcctcggcctcccagagtgctgggattacaggcgtgagccactgcgcccggctgaagagatgaaactttcttatcaaaagggtccaatttagacaagggaagatgttgagtataaaaaggttgattatctagaattggacaatctatagcccactgaagtattttgggtgtgtttgttagatactttgagaattagaaattgtgaaatgtagttattagaaaattttagacagccaagaaccatttaaaaataaggctcccatcttttcattcattcactcaaggccaaaaaatattttaggattaaaaaccaatctcaaactctaaaatatttattaataatttagactttatactaaattatcttggaaaagctagagctcaactaaaatcattttttaaatctggttcatctgtttaatattaaggcagtctctaatttagtaaataaacacctctaaaaattgtagtgcaacctctattaacgtgatttaaaccatgttgtgtattctcctgagatatgccagattaaggaattatcgaagccttggtggaaaatgacctactcaaaatgaaaatggaattcataactaaaagcatcccaaaaaacagctagtcttaacccttcatttcgtaaataagcagagtgggaataggtttaaaatgtcgaccatctttactattttagatcacatcacgttcttataatttgagcactagtaaaggttttatttgttttctatttctttctctaatattcaaatgtgattttgttcctgtttgtgctttgaatggcatgtttggatgactgtcccagatctggcattctgagattgtaccactaaaaatgtcaagtgcatttgccttttaattacatacagtacctggattttaatattttagatttttccctgaagaagagacttttctggtcctgtagtttgtgggagggaaaaaaatatcactgacattatcatgaagctttttcccccaacgtctccatatatccacatttatcatttcagaacaatttcattttgggtcaggtttagttgttctgtagcttactttgctataaacactatgtttaaatatataattccgcactgtttgtttgtacttctttctcttatttcccattaatgttcagctcagcttgttttactcttaataggccattactacttggatgtcacatatgtaataatcagtatgtggaaggtatagtttcttgtgatttacactcctttccttcctttacctttggcataaatgtgaaccagctcattactttccagggtatttctttttttacttccccaaattaaattttaatttcatcctattgttattctctgatttttattatttcaggtgggcaaaaaagtcttatttgtcaatgaaacaactccataaccactgaactcccttttgcacctactacatagacaaggtacttaaagcatttttgcttttgagatgatacagttcctcaacttaaaaaaacccacaccatctacctccgtgtcttcttcagaaaggtcttctctcagctccaaatctaacacagtcaccaaggcactccaccttgtccttctattttaattctcagtatggaagtcctcactatcaggtgatccttgtttacttgtctattgtttactagacaacacagggatgtaaactgcacgagagtggagatattctctgttttgttcagtgatgattcttcaaaccctagaagtgtgccaggtacatgccagggacaacaaataattcatttaattaatgaaaggaaggaaacaaaaaagtaaatgttttctttgtgtgtttaagatggggcatggaacatgtatttttttttttctttttgcttctaaggcttcctctcagaaccctcccagattccattcatttgtctatccatttaagtctgcttttatttgtccccaaaagaatgtgactgactgccaatttatgtgtatttatatctccccagcttttcctttctttttgttaggtagtagttgaggttgacacctctattgtatcccccacctcacccccatgttttgaaaaggcagtgttaaacattactcctaatataggcagcttaatcacatttctcccaagtgaaagtgccagatgggagtcagaaagcataggctatatttttaattatgtcagaagttaatactagaactattaaaaagccactttcctctcctgagattgtctttctttatttgaaaactggagttggactttttttgttgaatgattctaagaaatgttttagattgtcaagaaatcagatacaaattcatccccctgtggaggagccctatctgtgcctcttctgtaataccagtagccatggtatgtattgcagtatgatgctaataagtacagtcatttgagtacttaccatattcttcttctagtttatacgctctctaaaggaagaacacttgttcatctttctggttttttagcctagtacaatgttttgtacccatcagataattcaacaaatacgtactaaatgataaacaataacagattcttatctctgttttttttagaaagtagacttccctccatctaatgctgcttctgtgatgctataatatttatggtgcagaaatctagatttagaaagagaactttattcgaatctgtttatacattccctaatacttactgaggctctatgaagtaccagatattgtccttagcactttacatgtttcaatacatttaatctttgagtcaatctagaaggtagactcaatctccattttaccaataagaagtgaggagcagtggttaacttacctaaggtcaacttgtggcaaagctggaattcaaactctgattaatggttttgttttatcaaaaaaaaaaaaaattaaggccacctgacaagaatgttcactattagtgtttttccagagatgttgaagctctttaccaactgatgctatgaaaagcagaatttttctcttaaagaatgttttagattttataaattagttcagttaaccctagcattaatgtatttgtttcaaaaaaagtttaaaactttaagcagtatattatagttgataaatgctcttatataagtagcataccttgacaaattatgagcatttttaatatgttacctattcattgggcaaatatatattaaaagtttataatgtattggtaactatgtaaaaatcattagccataaagacatgaatgagattatatctttgcccttgattcgctccagacctagtgtgagttgtagacttgctgagaaatatttgcaatacaatttttatttgggttatgggaaaatgattaactggtatttagaggtgagagggtagttaagggaaaggtgttaggaacactaaagaacataaaagcccatgatcccacttcccattttggaagcctggcaaattaggttctcagaggacctctgcagaacagtcctaccctggataggacacatctgtggatacattgctggacttacagtggctggtggagatatctcaggactcactattctgccaaatatatatatatatatatatatatatatatacacatatatatttatttatatatgtataaatatttatatatgtatatatatttatttatatattatatatatagagagagagagagagaaggagagagagagagagtgagagcgagctgaaaacagtgagcaacaggcagaaagagaggttggtaatacctgaagggggatgctaaaactatattgcccttgagacttttatcttcagactggtaataagagtgttgcctagcctgggactcccatatggagctggcagaggtggtctgaggtctgagacacctcatagctactggtaggagatgtaaattatctttgagatgaaagcatgatcaatttaggcctgcagggttcccacaggctaacataaagcaattaactcacaatcaaaggtcaccaagcattcttgaaagtaactcactttcaagagtgagagttagcagaaacaacagatgtaaatcctcaaaaaaactgcaggtattgggattgtcaaatacaaatagccttgtacaaaatctctaaagaaataaagtgcaaatcataaagattaacaagatgctatcaggaataactaaacaaagatccgtttacgaagaaccaaatggaacttgtaggaagggaaagcataattgttcaaatttaaaaataactctttggatggacttagtagcagatttggcaaaatgaagagataatttattagctagaatttaaatctgaagaagttacccagaacaaaacataaaaaagagctaagatgctcaagaagaaaagaactaggcctgggaatatctccataatatatacaatatgttacagaactatagtagttgaaatcatttactgtcagcacagaataatatgtttcctctaagaataaaatggaaaatccagaaagtgactcatgtacttaacgtaattttgatataggacagaagtggctgtgtagatcattggatcaattcaaaagttatgcacaggtaactggatatgtatgtggggacggaggaggacctgaaacaactttctactatacatcttggactcttttaaaactttcaaataaaaaagaggatttttgaaaaactcagctttgaaggagcttcttaaacaataggccctaaccataaaaaaaaagattgatatatttgacttcattaaaattaataactgttattcataccataagtaaagtaagaagaaaagcaactgatggctttcagggcacattaccccaaaatatggcaccttggcatactgaatattttaacctgaaaaaagttggagaaagtgacaaaaacaggaagatctctctgaccttcccttgaagcagatcataagaccctcatatgagaagtgtcctccttatagctaggggggaaaataaaaagcacctttctttccgaagataagggacacatagaagaatctgaacaaacaggccttgctaagttttctgcagtttactatacttagctcatactcttcgccctatcatagtcctttataacgtcacccttcatcaaacctgctataaaaacactcgggtttaactgttgcattagttcttcatttccttatgaagtctaccatgacttgtaaaacttatattaataaatttgtatttttctcttcttaatctgtcttttgtaataggggtcctagccatgaacttttaacatcttgaaaggatggttttcatcccttatacagtctgataggagaagatatttgtaatacaaatttcagtcaaagctatatactgagcatttcagagaaaaaaacaggtagagatatttcaggtatctcaaaaggtcattttagtagtaatcaaatatgtattacatttcattttctactactgaagtgacaaaaatcaagaaggctgataatacaaagtggtaagatataatttaaatggggttggcatacgctgctggtgggtatgtaaattggtaatagtttggtattatcttgtaaagctgaatatttacaatctttgttttatcaaaatgggatggataaaactcagggaccacagtttgccaactcctaaaataaagagtatttgagaaatggtgaaaggattttaatgataagagtatatgaatgaaagtgtctcagaagatgaggttgaaaatgttgattggcacctgcttgtgaaaggccgtatgtgtcataacttttgccttttcctcttgaatgtaaagcagtgaagtcatttcttcgcatttaccttttagaaaactcatccaactagcaatatgtaggataaatctgaggtagccaacatgggaagcaggaggactagtgaaaaaacaagattgggtcttgaaggcagtcgaaggtggggtggagaattcagaaccaatttcagagagaactaagcagatagaatcaactgtgtttaagaagtaagacagtgcactaacgctctattttacctaattgaatgaatttagtgggaagcttgatgaaaaattaatatgcacattaaaacatttcttcttcattactatgaaacaaaataatattttactttttttaccattatatacattcctaaaatatacttattttattgctttcttaaaaagtatttctgtcacttcagaattttgtacagcattttgaactgtgtttttaaaaccaaaacaaatttagagactctaagactagaaggagatgccttaagcagtgtaaaattaattttcaatatctgcagtattaatctgtaattttatttcttagttgtttaaagtcttcatagacttttgcactattttccacatcagaaatctttggatcacgtccatatcattattaaaggagaataaattattttccaactactgttaaagcacgtggcatttagctgctctcttttctcaccagtaaaatctctggtagaccctgttttagtcagtgatctaatactgggcaagtttcataagatcacatgcaatgaggaagccaaattacttcaaaagatcattgagttaaataatacatacttcaagacacccataaggtttaggtgtccagtgtggcagcctgtgtaataaataacatgtgctttacaaaacctgtcattgtatatttatataataggcagctaagattttttaaaagctgtttttcagtaatttcatttttcctattcatagtttttcatttctatgtaatggacccaaagaactgacatctagattatctctacctagagcagcagcgtctactactatttctactatcccatgtgttttagtttacaaaaacctttcacaccattatgttacttggtattcctaaaagctacacaagatgggtaatgttattaatttttttttatagatgaaggcattcactctaaaagattctcacttgctcattgtcacacaacagataagagaacaaactaagaatcaaaacagggtcttgctgatccaatcccttgtgctttcagtgacactggacttttcttgcacattggtttggtgataggtggtgacagatggtggaaatggttagctctataaaggaatgtaacaaaggggcttgaaatttccagagacaactcagaaatgtttgttatcaagttcatcttatgttaatgtccacaacagtaagagatatgtctgatcagagacatccttgtgttttttaaggagataactgattttctatatgccagtgcaacctagcttaggcaggcttagtggtggtctttcatttattcaactaatattttctgttctgttgctcctttttaggtcctactagaaattcaatggtgagcaaaataaatatggtttttgctttcatgggctttaccttaacagcaatgggaagctattggagggctctaatcagtgaagtgatatgatacagttgaaatcctagaaaataccgtgtgctacaatgtgggttttgaggtggaacaggcagacagtatattcagagatttaacataggtggctgctgtgtgatctgcctgagaggatactgatctgaatgaaggtagtagcagtggggatgggaaaagtgatgacaaagaatatttaggaagtagtaattttgtaactaattgtgtgagaaagtgactgtgcattccagtttgcccaagataattccagtttttgttttccttcaaaagcatcccaatttggatgataaatgttaatcctagagataaggaaagtggaggattcaagaatgatgcataggtttctggcttgaagaactgtatggatagttttgccatttactgaaaggggatacactagaaaaagaactggcatgagataagattatgagttcgggttggacatggtgtgcttaaggtgactgtcatacattgacgtgaagacatattaatcacatgactccatgggtcaggaattcgggttgcaacttttggtcagagatatatcgattagagagtgatcagttatcaggatggtaactaaagagatgaaaatggataagatcaccaagccagaaagtatggaacacagtgtcaagaggcataggtccctgaggaactcaaaggggcacctatttttaagggatgagcaaacaaaaatctggaaaggagagaccagagtcctcagaaaactaggaggtacccaagttcatggaagtcccaggaaaagggtgttccaagaaagagggagtagacaggaatgtcacatgctattaagaggtcacataaaataagactagaaaagtacacattgaattcagaaacttgcaagtcattagaaacattggttatggtggtttggtgtggatgggggacataagcctgccggtaggattttaaagaatgattgggaagtgagtgggaacagtttctcagatctataactgaaaaagaaagaaagcactaatgaaatgccgggaggatttgcagaatttgagtgacaataatgtctctgaagacaccataagattacttaatacattgtacttacaggcttctatctctaatgtccattatgaaagtagaagaattagtttgcctaatcacagctattaagatagttttaattttttaggtaaatttgtgtgactttaaagctatttcatttttaagtagtgggagcaaggacacaattgatcaagtcactttagctatttttaccccccaaaatgcatcctagaaatttgctcaataaaaataaaattgtgccttagttttttttctcgttgtacaaagaattatgcttctcttggcttctgaacactggggattccttatatgctctttggcagataaaaaaaatggtaaagatttatggccaaggaaagcatttctgaaaaaggtgctccacattgtctttgtgtatgtgcagaaattataaacagaactcaggggcaccaccactataatagctttttgctctctttgaagaaaatggaaaatgctgacttaggggctactgcttgtatttcctttaatgaatcttctaagcttgaatgattttaaataggatatttatgttcctcggttatagcaagccaagtacttaaaaaaatacatgtgattaaaatatccaaactaataaatatatacagacatatttagtaaaaactactgttcatagtagtaatagtaatgatagtaataaatgccacagctaaagactttgaggagaattcacagtcaaggaaaacaaccaccaaatcacatgtatttggagaatttgattagacttctatacttaagtttaataattatgttgaagattagtgaacaactcttggcacaagaattgtcttgacagacaggcagccttacccaactcaaataaataacttaatgggcttttttttctttattaaccacttggtaaatgtgaattgaagtctagtttttaacaaagacatatagattatgactttattatctctgatttgcataatagattatgaaagtctcaatgctttgtactcttggtatacctgcaagcgttttagtttctatctatgttaaaaaaattactttcagatttggctttttatttctggaaatatgtttacatgaattcattaacctatctatattacttgtaagatcttaaaaatgtcttcatcccctgagtttgaaattgttttacccatcaccctcatgtcagttctgttattttattactaaacctaggtaatagtattaaagctgctgttcttacttcatgatgatagtttatatttgcacctacatacattatatatattatatttgtacccatatacattatctgcttctggtagggattagcagctctgaagatttttgtaaaatgtagcatatgcgactcataataaaatatatttagaaaattataccataatagcatgtattttatttaattaaactgttatgaaaaatactgacctcattaagcaagaactgctcttccagagaattttcagaaacatttaattctataactcagatatgtcagaaaatcactaagggatcattatcattagcccctgaaagccaagtgtctcatagaacctgaagaaagtagtctttgattagtgaataatgatgatttgttgcatggactaaagctttttttctagagatttctacatcaaacttctgtttctcttcctatttgaagtagtatctgtggcaaaccaatgtaatttgagttacaagcaatgactatgttccttttaggttttttcattcaactttgtaatatattccacctgttttcaatatctacatatatagagatatagatatatgtatatatttctaacgtcgccctggaaaggaaaagatctctaacatatttactacatgttttggtaaattcaaccataaaataatttgaaagccttaaggtatctctgttcataattatgaggttagaaattccctacagccggaatatatggaaagtgtcaagtcagaaagggaatctcccttagtttcccaaaatacaccagccaaagccttgctttttctgcttgagaataatagttagtgaatctagtctatggagaagtttttatgcaattgaaataagataaattaagacagttatagtgaattgttttacaaagttaactgttctgacgcttttatttgagctatgtctttctcaccagtttagctttaaattaccattttatataatgatatttacattagatatatttattctttcagatttcttactttgagaaattaatagttaacctcaacagtctccttttggcagaatctgtggctgttgggaaaagtggagcagatacttggatgtatagaactatgggttgcggggagggggatagagaagccaagaggagaaggtaaagaagaaaggatcagaatgtagacaaatggttgatttttaagagctgattaacagattgtccactggaaaggcatgaggttaggtttagagatttctttgcgtatctgttcatgtggacaccatctcttgactccaagtgcaaggtgctgtgttgggtgcttcaaggcaatttcccaaatgtgtctaatcctgagaatcacctggactcttgttacaccaatttttagcagtaggagccatggatctggagacattgagaaattttgtgttaaaagacagaagatatagtagattttttctttgctcttgagcaatttataaactatccttatctttgtaagcctcagttcctttatcgataaagtgtagataataatactttccttgtcaattttcaaggtaaatgaggtaaaaggaaaatgtcctcagagagttactggggcttgtaaaagggttaaagttggtaattttaattgattgtgtgtatgatgagtagtcagatggttttgagaaagaaaggaagttagggcatacaaagaagtttttaaaaataatcatcttctcaaagttgtttcccaactttattatctgggttttatttaataaaagaatttgaaatattccttggtgtgtctgtttttctttgcctattcttctcttgtgccaactcaactattcatctcaaattatatatattaaatcataaacacatgcttctaacagttatattaggcatttatttaacctaaccccttctgtcccagacaagtaccattaatactgccttaaagcaccaagcataccacctggcatttgagtcaagaagcatttgctgaattgactgataaacctctaaatctgaccccatctctttccaatgtactagttgctagacaaccttatgttcggactttcaaggacacttggggaaaactagttcatcattctctttgatatttattgtggaggtttgttttattttttgtgttaacaaaacctcttgtcagaaagatttccttacctcaaccctaaatctcgtattgtattttagcatgcttctgtatttacattgtgggattatttttattaatatacaataaacaagttgtgtttcttggaggtaattactgggaataatttttttctgtgattattagcttctttcagtaactgatttttttttttatccatttagcagcagcaacagaagaaccagaagtgatcccagatcccgccaagcagacagacagagtggtgaaaatagcaggaattagtgctggaattttggtgttcatcctccttctcctagttgtcatattaattgtaaaaaagaggtaaggcctaatattgtcctgtcccgctcacttaccatttatgtcactggttttaaaaacctgtttttctcaagatcctttaaattagaacaaacaacaggaagaaaattttaattttaacaatgttgtcagcacctgagtctattggacatgctttctaataaattcttatttggttatttgcagtttaattttggatataaacatatgctttttgttaagttgacctagaaattaatatccgaatttaaatgtctcaaatgcaaaggtacttgagatcatttatcttatatttgaagtgttattattaacaatggcaaaatatggatttattgtgatacttgggctgtggtctaggaattattttgtgctctttttctgtatttttctacttcttggctacaaataagatatgagaagaatataaacattatttagtaaaattgtacattaaatattcattgactaaaaattttagccttttaaaatagagagtaaattgttttaattgaacattaactttttatactatatcaactaatatcaccatcttctgacgttacttgaagatactgagacctactggaatttaaactgagctttgctctggagaccaaagtatattcctgatgaaaagcatttcaaagtacacagtttttataatatgagctattgtacattatataaaatgccataaatctgtaaggcattgtcttggaaactaatatagcactctaatccttcccatcatgtatttgggttaatgctacaatttggaaggacttttaaaaaaaatatttataagcaaaagtacagtcctaaaatagtttggtgtatagaagtggttgtgatcagtgaattctattgaaaaatataataagtgatgttgcttatattacattaaattatctagtttactattatagttattttatacttgaaataaagcattaacattatagataagactcatactacatgttttaatgattccatcagagtttattttaatatattgcctctttacgattatcccctggagatatatatgttggagaagacacatctgcattagaaacattaggtatgcattatagtgttttgtgttaaattagctacatacgtgctttccccaaatagtgctttctcttgctgttgtctccctctgtggttggaaaatacatcatatgtgaggcaaaagttttaagtattttagcaataaaaatttgccagtaaagatcaataaaaatcaccaaatgtaaccttcagaccttatgtctctgtttagtttaaatttgtatttggagacttaagtaaacaatttagagagtaaagttaactaaacattgcttcacaatgttctggtcacttcagattggatgtaaacatgaaagtggcttctgattatatcctcattcagctagaattgggctaaactattcagttttatttgttatttatttgaaaacattcatttgtcttgataactctccctatccaggcctctgatttagcaataatgaaaaaattgaaaaattaacctcctaaagtatgctaaaaccatcactaagcaagattttgggggaaggtaaaatgctctgacagctctctaaaattgtgtaatatgacaacttgattttctggttcatatattaaatggttaagttaatgagcctctctattaaaatatttaacatttgagctttcataattatgctttgattgtcttttgatagaaagtatgctagggcttttgcttctgttcctcaccatcacctttatacccaggaaaagctgcacttttaaagatagaccaggtttcattatttagatatgttaccttctaatatatagtatttatatctacattacttgaatttcttacttaccaaagcaattttgtaatgacttttactcatatgtagcgtgtcacacatgtaccatgtatgctttaatcacaagtatgtttatcatacatataaaaaagtatagatatagcagcattgcattggatattatcatcaagtatagcttaaaactattaatataaaatgtttcccttttaatatataaatttataataaaaataatggaaaaggaaattactttagcctcttatctacattttagtgggaaattgttaagtttgattttatccctcactgggatgaatacatgtagatatatttcttatgcggaaaacagttccatgtctttttggttgttttgcaaaagaatggtgtataattcaattgagtaaagttttacagctaaggatatgtataaagtaagtttttaggctaagaaaagggatattgcatctttcaaaacgcaatgtcattttttaatttaatcgctattcaattatttccaaatgtatgccattttttcattggttgtgtattatattttacatgcacagcatgaacacattaataactcaaacataaatttgaaattatgtttcaatacagtaaatgtttgtgtatgatatcatgttcacatgcatctactgtagaagtatctgtgtatatatagtatatggtatatatgtatattcacataacatatgtatatacctatgtaccattaagatataataacttgtttgtagaaatttaggtgttattctgtatatatgatatattaacataatagatctttatgttttgtatctaaagaaaaataatctatatagtacacaagttctatgcacagctgttccatctgtcatatttagataatggatgatattatgcttaactgcatgttgaaaatacacaatccatttaatttttcaatattttggcaataagaaataccagcatgttattttttccaaattatgtattttaaattttatttttatattgcatatctgtctgtttaattgcatggcaaaaaaaactaacaatgcatgagcaaattgaaatgcaaagcaaaaaaaacatgaattttattttattttattttattttttaacgcacatttttctgctttattgaatgtgacagagtcacgcttttcattcaccattgcttctctttttccactgtctgtgatttgcttgccaggaggagctactattcttactcctactacctgtaagtagaaaatgggtgatgtacaactttacgtgtgttaaggatgcagtatcccttttcaaaaacaaaacagaatgcttgcaattttggtgacatttcaaaaaaaaagttttttcagactctaaaactataaactttatctatcacctattttgccaatctttttaaaaagggatattgtatttctgtatgtccagctacttttaatttagttataatttccataagtagctttagtctagagccaaaaacataatttatttactaaagttaaacctgtaccttatcttagcaatatggcacttcactcatctggtaaagaagagatagtggttgtaactcacaaatcactatctttatgtagcattgtcatgtctgacaaaatgagccaagtggtgtatttatggaacactcaaaatgcctttacaggatgcaaattagttcaggtctgcatgtgataacatctttctccgtatttctaggaatccaagatgggttatagcttcagaacatctttggtccggccattaaggcaatcattgtgcttttgttaaagaaaaaaaagtagaaaaaccatggtgttgcagcaacaaagaaataaaaattctttttagaggaaaaaaatgagtttattgtaacttaagtaggacaaatgttttctaaaactacagccaaaaaaacctttgtcaactaggaacagatataggcatcacattgctccttttctcttccagagtctgtaactcttccgaaactcaagcatgatatgttcatttggataaggatggagaagatggtccattctatttcctgagtcatttttcagcttatcaccttatatgccagagtagtttttcatccaaatcaaaggaacattacagcaaagcattcttggactttgcttgaccagtatttgatccgccagctttcaaggtttaaagattgaaattaagaatgtttggggcacatatcccacagcatttaaatcactagataaattcaagctagctttacagcaaaacctttataagagtctccattctccatgactataacacaattctgccaacattttaaatattataaacattttgcttcctaaaatctgctaaaccaagtagctgtacactaacagtgctcctaacttattgtgatgaatcataatatccttgttaaattatgtttgatgaagccagagataatcaactgtgccatttcatacaatgatggagcactttccccctttatggcccacccatacatccacctgcagaagtttgtgctgttggctgctttgataatgaaagtcatttgcacatctgtcaaactcaaagtagttgcaaaacgaatttcttaactgttctgaagtgcacattatgtatgctagttactcaggaggagacaaagcatcaaacatactggaatcactaagtatttaattatgagactgtcaataagcttaacattaaccattgatgtagctctgatgttaaaatgagattcccttttttggtggatagacaacatttctgtgttccagacaacgtaacaggttatactaatattattatagtacatggggctactggtaattttaatcataactacagatattatcacagagatatgcttttaaaggctgcttaaccatacctagtgatgcttatctggattagaggggtttttaaagataaaaatagatataaattagagaagagcttaaaagaaaaccagatgtgatctttgagctaatattcattgacattgtcatagttactatctgtttttgatcaaaacacttaacactgatgtcaatttttctttgttttagaagaacttgaatgaaagcctacctcacagggttgttgtgaggattgaggtataaaaaccaaggtgataattcatggctggcagatatttacaaaggtcatatttccccataatttgtcaactaatctaggtttgtgaatctgaaaagttaaagtccttcattgcatgaaaattttaacctgtcatgcatttgacaaattcattacttattgtttttctccaatcatgaactacatataaattatacatattttaaagtaaagcctcagggtttaaatttttcttttctattggctttgaactgctcatcttcaaaattttaacattgttctgaatccaaatttcagtttgtgctatttttattcaattcagtctctcatattttttgagaaatgaatttattcttcttatcccagaaacaaagattgaaagttatttcctaaagcaatttttgctgttttaaaatttacaaatggcaaaatatttattctatatattttgctgaaatttgtaacgactagtgttcaactgctagagtaaatactggtgtatattaactagtgttcaactgctagagtaagtagtgccactttgaaatgtgtcaatttaaaaagtgtaagcaaccagatacagcgtaagagcttagcctttagnnnnnnnnnnnnnnnnnnnnnnnnnnnnnnnnnnnnnnnnnnnnnnnnnnnnnnnnnnnnnnnnnnnnnattgagttaacaaatgaaaagtgccaagtatataacaggcctaattcatctattcaacaagtatttattgaagcctgctatgtgccagacactgcgtcaagtgccaaggctatgcagatcatccttctctttgtggagcacatagtggggaaaacaattgaaagatatttgcacctatcaatcaataacactcattacaggggaagaatgtggtagtatagaaaatacctagcctaatttgagaaaggttgctttggagtcaggcatataaaccctccctgacgaagtatctattacactgagacagaacagacagattttagccagatattacaggcaaaaaaatgttgcaggttgaagaacaaacatcttgtatgatggcctagtgggaagtttggaaagtgaaagtccataggctaaatgtgaccttatgatgtttcatgtggcccatacactgtttcaaaaaataaaatcacttgaagaaaatcaagaaaattaacatcaatcagattcatggcttgtctttaaaaaaaaaaaattaagccagagagaagttcaacagtgggatcaaatgcccctaggcaagttgcccctaaactgctttccagttcttcacagccattacccttccttatggtatcttgccactgacagcagcactcatttatattacctgtctgaacctacatattcataaaggattttgaccctcaagtctagaaaaagattaatagctctttgaatgtatagcacaaatgttgctaataaatgatggtggtgatggtgtagtggtagttatgttggtggtggtaatagttcttgttacactttgtcattgttttcttattactaatactgtgattctgtgattatcattatttattatttctaaaatagccatctgcatcctcgaatcttagcttatgactatcttaaacaacatagtgtcagatctgctgtgtacatgtgtcgtgtgtgttgtgtatgtaccgccctgaggccaagtactgtaattctcagagaaaatatatcctacactggagcagtcctccaattgctagattaaggttgtaaaggaaaagcctttatacataaactcaatcttttaaatgagcctttgtagtatttgtagtacatttactctggtttggatattaatgaggatcagaaaagaatggcttagcttataatctagtgaaggtaatggtgttcttaaaacaactaaagatttccaaggcaatatgaattgcagccataaacttagtaacataatttgcctattacaagcttttagagtgcctttatttatacataaattttcttgttagtgtgatttaaatattttatgtgcctttaatagccctttttcttggatgttacatgtgtaacattcacaagaactaaaatatattttacatccatgatatgtaagataaacatgccaatatttgagtagttcataattctaatgctgttaatagccaatcccttaaatcatatgcctttctgcatttataaagcattgctgtagttagttgatagtatgccatgtggttctaattagaaaacacatttttaatatttgaccatgtgaatattccaagatgataattttcatgtctttccataccatattttaaaactttcctcactacttttcttacacagtatatgatttaatcccatatattcatgtgtacttgaaattttctagcagtggcttattctaaaagtcttcagattagcttctgattaatgttataaatatattgctaaatatgttaatgctacacattgcatttttacttaataatagcacagagaatgaagaatgggacatgtctttgtctgttttaatttggtggctacagtaaaacagacttgaaaagttagtcatgttatttctaaaaggaactaaaagttgatcaaaagaattaattacccaggagtatcaaaacttggctttagcttgaatatttattgaattactctagtaaggaggtatttattttgcttttaataaatataattatattttatgatatttaagagaacaggaaatgatgagagatttggattgacagcttgaatattgaaatatgcatctgacaaaatacttttatagcaaggagcaaatataattgtttgaatgtcaaacttaattcctgaaattgtgaccagtgcttggggtttctaaaccatgtttgtaacattatcctcgggctcacctggactatttattgctggtgttaactctcctgcaagcctcaaacactaaggatgcccttttgtatttgccttggcagcaaacttgctaaaaaacgcaaagatgccatggggaatacccggcaggagatgactcacatggtgaatgcaatggatcgaagttatgctgatcagagcactctgcatgcagaagatcctctttccatcaccttcatggaccaacataactttagtccaagatgtaagtttttcattaaaattttaataaatgatgttacaactcatttcactttgaattctacacgataccttttgagtaatgagagagagtaggaaagtgaggggagaagcagctagaaagaagagaaagagatggagaatattatggaatttacaagaaggattctcatcaagattgatactggatttagtttaacttcaaactctatgaattttattactgtatcacaagggatattccaaacatataccactcagtccatagcacgtgtcattgctttaagtggaaatacacgattgcctacaaaaagttagttcatgtcagaatttataattctttttccatttgcatcttcctttgtgtaagatgaaagtctcttttgcgataagaggaaacagtaattctttttgggaattattgacataggtaaaatcattgcattaaagtagtatattgtagactcctggaaaattgcaatactaaaaagttaactcagggaaacattagtctacatgctcttaagtatctggtgtgaagtccaaaagtatacttgaattgggggttttgcaaggcatagtgaaattcatccatccatctgtcttgaaaattcctaatgttggtctatgaaggcaaggcttttaaaatatttccactgaagtaccatttaaaagcagatgattttaataattaccccagaatcaatattactgtttattttcaaatttcatatgaatgttatattctgttctatagtgcatctgtttaagttaattaaatttaagtgaaattgcctaactttgtttcttcaaatcctcaagtaaaactgatgcttgaggcaggcaaatcaggtatatctcttgagtatactggccttgtataacttgggccttatggcatttggctcagatcgcagagatatgctcaccccggtttggaaaacatgggtataagcaaagaaacaatataagtattatctcctgtacaaactatgaacatatgtaatagtaagattgaaaacaaagtatttgtaggttgtatgcttgtatgtaaagagggaagtttttttctgaattgttcagcttggagaaatttttcagtaactattggatctaaaatgaagcccatcattttctatgtatatatgtataccaaattagtagttaaggatgctatacatgagtcattttggaatttagttataatcatgacagggcctttcagatctattttatttttatttcactatagataaatgatagagaaaaatgtaaaatactattactgttgaaagtaagttttgcggaaaataaagatgtatcatctctttaactacttaatttaatatttaatcaattaaggttttgaaagcattcatgcctcccaaacttgtctatctattgcctaccttagggccttatttgaaagtttgaattcagcagtgtaactataaatatccacttatgaacttagagaaaggattaaatctatttcccacagataactgaaaaaaattatttggaatgaatatgagataattatttctttaaataccttacacttgatagatctaaaatacatgggtttttttttctttaattttttaatgtcaagtttaatcttctggctttttaaattaaacagagttctgaaccataattatagatacacctctcttgatgtttagatataacccaagctgagagagaaaattttacatttgcagaatacagtaatctgagaaagtttaataattatatttcttaagaaagcataaatctattttaaagaaaaaagattttaaaaaacaattttagagcaatatattccttcatgagctttgttttcctgcagtgcccaatgatccacttgtaccgactgctgtgttaggtgaggccctaaatctttatcatcttttcattgcatggatcacacctccttgcatgggtttgcccacatagagattatttacagtgcaggaggcagcttggttttgaaaatagacagccatggtattatcaaagagagcaactgtgttcaacccaatatcagatctagtggatttcaaattagcaaggcatgctatttaatgtattcttcaattcttggttgttagatttggagcaaaagtacatggcccttaatgtctgactaatattaatgtgtcaaaattagtagaatgaagccaaatgcatacatctgagggtgcaatgttgcctgaataactagtttatatgtaaaagtctacctaatggaaagggatgtttctaaatcctcccaatttataaccacgaaagaacaaatttacaagtaaatattaggattatgtgcatttgctctagcttttgtctttattaagaatgttttaatgtaggtaaagttgctaaaatcttgatgtggggtttgacattctacatgaaccttacctgataagtaatgttatctttcaagaaatttagaacaagctacttgggttaccactgtataacatctaagacaatgctattactaatgacaattaacgcttttacagatgtaaaattatattaatttttaaacctacctatatatttaagaatggaatgggtttcatttttcatttcactttgtaccctgttccttgactaattatacaccaatgattagtaatcagcttgcctgtatgtttacaggttccatatcaattttaccagcgtttctagttaagctttaaccaaagaaatatggaaactatcaaataaatatatcttgtaaattcccaaatgtcatgtttgttatttatatttaacatttcttgtgaacaaaaaactttaacttatattttatgcttgtatttttgttatacatacaatcaatgttcaattgcatttttaaaatattttggaacaacacaactaactcagttatgtaaaatatacctcttatttactaaaataaatatttaaaattataattttataattactataaaggatatatattctaaaataatctgaaaagtcaatgttcttcatctctacttgcactctccctttgatgtccaccaataatggttaggaagtgaactggggatttgccccagggagtggtcttatcacacagggaggagccataaatcatgatcactggggatcattaaggatacatcagatgcctctgaaaatgtcatcttctgctaagcactgtggaatgctgtcagtataaagttaataaataaatttcaattaaaatattgagaactaattggaaaaaaattagttgcctaaatgttaaaagtttccttacaataattttctacacatatgtaaagtccaagtctcggtcctcctgtggatttacaatatgaactcataaaaataccttacatctttgttttcccatctataaaacagtataataattcctaccatacctttttcatggggttttattataaagagaaaattagatgatgtgtatgagttttataaactgtaataattatcatagtaattttccctgtgaaaaaggatattcatgtttaaggaaagctagatttaacacaatagagtcataaagtctagttatataaacattcattacacattttatttaattttgaaagtcaagctggttttaaaaatatattggcattctttaaaagctaaatatctcattaatcatattagatgtagaaatgatttgttgtatttttcatcattcttaggattgtggtctttagagttttgcatccaatcatttttgtatttataatgcagtttctgaaatcacttcaaatattgcttaatgctaatacttactgatttaaaagggcttagaaacttttcatactgattcgtatttttggtttttgtgttttactgcttcattgggtttaagttcctataacaggtaagtgtattgcaaagaactctagaaaacctttcaatcaaggatatatttcaagttattattcttaaatgtataataaggataatgattagtacgtgtaccctcactactagtcacattattaggtggtttaatgaggtggaaatgtattgagattaataatgcatatgtgattattttaaagaccttactgctcattgtactactgtattaaagcttaatgcaaaacaaaaggcactgtctattttatattgggacacaatcatctgtaagatttggaatatgggtgaattctgtgtttctcactgagcctttttcaattgtaaatattctgctactccagcaggtaaaagtgagctctggggctgctccactgagccctggctaccttcttccagcttgagtgattgcattttgcctctctgacgttatctgttctctttacttctcatccttaactgtatattctgtggcagtgcccaaatcaattgcttctgaatttaatttttctggggagatgtatttattctttatgtcggtctgttgattgtaatattttaatagaagtagatccattgactttggtcgcatagtgagaacaggaaactctcatgaatcatgtttgttagccaatgtttttgtgtagaggggtgggcaaaatctgagtaaaagacatgaattcacttgagtggttaggtcacaacagaatctatcagggattttttgattcagtgtatttttaggaatgaatgctacaaaaagagcattcagcttaataagagggagtaaagataaatgcaatcaagctaaattacagaggcacacaaatctgattgtagggttcttttttttttcccttctccaggaagaaaaaatgtttatcatggggacaacaattcattttttgctatatcctatttgtagagttggtgatagaacaggcaaatgtactagcacttgaaatatgtttatctgttaattaaatatcattctctacagtatgcattatcattaaaaaaaaaagttcccctaagagtgtattttctcttctgttaatgagtatgacggtataatgcttttcaaagtaacaccccttaaaacatttgtttttttttttaagtggtaagtttaaatgtgataaatatgagcatgcttctcgttgtaatgtttagtacttcggtcattaaagtactgtttattcttcataggcaaaaatgttcttgttcttttcttccttcttatgacagaaaaagaatttaaagtttcttttctttttaagctaataacacaattgggaagggacttacgcttaattgtgagtggtcagggattcagttgactttttaattcattcattggaatatttattgagttactgttatgcatcaggcactaggaatagaaagaaaaatattctgtctctgtactgtgtgttcagaatttagtgaggaaaatagccaagtagataaatcattaaaatatagagcaagtgaaatgacatgtaaaaatgaataagaggtcatgggaacataaagaaggagctttgtaactcaacctggaggggccagaaaagacttccaggggaggaacccacattttgctccagaagcgcgccctgatttctctcgcagcgtggccaagagactcaaaatacatttgcaataaaaacaataacagtaataagtcaaggcggcagaggttgaatataaatgcacgtgtagtctggctagcagacagagtggcatcagggggtgatcatgtggaatgcccatgtttcccagtgcagagtgtgttgtggtaaaaagccccagagaatagggccacgagaacaagaagagcagccctttggggatgggtcacctagatcgggtatctctgagggaggttgggatatggttgggaaggagtttggtcgacttaatagaccatgaaaacacctccacttgacagctgggtcctctggtcccactctatactgctatgactacagatgcaagaaaaacaactcagcaaaatttcccgcttaagcttttaaaaggtctatcagatgtctccctgcatctcacagtgtctgttgtcttgctgatatacacataatatactctcacctgaaaccttgagttttgtctttggggatactgtctaggcctatactgtatgatatttctttcccagaattcctcttgttatcagaaagatcttaaggtcttaaaatcttcattgcatagatacatatattaaacaagataactttgtctcttttttaatcttctgaaatctgaaaaatgccagatgagaaccacagtgctacagcagagtccagtcgccttctagacgtacctcgctacctctgtgaggggacggaatccccttaccagacaggacagctgcatccagccatcagggtagctgatttactgcagcacattaatctcatgaagacatcagacagctatgggttcaaagaggaatatgaggtgaataagttttgatactgtattgaatttgatttttaactatgatactcagtggaatttagcatttttttccctctctttaacacaacaaggaggggattgttctataggctctctaatctagtgtttatgagtgtacaaccaagtgtgtgtacctgggaatgggaagggaatggggaaaaaagcacttcccagagatatatgagtctaaatttattacaagaatctttaatgttggattccgtaatttattttactatggtattaaaaaaaaacactttgcgtatctccccatgcaaaaatcaagtagcaatacactttgggtcccattgttccattgcagattctatcatttgaatgaatcaagtagcaggtacttctctgcccctttttttgttgaccttatggttgagaaatcagatgaagctttgtgctctaaatatactacttgccactctcagtttaattttatggattattggttgagggtggctgagaaaaaaaatagagcactgcaaatctagtaaacaacactgagaagccaaaagaaggcagtgggaaattcttcttccaaccttatttccccttcctactcaaaccaaaataccaggacttatctcacaaaggcaatgatttaaaaccaaacattccaacaaacataatatagcaaaaggaaaatagttcctttgccacccttcacttactgagaaataccaatctggggcatggaaggaagccagtccactacccatgaacacatcacagtatgcacacatttaaagtgaaagaatccaagtaatattttgctttgaaaaggccatccaaaatacatccaatttcatgaagaatcttttaaactccatattttatctatggattacctgtataccttaaattaggagtgttaattatctctgaattttgaaagttgattttagatatatgccagaaacactgccgtggtaacaaaataagtacaaggaattagactattctgccagagctggttctttttgttcatttcatgtgtactcctgtgtaccttgcttcaaagaccactgggctctttgaagaccccgtttcctgtgttgagcaaagtttaagttcttttgcaaaatgaaatttacacccgttttaaattgctgcatatagtaattaaactagtcaacaaattcttctgttcccagattcttgaagaaggggactctattttaatttttatatggtcccttgttgtgaagactcactctttttcatgatcttcaaagaaactcagatgcgatgtattgcacacaatttaatgaataattatggagggaagcaggttttctttctactgttataaatgctaaatgatgcacacttgaaagatactcattaaaagcttttttgcagttttgatgcattatcattcaatacgttttgaaaagaatgatactttgctacttctacttctcattatagtgatcttaattttaaaatactttcaaggtccattttttttctctaaagttatttttttgtctttaatttgacctgaatccaatttaagatgaacaagtatgaatccaacaaagcggctttgaggtctgagaatgaaacttgtttactactgtaggactgctttcctctctgagaaagtggtttttactatttggggcttcagaacagataaacctgatttttaaaaaggaattaaattcagtctgcttattcgttttgttttcccagagcttttttgaaggacagtcagcatcttgggatgtagctaaaaaagatcaaaatagagcaaaaaaccgatatggaaacattatagcatgtaagttcccattcaattcttggtgaatgtaaatattatatgcttatatggttttaaactttaagaaaaatcccagagagtggtgtgtctgtttatgaagtaatctatttaatattaaaacagcatttacaatcaggcttgagggctcatgcctgtaatcccagcactttgggaggccaaggcaggtggatcacctgaggtcaggaggttgagaccagcctggccaacatggcaaaactctatttctactaaaaatacaaaaatcagctggcttggtggcacgcacctgtaatcctggctaatcaggatgctaaggaaagagaattgcttgaacccaggaggttgaggttgcagtgagcagagactgcattactgcactccagcctgggcgacaaagcgagactctgtctcaaaaaacaacaacaacaaacaaaaacaacattggctattagcagtgattctgaaattgtcatcatcctcattaattaaattgactcagccacttcaccctgtggagataacttgctgtttgatttcatgtttgtacataaatgcatggggtattactgaacagctgagactatcaggataatgaaaaagtaagatcttttcagttataaattgttttaacacttccatcaaacatattcaagattggggtgttattctttccacgtgcctttaattcttacttggagccactgtctaaactccagttgttcgatattatttatcgttagggacttcctcctgagtaagtcctcaagatatacacgggataataaagtcattatcagacaaaaccacaggatcagtaaagaaagtagcagatagtttaacttgtaactagctgctgatttacctagaccactctgctctgaatttaaattattttaaagtatcttatgaatagctcaaaatctaaccttgattctcagggagtaagaaactgagagcgggaattcaaaattcactttttaattctgtggctcatttgctgtaaagtgcagaagaaaaggatccaacccgtttaaagtcatgactaaaaagcaaaattagaagttaagtctagttcagttatgtagacaattctatgactcaaatgattacttaccagacaatttcatgtctcctaaacactaactatgaaggttcaagtcagtgaagcttaagtcacacaatattataagtgtaatagcaaggttcactaacattcttatatttcttcaaaggactgatttggtagtagtatactatggatagactatgggcaaccactgaattctttagtctctaccaatgacattgtctcagaacagggggaaaatttaacagcttatatttattattttaaaattttagatgatcactccagagtgattttgcaacccgtagaggatgatccttcctcagattatattaatgccaactatattgatgtaagtatttttatagttaagtatgtctactttattggcttatatatatgaacctttttgcttattacctataaagtgattgctagctttttaaaatataaaagtacaaactgtacacttttccttgttctgcgtcctagtacttactgacattgttgtgctttctttcacacctgactttggtttgggctgtagatttggctgtacagggatgtaagtaccactatatgtaaataacagcaccctattataaatacaaacattcttaattacagttattactaacgctctgttactactagttatttctgcatgcttcacctaattagcttcatacaatatatctctgttcgtttttttgtaattctttcacatgcgtaaagatctattttaccaccttcccttttcttgtgtagaaaaacaggaccatttttagctttgacagtttattatgtactcgagttttatttgttgatgatttctgtttctggcttttattcttacccttccctaaacatatgtgagaagctggatagtatgatgtgtattagtgttactgaaattttactttttacatttgacttctgacgttaaaatgagtagggagactattttgtgatgtgttgtattggcttttaaagtaataaaattactcaggcaaaataattactaaatttcaattgtaaaatacacatatcacacatatatatcgaatcacagaaatgaaaaaggttgctttgatcatatatttcactgttaaattttgattacatacatatctacatggaaattctttatttaaaggaagtaattatcaaacaaaatatagaatattcttaaagggcaatatattacattacctataaggaagacctggttcataatcaccctggagatcttgggaatgttacttctctctctgtacctcagtttccttatctttgcagtggggataataataacagtactaacctcatcactttgttgtgagaattcaatgaagtaatgcatgttgagcattttgcccaatgcctagcatatatttagcactctttaaacttcaactattttttttacaattaaaatctaggtgtgctataattaaattgattcacaatatgtataattataagacaaaaggtggaggtattaagaatggtagcatatgtatacttctatagacctaaaaggtatgaaacctaggacccaacattttataatttccataaataggaaataattttcattacatttattaggttcacattttagagttatgaattgtcattatgtatttagttgaactaatatattttataaagcatagtatatgagtatatgagttcaatttctgatcataatcttactcttattcattatataaatttatcaaacatcattatgtaaaactaagctaatggtctaatttttagaataaaaaaatcaacagttctatgacaaatttgtaattgttcttacctatttagtttaacctgggttttctgccaggacttgtacactggagccttgttataaaattatttcatggttcatatggtaggactgtattttaaataagacttgttatctagtctttctgttaagaccccagtgtattttggtctatttctatacaatttcataattttccctctcccattagttcattatatgtaaacgatatgagtatatacttctgcaattggtattttttttaagaagtggaaatgaaatacttataaagcttggaaaaatttttccataaaacattgtgctattttccataaaacattgtggtatattaaaaatttgaaatcttccaaatttgcaataacgtaatactcatgctattaaattttaggttggagatctcagttcacatgtatttatatgtgtattgagttgcccacaccagtatgtggacaaattgtaccacagacttttactaaggctcattggtaaatatgcaacaaattcagaacttaggatcatatcatcaacatttttacaacttatgctttgttgttattcaaaccaattgaaagcaactaaaaatctattcctcctcaacagaacttttagcacactgaaaaaaaaaatactaaatttttgctcaagataagatgcatttttaaaaattcttctttccctatatatatgtgtgtatctataattatgtgtgtgtaaattaacattgtgagcacgcacaaaatagtttttgcatatccctgaatgtgttgtagaacaggaatattctctaaaaatctcagcaggactttgattggatgcacacatgcattgtccagctctaacattggaatgttctgttatttttttatggttctaatatgtcctcgtccatttgtaatgcagtgtgttgtacttttggatgataaaatgagaattaatatttttaaacactattttaccaggaatgaatgactaaacatttacatgaaggcataaacattttagtgaaaccaaacaaaatctatgaggttattccatggcaaacaaaaatcaattatacaatatatattctaatcagagcctttaaaatatttaatttttgttttatgtttacctttcagataacataggtttgagaagtgaactatgtgttcactactcatttctggactttttattataacttaatcttaacaggtggttgtcttcatctttttatgccttcattcatttatttctgatattgatgtaaaatgataactaatttgttctcttattttagggctaccagagaccaagtcattacattgcaacccaaggtaaaactttgccttgttaaatgttatagaaaaaacaaacttgcttattcatctatgtggtggtttttattattttttaaattttatcttagtaacaaaaaaatcagcccttctgattaacactgctccttactcatttgtatagtacaaatttattgtgtgtgtaaagcttatataaatttaagcttgatttacttttaattaaaagtgaaagaaaagctggtagtggttattatgatttgatccttgttacacagataggtcagagcactagtcaatagtgccagtcagaggaattactcatttttgaggaaaggaaaaagaagtctcatataagaggcctgtcttcttgcagcaagtttgttagtagtacccaagaccaatattgttataatgagctgttatactgagcaattttttgacgagtcaagactgagacaaaacaaagagatggaatttagtcaagttaattcttcatggaatataataagacagtagagagatcttgttatagtggtacactggggagtaaaagtatccaaataacaacaacaaaaaaagcatctgtagttatctctctaaattgactactggccctcagaagagaaacctgtacatcttttttatataaaaggaaagtaaaacaaaagctaggtttactcttttaacaggggtcatttttctgtgttttcacatatctttggagtaattgagttcagttgtgtactctttaaagttagaaagatcgaccatagtggtgaacaatattcagttttatggtattcggtagagaacagcccagcacatgcttttgcagtttggagatattatgataagattaggatatgtccttacgtgtaaggatatgtttttattgatccctaaacatgcactatttataaatagtgggcacttatttaattggtaatatatgctgtctggttgatggtggtataagagttctattttttacacatatttgaagatgcattaaagtgacttagtgacaaatataaatacccaagaaactagtgatagtttcttctaaattgggaagtgtagagggcaaattgaaaaaaaaaaaaaaaaaacttgtatatgcctgtgtttttgcctattgtgggaatttagatatgaactgaatttaagtattttcagtgacattttgtgttagaccttttttggaattacttagtttactctgcttcttatcttagctaaacttcttactaactacaaaattcctttgataacataatattcaaattaatttctttgtaggtcccgttcatgaaacagtgtatgatttctggaggatgatttggcaagaacaatctgcttgcattgtgatggttacaaatttagttgaggttggccgggtaagaggaagaaaaagaatttttttgtcataaaaatgaacatagttgagaagcaacatgtaagacactcaaaatagaatatcatccaattgtttaaaaaaaattataggcacaacattttagttgagtacttctaagtagaccttgactggctgaaaaattatttgatttctcattgagtaataaaataagctttaattttgtactagaatctaactgcattatcaggcttgtatattttttgtgagactatataaactctgtttattgtataatagatttttttctcatttatagatttttaaactgagttttaattgtgacctaaggagttattgctggaattaaatcaccttggctaattagtattatatattcaggtctgtctatatattctttttgtcacttaggttaaatgctataaatattggcctgatgatactgaagtttatggtgacttcaaagtaacgtgtgtagaaatggaaccacttgctgaatatgtagttaggacattcaccctggaaagggtaagtactctaaaattctattttaaaaagtgatatcaaaactgctttttctcttaaaatctttgccaagttctgttttgatgatgctataaaatccattcattcatgtattcattccacaaatgtttatttgagagtttactatgtgccagacatgtttctaaaccttgggacacatgttaaaatcgcctcgtgtggatcttagagccgattgaattaagacagcaataaaaataaataaatcaactaatatatcatacatcatgacaagtgatatagagaaaaataatgttggggaaggaagtagggaatattatttaggcagggtaagaaatggtttacaattctgaaaggatgatcaaagaaaaactcattgttgagaaagtaatatgagtagagacctgaaataagtgagggagtgacgggttatgtccagggcaataatgtttctgacagaggggagagtcatttcagaagcctagaggcatgtgtaaagctgttagaatgccagacagtcaccaggccaagatgtgcagatatccataagtgaaggggaaagaaatacaaaatgaaggcagagaaatcacaaaattggataagtggtgccttgtaggccatgatgattttagttcatactaaaattgagttaggctgccattgtagggtttgtgagctcagggataacatggtctgaattttatttctaaaaggatcactccaagtgttacattgcaaagaataacgtaaggtggctggtgtagtagactaaagtgaaatatagtaacagtgaaatacattttgtggtaaagcttggtagatttgaccacacaaaattgtgaaattacctgtggcacaaaaaaatatcaaaggtacatacagacagaagaaccttgcgattgtttattaatgtccttaatttataatgttaataccagtagaagaaaaaaaaaaaaactagaatctctgaagaaacacaattgttaacaagcctattaaaaatgtttaacctagtgtacttatataccattttgtccttccaaatcagcaagaactttaaaaaagaataatcctcattgattgttagagtatgttgaaacatatttttatacattactgatcatagttaaatcgctacaaaccttctttaaatcaataaaacagtatatctccagagctttaaaatgtttatgtcctttgagaagttaactttcatgaatctctcctaaggaatttatttaaaatacaatgacttcatttatagtattaaaaacttatagataaccataaatgcccaacaatagagaaataattgcatagtattttataaaaatacttgtgagttatcctaccaacatgaaaaaattaggcaaaatattaagttgaaaatagcattatacagaacaacataatcatgattattgtaactgtaaaatatgtatgaaaatttcttagacaaatcaagtagaataaaataagcaattgatatgggagatttcagaaagaaccattaagcttgatttaatgaataactagctcatattattaaaaaagaaatgtggaatatgcagtctcttaagttcatacaagtcttgtaaaaatcaatgatgaacttagtaataaggaaaacctgaatacataacaaaaagttgagatattgccaaaatccaatagaaagcaatgatgacaaactgctgaccagtgaccccagaaattagcctattagaagtcaccaaatcctcttctgaataatccttgaatgatttcctcaaaactaaaattatattatatagatcaatagttttacatcaaaatttacctcattattctgtaagaaaaatttatactcataagtgatttctgttttgaaatgtgctctgaaatcatgtgaaaaattataacattggaaaatcagaaaaagtagaatagaacaaaggaaaaattaaatataaaaaagaaacaaatgagaaaaaagaaaaagcttgtttattgaaaagatcaataaagtaattaaaccactattaattctaaatgaggtacaatgaaaatatacaatattagaaaacacagagggacatagccattatacttgctattagaaaagctatggaaaatattatgtataaacttaaaaatataacttttagtccaggacacggattttctgacaaatgctgattctcaaaaattaggtcacaaagatttagaagcatgaatagatggtagaagaaaataggatgattgttattatcattaaaattgcactatggttttaaagttaaagttcctttatactttaaggaatagctaatatctatgttttaaaagttagcataatgtacttggaaggctgaggcaagagaatcatccgagttgggaaagcagaggttgcagtgagccaagatggcgccactgcactccagcctgggcgacagagggagacactgtctcaaaaaaaaaaaaaaaaaaaaaggttagcataatgatgataacagaatcagataaagatagcattctctggagctctcattccctctttcattatgtctttcttctctctcttcctctcttccccctcttcctctcttccccatgcacacacatattgcagaccaatttcattcaagaacatgaaaaaattcaaaataagatattgaaaatttggatctagtagtgaattaagaaaatatcactacatgacctattattttttccctaagaatgcaagaatatttcaactgtagtgggaaatcttaacaggatatttcattatgtgcagtacattaaagtaccaaaactgtatgactttaatagattaatgcatttaattttattttcaaaatatttatagtaatactctaattagggaaattaagaggcatcctaaacatgataaaggtgattcaacaatacctagtagcagccatgttaaggaatgaagaactaacgactattcatttatcataaaaaactagtataaagattatattactgcttctacaatcatgaatgttacgtggataatcagtgtcactaatattaaacatttttggaagttttagcaaatgaaataaggcagcaagaggaataaactgtgtaactactagaaaagacaaattattttaagatgaaaggatttataccaagaaaagtatggataatatttttaaatgggatgtataaacatttatttaaatgaccaaatctgcataaatattcatgagttatagcttgtctttatattagtgataaacagaagtaagaaaatattactaaataatctttaaaaatacaaagtgccaaaatatctcagaatatatttaataagaacgatatagttcctgatttaataaaaacacaaaagtgtacttacggatacgcataatatgtgaatgagtggagacatgcaccatgttccagaatatgggagtacttgatattaatatcactgtatggatttaatacaatcctatttggaaaatcattggattttttttttcttgttatttagaacaagaaaatggggggggttgtttttttaaccacatatttgaaaatcattcagaaaaattaaaaaaaaaatcagggaataggtgctgacatatgaaaatgtactaaaaagagcaaaccctatacatgtaatagaaagataaagggagcaaggcctattaagcaactccaataaaagaattaatatagaaggagtaaagtattacctaaaatcaggccatgaaacaatttttgaccttcctcactagagttgaaaagtagcaaaaggtgattttccattggggtgattccatggtgatgcttatcattgtgattgttacagttatttattgatgatccctgctttgtgtagggtattgtgctaggaattggaattaagaaaacctttaagaaatgatcactaacttccaaggttttggtggtattggtttgtataagattgaatctaaagataaactgtttttctcagttttgtttatttcatgtaatgtgtctaccttttctgattgaacaagtgagattgatagttcacagatagttcacagtagaatttgaattatatagattatagtgggattttttttccttttgctacaaatgtgagttcttaaaaataaattcggcaatatttcatctataccttccaagctgtgctacctcagtctacagacttcttctaaaaaaaggaaggaaaaagctttgaaatgtgcatttacagggttctcttaaattaacccaataggagagcagcacaacagcagatgcttcacttctttcattttgtatttttgttactataaataatactgcgctgaattatttcacagagctaagaaaaatagtttgcccaaagaacagtttagctgcctgtatattttcacaagccaatctagagcagcactgtcctggaaaatccctacatgctatgcttcaaaaccattttcaacatggataagcaaggcattaaaatctctttgtgaggtgagaagctggaaagttgcttttatacaccacttgagaactcaatgcattgggtcaatggggcagcattttagctttcccatttccttcttttcccctaataatttaatgtgttgtcactcccagcaagaaacaagctgtcaaagtaaataaaatttacccagacttttagaactgagcaagacttataattttctttctttggcagttgtctgacaataaaggtaagctcctagtccatgttaggccttcattttattatatttttttttttaagaaaaggcatagtctttcgtaaaggttttattgttatcattgtcagttgggtctgtacccataattgtgtttaatggctttattttggccattaaaatggcttttgaaaacatttctttccatctttgcacagagggggtacaatgaaatccgtgaagttaaacagttccatttcacgggctggcctgaccatggagtgccctaccatgctacagggctgctttcctttatccggcgagtcaagttatcaaaccctcccagtgctggccccatcgttgtacattgcaggtaagtggtggtccaaatggtattgactgtatgcaatcagctttttttagagtatcaagacaaggcttttgagcacaaaaactaatgtgtgcttacgaagttccagcttgcttgtattatagataaagtaaaacagcaataaaataaaagttggctgtaagtagtctataaaacaggaacttaagaaatacatacattcatcctaatgcgtgtagtgttatccacaatttaaagtatagaaactctgccttttaatggcaacatctgtgttttttgtttttatcacttttgcaaatcccatattgtatagaatgctaggttgaaatagacatttcttgccaatctagaaaattcccaatagaattccagctttaaaactaaatttcagacatacagagttactaaatggcctaaattgcaaggatttgtgctgcaaaacagctatttaaaaattttttttaaagaattcacattagaggaccttgaaaactgcatcagtgagattcagcaaatatatgccaaaaaacacgagcattatatccagactttcttctgattagaaacttctcttaaaacaagcatttagagatactaaaagcaaattacatggcctcattttgaggtgtgaccagaaaaataagtactgaatctgaaaagcgtttcctaaatgatgctgcacaccattctcatacgctcttccctccaagctacataataggttgtacctaagcattttttgctttctgaaaatccaacctattcaggatttaaataaccatgtataaaagaggggaaaaaaagcagagaatgaagtaaaggtaaaacgtccca

SEQ ID NO: 1328 - DNA, 5775 bp, Homo sapiens
acgagcaaactcggcatggatacgactgcggcggcggccgtgcctgcttttgtggcgctcttgctcctctctccttggcctctcctgggatcggcccaaggccagttctccgcaggtggctgtacttttgatgatggtccaggggcctgtgattaccaccaggatctgtatgatgactttgaatgggtgcatgttagtgctcaagagcctcattatctaccacccgagatgccccaaggttcctatatgatagtggactcttcagatcacgaccctggagaaaaagccagacttcagctgcctacaatgaaggagaacgacactcactgcattgatttcagttacctattatatagccagaaaggactgaatcctggcactttgaacatattagttagggtgaataaaggacctcttgccaatccaatttggaatgtgactggattcactggtagagattggcttcgggctgagctagcagtgagcaccttttggcccaatgaatatcaggtaatatttgaagctgaagtctcaggggggagaagtggttatattgccattgatgacatccaagtactgagttatccttgtgataaatctcctcatttcctccgtctaggggatgtagaggtgaatgcagggcaaaacgctacatttcagtgcattgccacagggagagatgctgtgcataacaagttatggctccagagacgaaatggagaagatataccagtagcccagactaagaacatcaatcatagaaggtttgccgcttccttcagattgcaagaagtgacaaaaactgaccaggatttgtatcgctgtgtaactcagtcagaacgaggttccggtgtgtccaattttccccaacttattgtgagagaaccgccaagacccattgctcctcctcagcttcttggtgttgggcctacatatttgctgatccaactaaatgccaactcgatcattggcgatggtcctatcatcctgaaagaagtagagtaccgaatgacatcaggatcctggacagaaacccatgcagtcaatgctccaacttacaaattatggcatttagatccagataccgaatatgagatccgagttctacttacaagacctggtgaaggtggaacggggctcccaggacctccactaatcaccagaacaaaatgtgcagaacctatgagaaccccaaagacattaaagattgctgaaatacaggcaagacggattgctgtggactgggaatccttgggttacaacattacgcgttgccactcttttaatgtcactatctgctaccattacttccgtggtcacaacgagagcaaggcagactgtttggacatggaccccaaagcccctcagcatgttgtgaaccatctgccaccttatacaaatgtcagcctcaagatgatcctaaccaatccagagggaaggaaggagagtgaagagacaattattcaaactgatgaagatgtgcctggtcccgtaccagtaaaatctcttcaaggaacatcctttgaaaataagatcttcttgaactggaaagaacctttggatccaaatggaatcatcactcaatatgagatcagctatagcagtataagatcatttgatcctgcagttccagtggctggacctccccagactgtatcaaatttatggaacagtacacaccatgtctttatgcatctccaccctggaaccacgtaccagtttttcataagagccagcacggtcaaaggctttggtccagccacagccatcaatgtcaccaccaatatctcagctccaactttacctgactatgaaggagttgatgcctctctcaatgaaactgccaccacaataactgtattgttgagaccagcacaagccaaaggtgctcctatcagtgcttatcagattgttgtggaagaactgcacccacaccgaaccaagagagaagccggagccatggaatgctaccaggttcctgtcacataccaaaatgccatgagtgggggtgcaccgtattactttgcctgcagaactccccccggaaacctacctgagcctgccccgttcactgtgggtgacaatcggacctaccaaggcttttggaaccctcctttggctccgcgcaaaggatacaacatctatttccaggcgatgacgagtgtggagaaggaaactaaaacccagtgcgtacgcattgctacaaaagcagcagcaacagaagaaccagaagtgatcccagatcccgccaagcagacagacagagtggtgaaaatagcaggaattagtgctggaattttggtgttcatcctccttctcctagttgtcatattaattgtaaaaaagagcaaacttgctaaaaaacgcaaagatgccatggggaatacccggcaggagatgactcacatggtgaatgcaatggatcgaagttatgctgatcagagcactctgcatgcagaagatcctctttccatcaccttcatggaccaacataactttagtccaagatatgagaaccacagtgctacagcagagtccagtcgccttctagacgtacctcgctacctctgtgaggggacggaatccccttaccagacaggacagctgcatccagccatcagggtagctgatttactgcagcacattaatctcatgaagacatcagacagctatgggttcaaagaggaatatgagagcttttttgaaggacagtcagcatcttgggatgtagctaaaaaagatcaaaatagagcaaaaaaccgatatggaaacattatagcatatgatcactccagagtgattttgcaacccgtagaggatgatccttcctcagattatattaatgccaactatattgatggctaccagagaccaagtcattacattgcaacccaaggtcccgttcatgaaacagtgtatgatttctggaggatgatttggcaagaacaatctgcttgcattgtgatggttacaaatttagttgaggttggccgggttaaatgctataaatattggcctgatgatactgaagtttatggtgacttcaaagtaacgtgtgtagaaatggaaccacttgctgaatatgtagttaggacattcaccctggaaaggagggggtacaatgaaatccgtgaagttaaacagttccatttcacgggctggcctgaccatggagtgccctaccatgctacagggctgctttcctttatccggcgagtcaagttatcaaaccctcccagtgctggccccatcgttgtacattgcagtgctggtgctggacgaactggctgctacattgtgattgacatcatgctagacatggctgaaagagagggtgttgttgatatttacaattgtgtcaaagccttaagatctcggcgtattaatatggtccagacagaggaacagtacatttttattcatgatgccattttagaagcctgcttatgtggagaaactgccatacctgtctgtgaatttaaagctgcatattttgatatgattagaatagactcccagactaactcttcacatctcaaggatgaatttcagactctgaattcagtcacccctcgactacaagctgaagactgcagtatagcgtgcctgccaaggaaccatgacaagaaccgtttcatggacatgctgccacctgacagatgtctgccttttttaattacaattgatggggagagcagtaactacatcaatgctgctcttatggacagctacaggcaaccagctgctttcatcgtcacacaataccctctgccaaacactgtaaaagacttctggagattagtgtatgattatggctgtacctccattgtgatgttaaacgaagtcgacttgtcccagggctgccctcagtactggccagaggaagggatgctacgatatggccccatccaagtggaatgtatgtcttgttcaatggactgtgatgtgatcaaccggatttttaggatatgcaatctaacaagaccacaggaaggttatctgatggtgcaacagtttcagtacctaggatgggcttctcatcgagaagtgcctggatccaaaaggtcattcttgaaactgatacttcaggtggaaaagtggcaggaggaatgcaaggagggggaaggccggacgattatccactgcctaaatggtggcgggcgaagtggcatgttctgtgctataggcatcgttgttgaaatggtgaaacggcaaaatgttgtcgatgttttccatgcagtaaagacactgaggaacagcaagccaaacatggtggaagccccggagcaataccgtttctgctatgatgtagctttggagtacctggaatcatcttagttgggtgagactctttaaagtgcatccatgaagaaacctgtccatctattgagccagcagctgttgtacctgttacacttgtgcagaaagattttaatgtggggggtgggagacttttacatttgagaggtaaaagtattttttttatgaagttgtgtatcttaataaaaaggactgaattagtttttattactatattaaagcatcaacatttcatgccacataaattatatttaataagaaccagattgaaatgagaacgtattggtgtttgtacagtgaacatgccaccttttttctcatggtttcagtagagcagctaccacatgttgcatgagttcatactttctacgtggcatttttctccctttctaaaatgaaagctgatgaatcttaaaaggaagaagaaaagaaaagctgtgcaaattcatagtaaagttcgttttttatatgtttccagtgtagcagatctctatataaatatataaatatatataactggcttattttcttttaatgtgcaatgatggctggatcatttaaagttctttttagaaaataacataagccaaagactcaagtgtaaatatgtctatatggagaaagcacattatatttattggttacttacattccttttttgatggctaaaatactaccaccacacaatcatctttttttcctgaagaaagctttttctttagctaaaatcaattgtaaacgatttttgtagattattttttgtatgttttagtgtaagtagaagataaactttttattcataaaccaggaagcaatgttctttatagtgattctcttgtgtacatgcttgtgaattaaatttgtgtaaaatcccttggcaattgggtcttttaatataggaccaaattaaaacattttgctgaatatgtatagtttttcacaatttcattaggtaaataatggtttggtgatacattgagaaatgtacacattaaaaggccttgctgacaacttgcacaatgttgaacatagcctttaagcatcatttaaattttaaaggaatggagtttttcagcctgtggcccagcactggtcaagaaaacaagatggcaacatatatgctttcagggtcaaatttgagcaaactgtaaactgtcagggtgataaaatgtttctcttgatgtttacatgcacaagctttgcgttctgactataaaaagtgtgaacaaatcaatgccagattcctgttttgcgcattgtcatgggattcttaagtgaacctttctaaatgtggtcttgttcacatgctccacgtagctgtaacttcacatcatcagcttgcagtttgtaattgactaaagcattccagtgtcctctttctagattgccagctcatgacatggtgcttataaagatttaattaaagtaagaatgaaataaagtttttataattat

SEQ ID NO: 1329 - DNA, 4323 bp, Homo sapiens
atggatacgactgcggcggcggccgtgcctgcttttgtggcgctcttgctcctctctccttggcctctcctgggatcggcccaaggccagttctccgcaggtggctgtacttttgatgatggtccaggggcctgtgattaccaccaggatctgtatgatgactttgaatgggtgcatgttagtgctcaagagcctcattatctaccacccgagatgccccaaggttcctatatgatagtggactcttcagatcacgaccctggagaaaaagccagacttcagctgcctacaatgaaggagaacgacactcactgcattgatttcagttacctattatatagccagaaaggactgaatcctggcactttgaacatattagttagggtgaataaaggacctcttgccaatccaatttggaatgtgactggattcactggtagagattggcttcgggctgagctagcagtgagcaccttttggcccaatgaatatcaggtaatatttgaagctgaagtctcaggggggagaagtggttatattgccattgatgacatccaagtactgagttatccttgtgataaatctcctcatttcctccgtctaggggatgtagaggtgaatgcagggcaaaacgctacatttcagtgcattgccacagggagagatgctgtgcataacaagttatggctccagagacgaaatggagaagatataccagtagcccagactaagaacatcaatcatagaaggtttgccgcttccttcagattgcaagaagtgacaaaaactgaccaggatttgtatcgctgtgtaactcagtcagaacgaggttccggtgtgtccaattttccccaacttattgtgagagaaccgccaagacccattgctcctcctcagcttcttggtgttgggcctacatatttgctgatccaactaaatgccaactcgatcattggcgatggtcctatcatcctgaaagaagtagagtaccgaatgacatcaggatcctggacagaaacccatgcagtcaatgctccaacttacaaattatggcatttagatccagataccgaatatgagatccgagttctacttacaagacctggtgaaggtggaacggggctcccaggacctccactaatcaccagaacaaaatgtgcagaacctatgagaaccccaaagacattaaagattgctgaaatacaggcaagacggattgctgtggactgggaatccttgggttacaacattacgcgttgccactcttttaatgtcactatctgctaccattacttccgtggtcacaacgagagcaaggcagactgtttggacatggaccccaaagcccctcagcatgttgtgaaccatctgccaccttatacaaatgtcagcctcaagatgatcctaaccaatccagagggaaggaaggagagtgaagagacaattattcaaactgatgaagatgtgcctggtcccgtaccagtaaaatctcttcaaggaacatcctttgaaaataagatcttcttgaactggaaagaacctttggatccaaatggaatcatcactcaatatgagatcagctatagcagtataagatcatttgatcctgcagttccagtggctggacctccccagactgtatcaaatttatggaacagtacacaccatgtctttatgcatctccaccctggaaccacgtaccagtttttcataagagccagcacggtcaaaggctttggtccagccacagccatcaatgtcaccaccaatatctcagctccaactttacctgactatgaaggagttgatgcctctctcaatgaaactgccaccacaataactgtattgttgagaccagcacaagccaaaggtgctcctatcagtgcttatcagattgttgtggaagaactgcacccacaccgaaccaagagagaagccggagccatggaatgctaccaggttcctgtcacataccaaaatgccatgagtgggggtgcaccgtattactttgcctgcagaactccccccggaaacctacctgagcctgccccgttcactgtgggtgacaatcggacctaccaaggcttttggaaccctcctttggctccgcgcaaaggatacaacatctatttccaggcgatgacgagtgtggagaaggaaactaaaacccagtgcgtacgcattgctacaaaagcagcagcaacagaagaaccagaagtgatcccagatcccgccaagcagacagacagagtggtgaaaatagcaggaattagtgctggaattttggtgttcatcctccttctcctagttgtcatattaattgtaaaaaagagcaaacttgctaaaaaacgcaaagatgccatggggaatacccggcaggagatgactcacatggtgaatgcaatggatcgaagttatgctgatcagagcactctgcatgcagaagatcctctttccatcaccttcatggaccaacataactttagtccaagatatgagaaccacagtgctacagcagagtccagtcgccttctagacgtacctcgctacctctgtgaggggacggaatccccttaccagacaggacagctgcatccagccatcagggtagctgatttactgcagcacattaatctcatgaagacatcagacagctatgggttcaaagaggaatatgagagcttttttgaaggacagtcagcatcttgggatgtagctaaaaaagatcaaaatagagcaaaaaaccgatatggaaacattatagcatatgatcactccagagtgattttgcaacccgtagaggatgatccttcctcagattatattaatgccaactatattgatggctaccagagaccaagtcattacattgcaacccaaggtcccgttcatgaaacagtgtatgatttctggaggatgatttggcaagaacaatctgcttgcattgtgatggttacaaatttagttgaggttggccgggttaaatgctataaatattggcctgatgatactgaagtttatggtgacttcaaagtaacgtgtgtagaaatggaaccacttgctgaatatgtagttaggacattcaccctggaaaggagggggtacaatgaaatccgtgaagttaaacagttccatttcacgggctggcctgaccatggagtgccctaccatgctacagggctgctttcctttatccggcgagtcaagttatcaaaccctcccagtgctggccccatcgttgtacattgcagtgctggtgctggacgaactggctgctacattgtgattgacatcatgctagacatggctgaaagagagggtgttgttgatatttacaattgtgtcaaagccttaagatctcggcgtattaatatggtccagacagaggaacagtacatttttattcatgatgccattttagaagcctgcttatgtggagaaactgccatacctgtctgtgaatttaaagctgcatattttgatatgattagaatagactcccagactaactcttcacatctcaaggatgaatttcagactctgaattcagtcacccctcgactacaagctgaagactgcagtatagcgtgcctgccaaggaaccatgacaagaaccgtttcatggacatgctgccacctgacagatgtctgccttttttaattacaattgatggggagagcagtaactacatcaatgctgctcttatggacagctacaggcaaccagctgctttcatcgtcacacaataccctctgccaaacactgtaaaagacttctggagattagtgtatgattatggctgtacctccattgtgatgttaaacgaagtcgacttgtcccagggctgccctcagtactggccagaggaagggatgctacgatatggccccatccaagtggaatgtatgtcttgttcaatggactgtgatgtgatcaaccggatttttaggatatgcaatctaacaagaccacaggaaggttatctgatggtgcaacagtttcagtacctaggatgggcttctcatcgagaagtgcctggatccaaaaggtcattcttgaaactgatacttcaggtggaaaagtggcaggaggaatgcaaggagggggaaggccggacgattatccactgcctaaatggtggcgggcgaagtggcatgttctgtgctataggcatcgttgttgaaatggtgaaacggcaaaatgttgtcgatgttttccatgcagtaaagacactgaggaacagcaagccaaacatggtggaagccccggagcaataccgtttctgctatgatgtagctttggagtacctggaatcatcttag

SEQ ID NO: 1330 - DNA, 38101 bp, Mus musculus
  misc_feature (4575)..(4634): n = a, g, c, or t.
ctgttaccctgggacagtatggcacagggagtgggtgatggacgctgggcagggcatgttctgtgaaacttgattacttgaatgggcccaccttttgcccaaggctctcccaacggaggccggaccccacaaccctgttattagtggtactgtttctggtgggctgaaatgtggtcagtcctgatagaattagctacctctttggatcaggggactttggtttgatgtggcatagaagaatgaacagcttgggggagttcgtgaactcctatctttgaaggtatttgagcagtggctagtggtttgtgctgtagcagatcctggccttggactggaactgtagcagacatgacaccgagtgtcctgtgctctgtgtgactttaaagtcatccaccccgggctgtgtgagtctgaccttgtctttttctccttcagatactgcccctgcagagacaccccgagggaaaccccagatcagcactagctcatcccagacaccgctcctccagtgggtcctcactctcagcttcctgttggcaacagtggcagtgggaatttatgccatgtaaatgcaatactggcccccaggggctgtgaactctgtccaatgtggccttctctctgtaagggagaatcttgcctggctctcttctcttgggcctctaagaaagcttttggggtccctagcccactccctgtgtttcctttctctctggaatggagggagatacctgacacagttccctcaccaaaagcacatccagccagtggcctgaactttgaaaccagcagccccaaatcctgcagcagagccccaaaactggcctgtaaaagcagctgttctgagcccagtgcccatggttgtaagcatccatgttgactgaccacgactgctgtcccccagtgccatggccactttgatatccgtttccagacatttctgtctcgtatttctgtcttgttttttattatttccccagttctaccagagtaatggtattttgttgttttgttttgtcttgtttttcctaacaaagtggggctatcttttgaggggtgggtgggaaagaattatttaatagttgtaaccttggtctctaacttctgtgtgaaataataaatggcattatctaacagtcactagaagtgcattcatgtctatgctgtctatgagcagggccctgctcatcttgtctcttcagtgtctggcaggaagagggcaggtgaaggtagcattggtagctgccatggttggctgtgcctgagatttggaagtgagctttaagcagttgggcaaagcagttgggcagattttccagactgtgtttgtgtgtacacagatgtgtgtgtgtgtgtgtgtgtgtgtgtgtgtgcatgtgaaggccagagatcaacctcaggtgtgtttatgaactgtaggatctcactatgcaactctgttggaggaactccctatgtagaccagctggccttgagctacaggtatcacaggcctgcctctgccttcatgccaagattacatatgaaagctaccacacctggccaatccaccttgttttttggggggagataggatggtacctgtacataagacagggtctctcttacgtagtcctggctggccttaagtctagctttgaactcattgagttcttcctacctctgccttccaagagctgggtttaaagatatgtactaccacacctggtgagtccactttgtttttcgagtgctaggattacagacacacaccaccatgtctgttttacatgggctccaactcaggtctttactgattgacctatctcttcagccccaacacttccatatttaattaggatgaaatgggcagagctgggataaagctgatacgctctgagtaacgatacttggagactggaggcaaatgcctggcttcgtgttttctcttctagcttcacttactgtgagtacacttattggtatgcaagaccacagggctcagtgtggggagacagctccctccttccatttttgtaaggtttttacttctggaggttgagctcaggctcgggcagtaagcactttacctgctgaaccatctgctactccactttggagttggtcacttaaccccacagtgactcagattcaccgcctgtgacaatacaatgatgctgctgacctcacctgtgtgtcttgagaagcaagttaaattccaaggccttccatcactcctagctcgcttatgcacagaaagccagtgtcttctgatcattgtacctcccgctctgggaatgggaaaacatcactggaggcagaacagggatgaggtacctactatgtcctaccagtaccagagggctgagagttaggagatctttgtcccccatactgactctattaccaggtcttgggcacaatgcttcaaatctcattttgctcactggaaaaatgagcgatacttctgtctttaactgctgaagagggaatatagtgatgtcaaaatactagtctgcacagaaactccagaactccatggaggcacatagctacagagatcagaggtggtatctcagagtcacgatacaagaaaggcattctgggagtcttatatacatgcagccaggtccagaagtcattcttttcttttctttttttttttttttaatgtattgtgataaagtaagaaaagttgggggagggttgctaaagagctggctcagtgcttaaaagcactgcctgctcttccagaagaccctggtttgattcccagcacccacatggtggcttataacagtttatatgtctagttccaggggatctaatggctttttctgtcctctttagcaccaggcacacatgcagtacactgacttatgtgcaggcaaaacatctatacatataaaattaaatgaacacaaaggctagggatatagctaagtggtagaatgcttgcttagcatataggatgccctgggttcagacaccagtacctaaagggtgagcaaacaaagggaagaaaagggaaaaaagagaaaaacctgggcaatggtggcctttaatcccagcacttgggaggcagaggcaggcagatttctggccatttcaaggccagcctggcctacagagcgagttccaggacagtcagggctacacagagaaaccctgttttgagaaaaaaagaaagaaaagaaagaaagaaaaagaaaaagaaagaaaaacaattttgaattctataaaagaatagactttctgtcaattgtcaagagatgagcaaaactagttaaaactggacagacttagaaagaggactaactatatcaataggaaacagcgtccagcgtgaacggactcgcggccccgtctttctttccagcgctgggaatcagatccagggctttgttctcattaggcgaggctctgccactgagctacaccatctactggtgcattggtggatgagcattttacttcccagcacaagtggtgctgtagattaaatctaggacccttacccaagccaattctgtgctcttcttctaagccacagttgcggccggccctgggccttttagagaatcttagagattagccaacaggtcctgtcctcagggttggctggagcaaactgactgagattttgtcacctttagttttctctggctagggataaggccttgagcctttccaaatattcgtggttattcaagtgtttactgatagaggcaaagcggggataggcaggaagagagcccagccaccctcacctgtctccatctggctcatgtttctagcttactggtcaagagtttcaacacaggggctggagagattatggctcacttcctgagcctagttcctagtattcacatggtgacttacaagtatccattttaggggctctcacaccttctgatgcacaaacaatcatgcataggtgcacatttgtggggtggtacaccaaatctatacaggctaccagcaaagttgggtgtcttcctcagtcactctccactttgttttttaattaatttatttttggtagtgagacgtgaactcagggcctcacacatgctgggaaggcactctactgtggggctgagggatgtaggggaaggggggtggggagagagcccatggctggccagagttcctgtgctctgggcaggcagacataggaggactgctggaccctttccactcggccctgggtgggcatctggctgtgtgaaaccactgaccccactcggtgggggtgggggggtggacaaggggcagtctgcaataccaggggccccgggggcaacattctcagccccggagatacaggagagagggcagagggagagaacttcccacgcaggctggctggagcacaggaaggccttcagataggagattaggcgcggctcattaggaaaagcctatcccatcatccaagcacagcaggccttgatgaacagagacagtttatggttttagagctttattgtagaaaggcagagggaaagagagagaagatggaaagacagagagagagagagaccggccatggccaagaggagggaagggggaaagagggaaagaggaaannnnnnnnnnnnnnnnnnnnnnnnnnnnnnnnnnnnnnnnnnnnnnnnnnnnnnnnnnnnagagagagagagagagagagagagagagagagaaagagagagaagagaaagtaagagaggttagacagtaagaaaggttagagattgaggaggggccaagcagcccctcttatggtgggcttgttatcttgttgttgctaggtaactggggaggagtctagcctgaaggtcagaagcttgggacattgtgtatgtgactaaaagccacgcttctcctgtgggggctggaggggcggtaacttctacaggagtcaggggtccaggagacatgagggaacacctacgtcccatgtaggtgaattatcaccaccaggttctactggagttcagacctcagctcgactggagaccagactgtctgtgtatagcccaatgccccacactctaccactgagctagattcccagccctgtgctaatttttggaacaaggtctcttatgaatttaaaacttatcaactgattagactggctgaccagcaagccttggagatttgccgtctccacttttctagactgggattacaggcaaatgctgtatccatcttttctaagtgggtacagaggaaccaaaaccaggtcttcatgttcgcacagcaaacactttactgaatgagtcacctccctgactccttaacttctccatgtgatctatgtacggcaaaatgattttgatttaaaaaaatggacctgcatggtgcctttactcccagcactccagaggtagagggcagggggatctctgagttcatggctgacctggtctacagagtgagttccaggataaccagggttacacagagaagagtttgtaaatagatccatgtatatatatattttaaactttctattgattctttgtgaatttcatattgtgtaccccaatcccacgcatctccccatcccttcctatccaacctgtgcccttgaagaaaaagtaaaaaagaaaaacccaaaaacatctcaccatggaaactgcagtatgtcactgagtgtcccacagtatagccttttgtccacatttctttacttgcaaatgctcattgtaatgagtctggtttgaggcctctggcttctgctgtaccatcaatactggatcttcactaggacttctcttggatatactgtttgttgctctgtgtcatggagatcctgcagctttgattctgcaggacagacccattcaggagctccagcagttcatagatggactggatgttggtataggctaactcaaaagccctggatttgggtttgggctggtagctgagttgctcagcccaccagttctcctgcacccctggcccaggcaaggagtgggaccagttatgctgtgcccaaggcatttgggccaacattctcacaaccacaccacggggactagctctccagcactgctctggctagctcactcaagtgccacaggatataggcatacattttttgcaacctacttttttttttccttcaagatagggtttctcagtatagctctggctgtcctagaacttactttataggccaggttggccttgaactcagaaatccacctgcctctgtctcccaagtgttgggattaaaggcatgcgccactactatccagcgcaacctacttttaataagggttcaacctctcttctagcccaccactcagcaaaggtagaaagagaaaagttattaggatatgggagaggtggacctgttcagcaatagttctttggggtgagctttgatcttcttgggcagcagttcagtcctgaagcaaacaccaaatatgacccagcagctgtagacccgtcctctaggcaggcagacaccaggcacacattaggaatgaaccggcaactagtcaagtcctttcagcaagcagacatcaagtaggaagcagcaactatagctcaatcctgaagaaattgccaggctcaccaactagcctgaggcaaggccacagccgtgacaagctgctgcaggaacctcacgagcaggttcttggataactttctttcaatggcagtgttaccacaagttgagctcaacttgtgtaaggtgaatgaatacatgtgtgtctttagtgaagaatagcaaggtggagcaaatcaaaccaaggctcagtgctcgtctcccactgtctgtggagtcctatttatactccttcatcaactgtccttttacatgactgctatatccaaacatcctttcacctgtgtctgcgtcaggaaaacagtctttcacgtgtttgctttggcaagacattctttcacctttgtgtcccagcaaaacatcgtttgatataaccaactatccaaagacctagaagtttccacttcaacagctggcaaggagttgggccggctctcatgcccttggagccaactctacccgtgcttctcaggcaagtggcagggcaaggtctgcccctgacaataacatggtcccaagaggcagtccagatcagggatacctacatggcctttggtgttaacatggaccatggacactaacacagacccctatttgccgtatggtcatggacccaggcatggcccttagcagcaggatagactgggacttcaccctggcctcagaaggcagtgcaggctcctcacatctggcggttcctcagcgcttttgcacgtccggttccgtctctcttcacagtgcttaactcatcctgcttctctttctctcccatctttctaccacacacttgcacattgtagtggtgcccatgctatgccatatggcaggtgggcctctgggtttctatttaaaaaaaaaaaatctttccagccaggcttgatgtcaaatgcctttaatcctagaggcagagacagatggttctctaccgattcagggctatcctgatctgcatagaaagttccagaccagccaaagccactgtgaagaccctactttaaaaacaacaacaacaacaacaacaacaacaacaacaaaactttctgaatctgtactttctatcccttttctctttgtgtgtgtggcagccaggtatctgtactctctgagttacttcacctacctccttgaaccaaatttttgtcttcctcgtaattcaccttataatctcatttataaaatcccttcaccagtctaataaatccccttttgcaatgttaagaaaaccttttgttaaggaaacaacacattcctctcccttcccaccaggttagtttagggtcattcaactccaaagtccccaagttgcctgtttaatggatctgaaagacttatgccttcattcctctctccttaagtctatctatccatttcttttttcttttaagagttgttatttttaagtccttcctttctttctttctccccaaacagggtttctttgtattcctgctttcctggaattgctcaatctcagcctctcctctgtagagctctgtaaagcctctgcctcctgagtgctgggatgaaaggcgtgtgccacatctggcagttgatttatatgtaaagatatatgtatgtgttctgcctatttattgcatgcatacctggtgcctgtagaagtcaaaagagggcatcaggctccctggatggttgtgagccaccgtagagaactgattgtctacaagagcagtcccagcagctcggcatttaattgccaagccatgtcgccaggactctgtctttttttttttttttttggtttttccagacagggtttctctgtgtagccctggatgtcctggaactcactttgtagaccaggctggcctcgaactcagaaattcgcctgcctctgcctcccaagtgctgggattaaaggcgtgcaccaccatgcccaggcataggactctgtcttttgaccagtgaatttgctgactctgcttcactctgacttttgctaaaattctgttcagtgcctaagtccagcattccatctgtacctgaggggaagccccagccaacaatgcggaattacatccctgctattggtgacaactgttaagaacagcctcgattttggtcaagaagcaaataaagcaatctaaaataaaatgtgttaaacctgtcttggcacacagggattaccatgaaatgctgagaaaaccaagtcttagattcacctggtatttttttttaattgcaaaaatgctcaaactttattctctgtaaatatatgtttgaatggttgctgcagcaataggtttccacttgttcgtgtggatgggaggaactcaaaggaaaatctacactaaggttgctatgctaaatctgcctccccccccccccaagatttccatttggaatttggccatgaattttgcatggtttaagcattgccaaggaattaaaaaagttctacagtcatcataattattcgtctgaatctgaatgaaagaaaacatccctggcttcctgggctttggtactatctgagtaggggaaggtgagccacctggtcccaaagctgcggagacagcactctggcacctcctgccgggctggagcaagagtacacctcaggcatactgctttctcacagcagctctgaaaggggtggttttctcatatacttattttaaaggcagggtttcttcagcctccctagtgctagcagatatgggggagggctgataagtctactttttatttatgtgtctgtatccaattgctcagtcattgctccagtccgtttccttttacttaaaaaaaaagtgtacttatgtacagatacatatatctttctctctctacatctaacatgtacgtggcccatagaggccaggagaggacattgggttctctggagcaggagtcacaggcagttctgagcccctgactagggtactgagaacagagactgggtcttctaaaagtacagcaaacgctattgaccaccgatccatctctcaagtcccacctttttacttgggaaaggggctccctaagtcacccaggctggccttgaacttgcgatcctcctgcttagactttacgaggagcggggctgacagacctgcgccactgggctaggttttctccgaagacctaaggtttaaacgctcacaaagctcccgagcctctccgccatctttgctcggttagctgctagcgccaagaactttcgcgccaaaacgtccagcctcacaaaatggagaccggaaagagttgactcgtgacgtcaccaagacgccacagccaatcatcttgggaaccaggccttggaggcgggactcaaccggcgcagagcagtccaatagctatccgcggcgctgaacgaaccaataggagcgcagagaccgcggtggacaaacgcggaggctggtttttcccgcgaaagtcggcttcctctaggagggctgaggttcgtgtggcgcgccgctgtgaggtgagggaattgcgggaccccgtctggggaagctcccgccgccccggggtgctcagctctctgtctcccttgacccaggtacagtcatgtcgggcttcgacgacccgggcattttctacagcgacagcttcggtggcgaccccggtgcggaagagggccaggcccgcaagtcgcaactgcagaggcgattcaaggagttcctgagacagtaccgagtgggcaccgatcgcacgggcttcaccttcaagtacaggtgcgacagtgtccgtgaaccattcttacgggggacgccttttcttgacagtccctcttcaggcctaaatttaggatagagtggtctacaattaggtgtcttttgagagaggtgggggcattggtgcctgtgaggaccggggtgcacaggcactgctgctgacggtccctcaatgcacccttcctgtccctctgcccctttgttgaccactaaagagatgaactcaagcggcattacaacctgggtgaatactggatcgaggtggagatggaggacctggccagttttgacgaggaactggctgaccacttgcataaacagccggccgagcacttacagctggtgagtagcacccatttcagagcctcctaaacccgggccctgccccatcatcaccagcagcttatgcctttcctcttcttcagcttgaggaagctgccaaggaggtggcagatgaggtgacccggccccggccagctggagatgagctgctccaagacatccaggtcatgctcaagtcagatgccagcccgtcgagcattcggattctgaaggtaggagtttattgaatggctagtcagggtggcatggccgctgtgtggtgcagaaggcgtctgagacaggtagcttggagcaccagatgtgtgaccctgaccaagacatttgacttaacttagtctttatcctgtgtaaaattacctcaatggggttgatgtcttaaagggaaggcagagttgagtcttgcagaacaacagtgagttcctatccatcagggagactaaaaaaatagtaaatgccatccataactgggaggcagaagtagaagcctggtgtacatgagaccctgtctcgaaaagaaaagaacgtggggacaatgtggctattgctgagagggtagagagttgaggaagaatactttagaggaagtgttgttggagctgaaattgattgatgtgtagccagtcgggtcaaaaccttgaagagtgttccaccagactcagtctaatgaaggattgcaacagggaaaccaatggaaatcatctcgtaggtgtcctctggtacaagtcattccttgatttaagcctgaatcataattaaggcttaagccctttagttttgtttcgttgttttgtttttttccgagacagggtttctctgtatagccctggctgtcctggaactcactctgtagaccaggccggcattgaattcagaaatccgcctgcctctgcctcccgagtgctgggattaattgtcctacattcttatcactggcatgcttgtggccctttcatagtttaagagtcttgtgcatgtgtgtgttctctaatctagcccaagatgccccgagttggagaaatggtagggagattgtctcacctgtagactggtgaggctggcacagaaagcaatggaatgtgtgagaatgtttcactgtgtatagtgaagataacagagactaaaaagaagaggacttgtcatctagcttaatgattagtagtaacaggccagccattttgactttactgactcctaacagtatatgtccctgaaaggtgaggattttattttgaagcagggtttcattacatagcagctctggctgtccggaacttactatatagactggtctggctttgaactcagatccacctgtctctgtctctaaagtgatggtatcaaaggtgtgcaccaccacgtctggcacaaggaatcatttttacagcatgactattaatgaatggtctaatgaatacattctaaagagacactttagctatcagaccactaaacaattgtgccccctcccccccgaatttgggatttcctcaggaatctcattcatacctgggaaagaaaagcctgaaccactagtggaaactcttatctctagaaatgggttttacagtagagaaacagtgatgggttaatggtgggtgggaccacacagcttgatcaagccgacttgatagacatacccctgactctgtttaaactttgatctaactttaggatgcctgaggatgggctcaggggatgtggataaagagtctacccaatctctttgctcttcttcccagggtgaccctcttgaacacgtctcccccttctgctttttactgtgaatattttaattggctacttgaggatgagtggctaatctggcttcttggtatataggtgtgaccctttgtttggtaacatgatcatagtaacatcacaattaacagttagtgttagtatctagtgagatggagtcgttaagatggcgaacctgaggctgacagaatgtccatagcagttggtgacaaaattgagctagcaccagggcctctgtcttgtgtcaattctctggaacagcacaggaagctactgtcagggctggagtttgggtcttctgggttttgtcgtaaaatatgtttcatgtttcccttgtctcccagtcccttgccatgctctgcaaggcccttgaaaagtgagtgcttgtgtatgaggctcctgaacctggtgcccaggttacctcacattaggtgggtgctctggaaagtctgagctaaactatgagccatggatttgtcaccctccagatcttgcccgtgtcattcctcagcccttcacataactcctcgttctccttaatcatcaagtcttcttgtggctttgttacagtcagacatgatgtcacacctggtgaagatccctggcatcatcatttcagcctctgcagtccgtgccaaggctactcgtatctccattcagtgccgcagctgccacaataccctcaccaatatcgccatgcgcccaggcctagagggctatgcccttcccaggaagtgcaatatgtgagtgtgtagccaaagggactctggggaatgacctgaagtatcaaaaaagctggcaaccctggcaagtgctgcctgtactgcttgttagagaccttaaggcaaagactgggaagcactctatccttgagttaggcaggatcaatatacccagcccagtgtcccttcaggcagttgaaattttgccccacctggataataatccacatggcctgtgtgtggaatccaaggttggggaggaaacagtccaggggattgagtctatatggaaactgtttctctgtctctctaagcccctggctatcctggagctcactcgtatagaccaggctggctttgaactcaaaaatttgtctgcctctgcctctcgagtgttgggtggcatgtgccatcaccagctggcttacagaatcttctaaagcaaactggattgctgggctagaccagtacagtgtgcccactgtactgcctaagaacatgactatactacttgatatttagcatattgttaaactatagtggtagaatgtgtggacttccagttagtaggactttaaaaatttactgtatagttcttaacagaaaacatttgccaacttggacctaacaaactctacttgcatcttggctgcttttggctttctcttctagtttcttatcagcttccacattgcctgaggcatactggcattgtcctagactgttgcctaccctcacctgctgccacagagtagctcattcctatccccttgtccaccttcactgctcttcagtctattccctatacagaagctcttccatagcctgccttggtctagtgcacttgcattctcttctccctaagtggtcttcactcagactgccacagtgtccctgcatgtccttgtcatctaagatgccttccttatcctatgtttgcatttggtacatacatgtctgcacactctcatctgcctatttttactgcatgcctttatattatgcagatggtcttcaatcctgatgggaatttagcttcacagaccagggactttaggtttactgctatgtgtccttacctatatttgctgaagagacttactgtataggcctcagagtctgtaccctcagaatggtctagaagtggtaaaataaaatctcactagaaaagatactaggctaagaatacagtttagtaagggattggatgatatagctccttcacctatgaggacaagaggcctcatgagggaacgatgtgtgcctgccacctcagtgtgacgtggagaagccaagatccctgaagatctgactttgaatctagcaccctgccctaggtctttcccagctgtgttccagctctgccttataatgctgttgcctctcagggctgacttgttgaatgggtgtgcgtgcctcacctttgggttctcagggtagttctagtgaccacttcttcccctgcccagggatcaggctgggcgcccaaagtgcccactggatccatacttcatcatgcctgacaagtgcaagtgtgtggacttccagactctgaaactgcaggagctgcctgatgcagtccctcatggtgagatgcccaggcacatgcagctttattgtgacaggtaagtgtaagtatgtaggggctgtgggttggtgtccatgccactctggtacagcatagagatcgtctcgtgcccagtgtgtaagctagagctcttgctttgtctggtgcttctcattgacattggcattttttgtctcccatagtctgcaaagcatgaccactcctattttacatgagtactgtaaactgggggagggggtcaggtgactttgtgagtagaactaaggcctgtgtatcttcagagactagccctctcagcacagagctggataactagcagcagtgctagctcctatctagctgacataccaaccttcctgttaagacctcctggtttggttgaatagttacaaaatgacctagaagaaggcttacaggtccctgagttctttttgtttgtttgtttgtttttcgagacagggtttctctgtagccctagctgtcctggaactcactttgtagaccaggctggcctcgaactcagaaatccgcctgcttctgcctcccgagtggagtgctgggattaaaggcgtgcgccaccacgcccggcagtccctgagttcttaccctgggctcatatacctgatgatgagtacagatgtaaaactttctggggagtaaatccacagttgtcagctttatcattggcaagaatgtgccactcgggatcttgggaaagctatattctaagtccttttttttttcaatcagtaaaatggcctgaactatttcaaagtgcctgaaaaggcatatcaagagtttaacacaattccttagcacaactgagcgtattgtattagagtattctctgagtatccaaagagcttgagaattacattgtggaatgagtaggaagttaataggacagtgtaggtggcagaaacggttctcggtgaaactgatttgatagtatatagaacacctttgagtttgttaccttgcttgattcccaacagctgagacaagtcaaagtcatctctccaagctcagagaggcactgtgatttctctgaagtcacacagctactttatggtccttgaagtaacactgattccagggaaacatggaggctttggtcggttaacatcttattgttaaaagggtgactaaaaacctagaggcaaattgacttggctgagctcagggagtgtggcagaggcagaaatggagagtggcactggcactagcaagtaatccttaagggtttgaggagaaagttttcccaaaggagcttggtcacagctcaaatgacctaggacttctgaaggctgggcaagggcaccgcgcctcacctctaccagtacagcttctgacctcttgaattcagtgagagtcaggccagtattataacactgtactaactatccagactgatgtgtaggtagcaagagtagagaaaggttctcttactctagaccatgcaaggactgagctgacttcatagtgatacttagggtagaaatactaagctgaccacactgtgatttgcttttctttatcttccctccctgtactttactcaggtacctgtgtgacaaggttgttcctgggaacagggtcaccatcatgggcatttattccatcaagaagtttggcttgaaccccagcaagggccgggacagggtaggtgtgggcatccggagctcgtacatccgagtgctgggcatccaggtggacacagatggctctggtgagttgctttgaatttctacacttctcttaacaagctgctcatgtgataacctggcattcttgaattgctcaaaccattaggataggatgtgctttacttgtgtgtgtgtgtgtgtgtgtgtgtgtgtgtgtgtgtgtgtgtgtgcacgcgcgcgcgtgcatgcgtttgtgtgtgcacgcgcgcgcgtgccatgcgtttgtgtgtgcatgcatgtcgtatgtgtttgtgtgtgtatggtgggcatactaggcagatagtctaccacttagctatattccctatcctagagtgttcatttttacagtaagcaaaaatttgttgccctaaaaatgtctatttattggtttagttgtagctcctgccctgaggttgttgattgagttgcatgactcagtgctatagatgggatgtggtgtgtatcctgtgctgcatcttagtaggtggagagaaaaaagtgcatgagggttgagcagacagaatctagttggaagagatcccctaaaggataggtgtctgacactgagctgctttaattgaggtctggaaaaggaactagagcattgtgggaaggcttcatctatcaggagtgtcagcaatagctttgaaggatggaggtgcgaaggaggatcttttcaagtatagaggagagttggtgggaactcaaggctggtgggggtgcaaatgacaggatctctagtaggagttgggttgagtggtaggggccaagtaaatagcctcaactctcagatggagtagagagctcatgcttacatctaggggcagtgggagtcaccttggggattggtccctacatatggtctagagtgatggagttttgagtactgtgtccatattctatgttggtagaaactcccttggttaaaactggaaaagccacatattcatctagccatattccagactttaactctccttgacttgccatatcacttaatgttaccatcttctgaaactggttcttccttagccatcccttcccttgcttagcaaaccctccagatcttcctcagttcccttttttttaatcccctaacctcagcaagcatgctgtttggctgctctactttcatccccagggctgaccacgtcttacctccctgctctgagtcccactctttctcctggatttggattttcaagcccctctgccacttggtcccaccctaccttctccattcctcagcaactcaagtgaaccatgctgttttgatcaagcaattgtgttggttctctactctgtctgcattatgagagactttccagtggtccccaagggcactgtgatctggcctgattgtatggaaccttcttttcctctctggatctttgagatttgaaagactgatatagtcctgtactcttaactttcctgagtaagactgtgtgcgtcctcctggtgctgagagctgttggtgtgtgtatgttgacagaggtcagggtgttcctgatctaggtctaggcccagcagtaggctggaggagatgccccttgctcatgtatgcacctgttccctcctaggccgaagctttgctgggtctgtcagcccacaggaagaggaggaatttcgtcgcctggctgccctccccaacatatatgagctcatctccaagagcatttccccctccatctttgggggcatggatatgaagaaggccattgcctgcctgctttttgggggttcccggaagaggtaaggggtctgggaggaaggtgctgatgacaaggctgctgcaggaggatatctgtgtgatgaggaccaggtgtgttcttccatgtctcccaggtccctcagcctgctggccctggggagcacagtgggaaactctttggtctaatgtgagagatgccaccttgaaccaaagtttctgaatgagacctgtgaaatacctgacacttagaaattgtcatatgtccttttcctcttcctctttccttccttcctttctggtttttttttctttctttttttttttcttttagatttatttattatatcttaagtacactgtagctgacttcagatacaccagatttcattacaggtggttgttagtcaccatgtgtttgctgggatttgaactcaggacctttggaagagcaactgctgagccatctctccagcccctcctcttcctttttctttttccttacctttccttctctctctgtctctctctctcctttttttttttttaagatttatttatttattatatgtaagtacactttagctgtccttagacacaccagaagagggcatcagatctcattacagatggttgtgagccaccatgtggttgctgggatttgaactcatgatctctggaagagcagtcagtgttcttaaccgctgagccatctctccagccctttctttcttttttaagattttatgtacatgaacatactgtcgctttcttcatacacactggaagagggcatcagataatattacgactggttgtgagccaccatgtgactgatagaaattgaactcaggacctctggaagagtagtcttaactgagccatctctagcctgcttttctttctttcttttttcttttggtttttctttttaaacaggtcttattatgtaatcaagctgtctttcaaattcatgatcctcctgcttcggtctcccagattctaagattagagatgttggtcaccattcctggcttcctgtgttcttttgaaactctaaaataattgagctcaagactgtagcagcagtgacagtctattctagtggctactgtgtaatatgctttttgtactacattcagaacattcttgtaaatgcttcatctgtcctgaacccagcccattctctcagcagtctatatggatgttactgttgtattcatttcatagatgaagaagctgaggcacagagaatgtaaggacttacttcaggtaacaggttgggctggattctgccctatgtctactcttcagtgtgcacagccctcagtgccatttatgttacttcccttcctgagaaataccttaccaatgttaggctaggaatgagagaacggggtgtgagcttgtttctgggccagactctgtcatttccacctgttctgagactcttacgggagggtgaccagcccacataaagccaagagtgctgatacataactataatgctagaatctggaagactaaggtgggaagatcatggattagttcagaggatagccctcaagtagattcttactttgtcttctacctacctatcgtctctaggctcccagatggactcactcgccgaggtgatatcaacttgctgatgttgggagaccctggtacagccaagtctcagcttctgaagtttgtggagaagtgctctcccattggggtaagtggctgcagacaactttctagtggcttaggtgttccgcagggaggaaggctacagagtagagttgcctagttcctagacatgcatggggtctgattcaaccacatcctcttcctcattcatcttggctctggtcaggatggcagagggggtttgaaaaggaaggtgtgtacatagaggtgggtggtaagagcattagactgagtcaggcttgctttgcttctcagcctggcagtggacttggaagaggtagcctagattccctgagcatcagcttatactcatttgctaagtaatgacgctgcttatgatagtagctggaatcaagaaggaccagatgcttgctgaagtacctactaagtttttactcatttaactatttgtcttcttgtgaagtgctcctgctcatgttatgtattggataaggagtggagcggtaaagtgtcttgctcaagatcccactgctggggaactttagaacaaggttcaaggcagtgtgtctaatgacccaggtgccctgagtctgggagggatcagggagaggagggtggatgtgacaactgactagtggtctgtgaaatgggggaagtggtgcttttggatggagaggaggttgctaaagctaaccacattggcactgtctcacagaaatatcaaggcctgaaaatgtaagttgtgccatgttaagtcttatagaaagtaagaataggtggaattcatttgtggtttttttgtttttgtttttcgagacagggtttctctgtatagtcctggctgtcctggaactcacttcatagaccaggctggcctagaaatcagaaatctgcctgcctctgcctcccgagtgctgggattaaaggcctgtgccaccaccgcccggctggaattcatttgtataatctgtttagcctgtagtctaatataagcttttttttccctttcagtgtagttaaaccccaaatcttgtgcatgttaggcaaatattttaccactgaggtgcatcccaggcttataacatgcaagtattgagtatttggcattcatgttagcacaatgtgacctgagtatgtctcacatgcacctcaggtaggatttactgtatttcaaggggtaaatacctgtatgctacagatgatggactcaggatagagacctcctaaaagccaggaatccccaaccctgaggccagcttcaaatatattcttttctggggatcaatacttaatgtcaccgggatatgctgtagctcaggtgaaccttccaaagaggaaggaaaggctgaggcccagttaggccttgagttctgtactgttcaaccagttttgcagcgtgatgtgggtaagtcatagccctctgagctcttgccctttggggctggcactaagtactgacacctcctgtctcccccaggtgtacacatctgggaaaggtagcagtgctgctggcttgactgcctcagtgatacgggacccctcatctcgaaacttcatcatggaaggtggagccatggttctggccgatggtggggttgtctgtattgatgagtttgacaaggtgagtctaagtcttctagtcacaggactggggtgtgtggcctcaggtgtggtagcagatacctcctgagagacttatatatagttcttgtgcccatcactctgggggaacttgggataggttgctttgcttctctggggtactctggaaaaaagtgaaagccaagcccgtgtgattatctgctattgactggcctgaagtctactacagaatggttacggttcctagatttttctgccactctacccagcttgggatgggattctgatagacaaactctcaatgcagatgcgggaagatgaccgtgttgcaatccatgaggctatggagcagcagaccatctccattgctaaagtgagtgacagctacccttcagcaatcctaagtcctcctaaggctgcactaatgtgtgctgccaagtcctctttgcccaacgctgtgctagcagcaacgggcctggaactgggggtgggggagcaagagtgcacacatgtaagcatgtacacatatatatgcgtgtacataatgtatgagttcatatgttcatatgtgatggagaggcctgtcccaggatttttggttatttgctccatttactcccctttctacttcaggctgggatcactaccaccttgaactctcgctgctctgttctggctgcagccaactcagtgtttggccgatgggatgagacaaaaggggaggacaatattgacttcatgcctaccatcttgtcccgatttgatatgatcttcatcgtcaaagatgagcacaatgaggagagggacatggtacgtctcgggctaggctggtgacaacagataggttcatggtcatgaaattgaataagagatttagccacagaaatgctagtggttagatagtctggaaggaagcatatgaaatgacttgttagtggcttatggagtgttggagaggaacctagggtcctaagacctaggtatgccctgtgtgtgtgtgtgtttttttttttttttttaagcaagaagctaaaaaactgagctctgctctccacccttgttagtaaatttctgaaagaaaatagcttatggaatttgataaggctatgagtatagtatgggtatacctatgggtatagttcccatgaggctctaggttgttggaccagctgtctgtttctgcttcccttttggaggctttaattcttagacagttgctccctgtgatggtaaagacaaagcctatcttggccaggctgaggagtgcaggctttctgaactctggctggctggctcagactccttttcaagatggctgatttaatctggtgcctccctgcttctctgaattgctctgcttggtctcaaactaactttggcaatatgttttaattttccggctcattctcattttctggcttgttctgtcttcatccctgtctagtttgttctttttctgaaacctatctctacaattgtcccagtaaaactgcctccttctcttctttgtactgccccttaagtagcttctttttcttttcttgtgagacttgggcatatctttttctgtcaaatttttctctgattcatcagtttgtctgccactcaattagatatcactttcaaacatgggtgtttccttctacaaattaattttaccttcattgtttgggattaaagggctgagccatgccataacacgaaataaaatctcagggttcatagtgtgatcaaatatcctgcaacattagctattgatttaattaactgtcctgaaaggaagaagatgaagccttttctagtagttataatagaagtggcagaatagcttgggtattgtccgctgtccatgcttaagtagatacttgccctagttaggacagataggccaaaagtactggaacacaagcatttgccgtattatttcacctcattggcttggatatgtccagtttccatgcttaagtagatagttgccccagtgagagtggacaggccaaagggactggagcagaagcacttgccatattattttatcttgtctgttaaacctgtgagctgacccagtgttccctgtgctccttagatgctagccaaacatgtgatgactctgcatgtgagtgcactgacacagacacaggctgtggagggtgagatcgacctggccaagatgaagaagttcattgcctactgccgagcgtgagtgctgggagataacatgggctttttggatagagggagagcccagtcctgttctgctccttacctaggatttcctggtaaccctgttctgaactttgttctattcttacctgtcactgtgaccctctccatgagtttaacttttctcatcctcttaagtgagggaggtagagtggaggagctgaagactgctgggaagcctgctccctggtgggcctcctgctcctgtggggccctcagtttctggtggaacagtgtacacctggtagctagacagcatactgcagccagcattgagtagttttctgggctggagagatggctcagcggttaagagcactgactgctcttccagaggtccccagttcaattcccagcaaccacatggtggctcacagccatctgtaataagatttgatgccctcttgtgctgtgtctgaggatagctacaatgtactcatatatacactaaataaataaataaaagtagttttctgtacatatgttcagattcacttcccactatctcagagaggtgccatgtctgacacctgctgatagccaggtcaagtttttcttaaatctctttcaaatgacttatcagctatattatgcacaggaagctgtgtttgggaacattcatctttgagagccgatagaggcctgggaacagggtgggggcaacctcaagattcctttctggctttactctagctcactctgcaatctgcaggaggtgtggacctcggctatcagcagaggcagcagagaagctgaagaaccgctacatcatcatgcggagtggggctcgtcagcatgagagggacagtgaccggcgttccagcatccccatcactgtgcggtgagcaagtgggctcacctcagagagcagggccagttggccactgccattttcataatgcaggcccagggtgggttgggcaagggagtcatctgggaccatgtgctgtgtcttcctaattattttgttgtgtgtgtttgaggctggagatgcctgggtaggtctcactactttattttgcctggcttccctctttgagaggcagtttgagggaaggggaggactctgaccgacaatgtagctacagggaaatttacagattttcactgggtcatcatttatagacaatatagtaagagctggggcctacctgagctgaattatatctctagcattgattggttacaagtagatctggttgtgtatagtgaaacccaaagaaagtagcttaagttggaagtttattttcattattaaactttgggaagtaggttcatggtggttttttggagctgtatgggctccgttaaattcatctttgccaacctttcagccccatatggttttagaaggtatagccatcgtgtccacattttgagcaacaagaaagacagtgggaggaagatatgctttttaatggatattttcatatgatgcatggatttagaacttacaggccacatctagaccaaaaagtcaggaaatatcccttagcaggcagcatgtgctggaataaaaattgggttccagtactaagaataaagggtaatagattatcgggatagccagcaaactcccctgcagtcctaacaaccttggccctggccttcctggaggatcagaggagggaatgtgggctgagccctttgagtactttattgctccaacaggcagctggaggctattgtgcgcattgctgaggccctcagtaagatgaaactgcagccctttgccactgaggctgatgtagaggaggcattgagactgttccaggtgtccacactggatgctgctttgtctggcaatctgtcgggtgagtaagcgctggactgtggtcttggacgctaggatagagatttagttagcgggtggctggcagggtgcttcctggatatgcttttgataatagcctttccgctgtgtctctcctggatgttttagctattgtaggaggaaggagcttctctctagacctcttgagtcagttcattaaaagtaattgtaggcctgtcgctggtaagtagtggctgggagtcctccctgttaagctcagaactactctagagtttcccaatttgtggcctcgggtttcttttggttttttgttgttgttgttgttgttgttgttttggtttttttttgacagccaggtctggcacactagattgtcagtccttcctgtcatagagatgagactgacagatcttctgtcatggtcaccagtcttggtgaaatacatgcctcttggcccctgagccttaatgtttactgccttctttcagcctctgagattggtgatatgccaaccagagttacatctgccttaatctgacagtaaatctggtttcccatttgccaatcactgtctaaatgccagagctgtaagttcccaaggttcctgtcctacccattccacaagctttctaatctttcttggtgggataggtgaggaggttgttaaaggtagtgactgaaaggaattaagaggagcagtgacagctgggccaggtatgttggaggagtggttctctttcttacctgataagattgtacacctcttgcttactcagggcttctcagatttgtactctagagggctctgccttctctcccttcttgctctctttaactcaaaacttatacttccattgggcatggttgtggagagttaggaaaatctcttgagttggagatttgaagccagccaaggctatacaatgacactgttcctcaaaaataatgaagtaataaataaacccaaccaaataaaaactctgctcccttcagagtcttttctagggctgttcctgttgccttggtatgtgtagcccatagggtctcgaggcaccggactctcatggtgtctctgctatctagctctgtgcttgtcgcagggcctctgtcacctttccctctgcctagagcactcttccccatattacttgattctcacttccctggtgaggccttcactgtcataatggtgttctgtctttaattttctctggttcaggccactctagttagaggctgtcatctctctggcccttccagtatggatgaactggggtttctagcacccagtttccctattgcactcttgacaggggtggagggcttcactacccaggaggaccaggagatgctgagccgcattgagaagcaactcaagcgccgttttgccattggctctcaggtgtctgaacacagcattgtccaggacttcaccaaacaggtgagtgagcctttctaaccctgggtctacaagccaggcccaggatacagaggatgtcctgctggttctcttagtctggttcccactcagccatcacatacagtgttctgtgctcagcagaggggtgctgggatggggatgtttgagccactgttccttttgtaggaactgctacagtctacagttggggttggctatttatagggaaaggaggaagacagatctgtagaaaccaatacccaattttcccatctcttaggttttcccttgtttagatccttacatggtagggaggaccagaaacagatgagttagccttgcagcccattgggaagagggctactgataacatgcacaggaggtactgtttggggtaccagtaggagcctgtgccctttaaaatcatgaggatagccctggtttctgtttctcgttcccttccctgtgtatcctctccgtttgctcctggaagtaaattatacagtaacagatactggccctctataagtgaagagactagtcttgcctgaggctggggctggagaaagcttgacttctagggtcacagggacttaagtcctagctcacttaattgctatatgacccaaacaagtgacagcctgtgcctatttcttcctctgtaaaatgagattattcctaatactaggtgcataaagtcgatatatgtacttgcctagtacacaagaggcatcatcacatacacacttttctgaagtcaagggagaatggaggtggatattttttgtctgtttaaaattgtctatgatccggtgatgcatcaggtcccttgggtcataatgatatacctgtgcatctgtcttgtgctccctcctacagaaatatccagagcacgctatccgaaaggtgctgcagctcatgctacgcaggggtgagatccaacaccgtatgcagcgcaaggtgctctatcgcctcaagtgagcccattgcccatcaaccctcaagcctgaaatgctgccaccaccctatctcccagtcagtgctccaaacctccttttgccctgcctctccacctcagactgctgtctgcagcacatctgcagcccctggaaatgtactttggtctgttggcctcatactgtgtttgagtgtctgaggactctctgctctgggtgtctatcccctgtcatgccttctcaacaagatgagtctggagcaggaacaggccctggaatgtagatgggtctgtatattggctcccgggccactcactgccaagcttctttgtatgtacagaggtaataaagcaattgagtccctggctgctaaggtcagtggacccagtatgatagtagtgctgtgtgaatacaaggttgactctttcagctttcttcagcagcacctaatgtgagaactggatcattcattgagttgtctgcctcagtttcctaatctgcaaacaaatttgatgaagctgagctcagtgagtgagtggctgtcagtgaaaacccaagtagactccaatgtagaatgtctccagggctttatttatagcaagtgggcctcagtggtgtctggggaaggaaccagacgtcagggtttatcagttaaggagctatgagtacctgagcaagcttcagcacagtaggaggtattagtgacaacattgttaaaagaagacacccaacaccttgtattaccaaaatgccgaaaattatgattttagaaatctataatttataaaattaaggaaaagtcagtgaaatatttaagtatttgttatgtaaagtacatttataaatgggaagctagtgctgaaaacactgcagtcaccaacagtaaagttactgtaggaggaaggcttgagagaacaggaagtacatacacaggcctttctcgtagatggcgtcctgtgctgaaatggctgttgcttgaggtgtttgcttttttttttttttaagttttttgagacagggtttctctgtgtagccctggctgcctggaactcactttgtagaccaggctggcctcgaactcagaaatccgcctgcctctgccttctgagtactgggattaaaagtgtgggccaccacgcctggctgaagtgtttgcttcttactccctcctggaaatgtgcttgctcctgacgaatggccatagccatttctttttgattggtctgcaaacttggaacagagtgtgcttgtctggaagggcaggcttggtaagaacatttcatcctacttgaggccttgaggatgcatggacatgcgggcctgcaggagtgcttagttgagtggaagatgccgatatgatacctctttcttggtaggccctggctggcaggcacagtgttaagggagacaagcttggcttgcagggaagtgggcagtgctcggtatgccacagcacgaggaaaaatgcccaggaaaatatccaggaattaaggattggttggtttctgaatctgaactggatcctaacctttaattctacgagacactggcctgagctgctggggctaagttactgtagccctgcaagtatggccaagatggtcttaggacacactttcccctcttttcctcaccttcccatgagtgtctcagataagtaggatttgaagcagtgctctgaggactcagccctgctgcttgctctgctttcattgcttccccagacagcaacttgattttcacttttttttttgccttggcatgcttgggcgtcctggtgattcctggtctggtcccttgcccaaggtatagatagacatttcacatcccctggttggtctttcagcttaaatattatttgtccttagacatatattcgtgtcacacagtgacaggattggtacgggcccaaatgggctgcaatggcctgttatgttagcacctgagctctgctgcatctaccatcacatattgtctgacccagactgcacgtgggagaggattctactgaaatgcatgaggtgtggaggatttctggcaaaattctaagcaactgttaatgacaagctgttgggaatcatacacactgtcaccttagccaccatagaagtcatacgtacagtgaagattacaggccagacatggaagttagcatccctgtaactcccatatttaggagatggaagcaggaggatcaggagttcaaggttgtcctcagtttcaaagtgttcaaggctacaacctgggctataagagattggtcctgtttcaaaaacaatctacataaaaatgtgttagtgaaaatactattttagaggaacatttacaagtaccagaataaggccaattctctttttttgcgggtgtgtgtgtgtgtgtgtgtgtgtgtgtgtgtgtgtgtgtgtgtgtttcgagacagggttttcgtatagccccggctgtcctggaactcactctgtagaccaggctggcctcgaactcagaaatctccctgcctctgcctcccgagtgctgggattaaaggcatgcgccaccaccgcccagcccaattctcttatttttaaactattttttatttttatcttatgcatcttggtgttttgcctgcatgtatgtctgtatgaaggtgttagatctttgatttgcaggtgtttgtgaactctatgggtgctgagaattgaacctgggtccccaggaagagaagccagtgcttttagatgcggagccatctaccccatcccaaagaaacaacaaaaacaaggaatttcagaaatgcaaaagatgagttttctcagactgttgaggtggaagtggcagaagatgcacacttcacagggtaactttgtggttttagatgtaagtttttcacttctattaagtatgttatggttttagatgtaaatctttcatattgtgcgtgggtgtgtatgtgttggtcttaaatagcatgccacatgggtggagcttaggaggcaactgcatagagtctgttctctccttgcatgtttacatgggctcttgggaaaactcaggtcatccgatgtgtgtgacaagcacctttacctgctgaggcatacagatccgtgtgcttaaacatgaacactggtaggttggtatttatgagccaagggttgcagctcagtggttgactgctttcctggcatgtgtgaggccaggttttcaatcctggcaccacaggaacatggtatggttcaaagggtattaatggtagttttcagttaaatcagtgagggttttttcttctacttgaaagatgaggcggtaaggtaaagttctggtgtaagtacatgggcccaaacccaactggcctgggttcagattgtaactcagctacttactgtacctatcccagccttaatttcctattaagaaataggggtgctgggtttggtggtgcacgccttaaacaccagctctagggaggcaggcaggtggatctcttaggtttaagtctagcctgatctatagagcaagctccaggatgagagctcacagaaaccctgtcttgaataaaaagaaaagggggggggggagaaaaagatgtgagcaccgatttaaggatgaggcaggctcttctagggactgagctgccttgacagcaaattttggaattattaggaaactaagttccaagcaataaatagataggcagtttagggtcctttccattgtttcccctttctcaaagttcaggctgaggttaagagaatggccatgaggatgggttggtactagcaccttacccacagtccagcaaagggtgctgtggatggggtggaatagattaaggtagacaattgcatccatggtttgccagatcagttgcgctctctctctctctctctctctctctctctctctctctctctctgtgtgtgtctctctctctctctctgtgtgtgtgtatgtgttaaagtgaaaggataccaatcaggctagattagggcccactttaacaaacccacaggtctctacgtttaataggattaaagacaagtgctaccatacctgttccataactacctaacaactttgtactcaggtctgaggcgctggtgtctagggcttttttaacatgataggtggtgggggaacaggcttctttctaggacaggaggagtggggtggggctggggtgtaagcccctgttgcccacagagtggaaagttcctagccttaatctttcatcagacacattgaagagaaaaaggcattatatggggagcaaagtggctcaggagtcaagaacttctggccaccttgaaccaagtttctacttgtgtagggacaggatttggggaagggtttgggaaagaatttcatggagggtccagggctgctttctgatgccctcctctgccaaaatgttttcagcaccttatgaatgagtggtgaattctgcactcactgtgtgccaagtagtacactagacacccacatattctacagtgcccactaccccccaaaattttttttaaaaatttatttttatttatatgagtatgctgtagctgtcttcagacacaccagaagagggcatcagatctcattacagatggttgtgaggcaccatgtggttgctgggaattgaactcggcctctggaagaagtcagtgcacttatccgctgagccatctctccagccccctaccccacaattctgagtaacatacaactgagtgacaggctgctctgactctgtgtatcagggcagtgatatacagtgtctcagccttctgaaggtgtgcagaggtccatgtagacctgccttggcactcagccatgttctggggacatgaatgggtggaggcctgggaagagcagcagcttactggaagcttcacctctgctttcctggaatgccagagcctgtgtgaagctgtttgtcactgaaaaggggtagtgtgttaacacagacctgggtgcagcaagggtcgggaacaggcgggtcctgttgaaagggcccagtatgccatgtatggagtatgccatgcatggactattagttctcgtggggagacttgtttttcctgatcctggacgtcttctgagacatccagagatttccaatatcctgggttagaagctccaaagtagcctcttacctatccttaacactatccttaacatctagccttgcctttagttttcttttttagtttttttttttttttcagcagcctctagcatagatctggctgtcactctttgtagacctaaatctagagacctgtctgcctcttactttctgagtgctgggattaaacgtgtaccctgtgccctttcaaacgacattttgttgaaagtggttcacctgactgtcaggggttttaggaggatggtgtccatgagagggcgacagagtaccaggtatagcccaatttggctccaatgctcttgggcagcctccccagggggcctcagcaacccagtggacccaggaactcaccacctgtatgtgatcacaagctttgccatacactggagtttactgacatactgctatttttctccactgtggacctaagaaaaaaggtattccccttatagaacaggaaactgaggcacagtgaggttaaagtttacagcacagaatgaagctggcattcaaacaaagggcacctgatctacaagtctgctggctacttgacatcttagcaatgtttgttaaaatttaacaacatagatgaacttggtttatatgcatacacaaatacacatgtgaagtaatgcatgaatggaaaaaaaaaaaaaaaaaaggcatgccttgcgtctttccaggtataccccggtccctggtttccctcttgagatgacttaatttcttgtatctcttgatatagactggtggaatcttagaactgggcacagtttctaaagcctgggcacctggccccaaatggatatagagcctagcccttgggttccagcattcaccacggacaagacctgtgtgatcattgcctctcttagccctttgattctctactcagggcatggtagggttacatcctctctagcagctgaagactgagctacgtctggttttcttttattcctcctttctccagggagtcctcatcttaggcacagctgatcccggaaaatccactttcttgcctcagaagaggagaattaagtattcagagagctatgggttactgtaggcggtctttcttccccatgaggttgccctggaagggagggtttttaattgatgagaaggttgtactgtctgggtgtgttttctgtctgggcagctcctctctgaggccatcataaaggaagcaggttgccctctgtcaggccccagctgtagtttgccctgttctttctctgtctgaatggaacattggttgttgggaaggctttgctaagtatcttgtctctgagctcagcacaggacaagccctgaatctcacctttccccaaaatccatagtcccttcatctgggcctgctgaagattacatgtttagtgatccagtgactagctctggccaatagctagttcacagcctgtaataattaacataccatttctttagcttctcatcagtcattccaggttagttcctaggaagggcaacatgaatggaatctgtcttcacccctacaaataagccttagttttatgtcactaaggcagtgggttctttgttactcatttaatcttatttatcctgactgataaaatattttggacttcctccctagcctgttagaacagttaaaaggcatgtttttaatgcaacagttccctgctctggtattctgcccaagaatgttttttgttttgttttgagacagggtttctctgtgtagccctggctgtcctggaactcactctgtagaccaggctggcctcgaactcagaaatccacctgcctctgcctccccagtgctgggattaaaggcgtgcgccaccatcgcccagccaaggatgggctttatttcacctggtacagcccctttccagggagagaatatggtatcgtccattcatgcttgcctgcattccccactgctcatcagtctatatcatagggctaattctacttacactgtgagagtttaggattaaatgtgtcaatgctgggcccagggcattttctctgaggtgtgtctcagtattactgaagcttttagttcattcatctgtatttgcctggctgccatgtgtgtcctggacacagaagatagagaacaaagcaggagagaaagatccagagagaatgtcagcattgccttgtgagtctaaggtaataaaactccatgaatgctctggctgtgggttcctggtggccctatactttgagatgcatccaaggggctggcagggagtgggggtggcaggctgcattatataagcctgcagcctgaaagccagggttctgttttgacagttctgttcacagcccccacatggacatgctccttagttgcagagctgagtggggaagggagcatcatgggagtctggaagcatcttatcccaagctcctatgctaaacctggcagttctctagcctggacccaggccatctgctcagtcccttgctcaagcccagcctgtctgacctcttttggctgactctgggagggcctagagagtagagaaaggactggcagggcttcctgaggagagagagagagagagcaaagtaagcataggaagtcaaacttgggagggaggggaggggacgggagggaaggactgctggggccgtgcctctagtgatggtcaacattcttgtttatgaaaaagggccctctgaagatgccattctgtggataactgggggcatgctcttggcattgtaagataaccctggccctgtagcagagcagacttggccctgtgtcagattgctgtcctgttacaaatagatgagtagcttgaaacagcagatattcattgcccttggttcctgggagttagctcagcacagcctagctgggacttttatctcttctgttatcaggctgcagtctctaggaaagttggattgaatgagaactttctcatctccctcacatggctcctggtacctagagagggtgtgccatttaatcagacatgtaatccccaggactagaaaatgaatggaaagcctttgggttcttgagtgattccacattgccttttggtgcccccattttagtggggggagagccctgcatcatttattctgcctctctctgtcttacctttccatggggcagatctatagaaatagagtaatgacagggaatggaataatggccaaccgaggcttcctgtgagctttcccaccaacactggcaggcctaaggagctgagggtatttttgtctggcccaccccatctgttttgcctgtccctttctctgaagtattgtgcctgcagctgtagcctgagatgccttttcttggctctggtctagatagctgcaaactggccataaaagtccctcctcccagtcactctactttgttgtgagtaagccactctttagatttaactaaaatctggcagtggaggggcacggtgaaagggatgaggaagagataagagagctggcaccaaggccctgttccctctctgcatttcaaacttgctggagtgtgcctcctctgtgcacacagtgagatctgaggctggctcagcagctgggtgagggagatgagaaatactcctcattcaatccagctttcctaggagactgcagtttaataaaagagagattccagctaggctgtgctgagccaatccccaggaaccaaggacagtgagtatttcaagctactgagacatttactatgcagccacagagacctcatacactcaatactgcctcctaagagccaactgtcctcccattcttctgcttcccactgccctgaggcctgagcaggactcacaaactcaagttcaaggcagcttaaggctgaggagctgaccttaaatgtcattttgccatttctgggttcattttttggaacaatctactaaaaagcaatgctctccctgatgcccagctccttatagtgtacaaagccttttcctcctattgttctagcttggtgttcctgaccactctgagaggcaccgaggacaggtcaagtagcagatgaacagtctgaggccccaagataagaaatgatgtgacagggaacctgtggtggggtccctatgatagctgcagggcagctatttgtgtgcagacaacatagccacacccctcacttaaggtgtctgcctggaaaactttactacttttccaagattcctgtgtagctagcatcctggatagcgtctaactcatacaatcaagatgctcatacacaggctaacctctaaatctgctgagattagcagggagagaagttcagggaacagagtattatgtggtcagtggtggggaacaggaataaccctggaggtgacttcccagtgccacaattttcctgtggcagttggagccactcagctctggcagtccaggtctgttgtgagctccgggccattgataccaaaagcataggcatttagcattttgctcagctagctagaatggatttagttgatgcattaatgctgattgaagtactctctccataaggtatagaacaaaatcactggaaatttcaagaagcaacctgaataaccccatcctttcatcccaggggagaaaaagaggtgttttgttcagcatcatctgtcaatatctgattgactctgattggatcattcatttctcttgtattagtcacaacttctagagagatgagccataacaatggactggttaagcctacatcgcttaaaattattgtgtccagacagggcaggacttgtctccagaagtgtaatgagaaatcctggggcacatgtaaggcattaacggacagtctctttgacatcatcatcccacaggaaggaatgactaatagacaccacagggttcattgctgtaactgagtctgaagacaagggactgtttcaggagctggtgtccctgtctatttgagagcatccctggtctccatggctgcactcaggcaggatgaagagctgctatctccacaccaaccatgctttgggtggagaggggaaacagacttagaaggaatgaggaacttgagatgtatggagaaagacaggagcttggtctaggcctccaaatgattgttgggacctgaatcccagcagtaccgggttgtgtaaaccagccagggcgtctgtctcagaacctcagtgtttagacctgcaggctgtggatgatgagggtgaactcagaagaccccagtggtcttcaggacagtggatgtaatgttcctatacttgtggttgacctaggcaggctcctggagacagaaggttgat

SEQ ID NO: 1331 - DNA, 2649 bp, Mus musculus
gagggaattgcgggaccccgtctggggaagctcccgccgccccggggtgctcagctctctgtctcccttgacccaggtacagtcatgtcgggcttcgacgacccgggcattttctacagcgacagcttcggtggcgaccccggtgcggaagagggccaggcccgcaagtcgcaactgcagaggcgattcaaggagttcctgagacagtaccgagtgggcaccgatcgcacgggcttcaccttcaagtacagagatgaactcaagcggcattacaacctgggtgaatactggatcgaggtggagatggaggacctggccagttttgacgaggaactggctgaccacttgcataaacagccggccgagcacttacagctgcttgaggaagctgccaaggaggtggcagatgaggtgacccggccccggccagctggagatgagctgctccaagacatccaggtcatgctcaagtcagatgccagcccgtcgagcattcggattctgaagtcagacatgatgtcacacctggtgaagatccctggcatcatcatttcagcctctgcagtccgtgccaaggctactcgtatctccattcagtgccgcagctgccacaacaccctcaccaatatcgccatgcccaggcctagagggctatgccttcccaggaagtgcaatatggatcaggctgggcgcccaaagtgcccactggatccatacttcatcatgcctgacaagtgcaagtgtgtggacttccagactctgaaactgcaggagctgcctgatgcagtccctcatggtgagatgcccaggcacatgcagctttattgtgacaggtacctgtgtgacaaggttgttcctgggaacagggtcaccatcatgggcatttattccatcaagaagtttggcttgaaccccagcaagggccgggacagggtaggtgtgggcatccggagctcgtacatccgagtgctgggcatccaggtggacacagatggctctggccgaagctttgctgggtctgtcagcccacaggaagaggaggaatttcgtcgcctggctgccctccccaacatatatgagctcatctccaagagcatttccccctccatctttgggggcatggatatgaagaaggccattgcctgcctgctttttgggggttcccggaagaggctcccagatggactcactcgccgaggtgatatcaacttgctgatgttgggagaccctggtacagccaagtctcagcttctgaagtttgtggagaagtgctctcccattggggtgtacacatctgggaaaggtagcagtgctgcaggcttgactgcctcagtgatacgggacccctcatctcgaaacttcatcatggaaggtggagccatggttctggccgatggtggggttgtctgtattgatgagtttgacaagatgcgggaagatgaccgtgttgcaatccatgaggctatggagcagcagaccatctccattgctaaagctgggatcactaccaccttgaactctcgctgctctgttctggctgcagccaactcagtgtttggccgatgggatgagacaaaaggggaggacaatattgacttcatgcctaccatcttgtcccgatttgatatgatcttcatcgtcaaagatgagcacaatgaggagagggacatgatgctagccaaacatgtgatgactctgcatgtgagtgcactgacacagacacaggctgtggagggtgagatcgacctggccaagatgaagaagttcattgcctactgccgagcgaggtgtggacctcggctatcagcagaggcagcagagaagctgaagaaccgctacatcatcatgcggagtggggctcgtcagcatgagagggacagtgaccggcgttccagcatccccatcactgtgcggcagctggaggctattgtgcgcattgctgaggccctcagtaagatgaaactgcagccctttgccactgaggctgatgtagaggaggcattgagactgttccaggtgtccacactggatgctgctttgtctggcaatctgtcgggggtggagggcttcactacccaggaggaccaggagatgctgagccgcattgagaagcaactcaagcgccgttttgccattggctctcaggtgtctgaacacagcattgtccaggacttcaccaaacagaaatatccagagcacgctatccgaaaggtgctgcagctcatgctacgcaggggtgagatccaacaccgtatgcagcgcaaggtgctctatcgcctcaagtgagcccattgcccatcaaccctcaagcctgaaatgctgccaccaccctatctcccagtcagtgctccaaacctccttttgccctgcctctccacctcagactgctgtctgcagcacatctgcagcccctggaaatgtactttggtctgttggctcatactgtgtttgagtgtctgaggactctctgctctgggtgtctatcccctgtcatgccttctcaacaagatgagtctggagcaggaacaggccctggaatgtagatgggtctgtatattggctcccgggccactcactgccaagcttctttgtatgtacagaggtaataaagcaattgagtccctggctgctaaggtcagtggacccagt

SEQ ID NO: 1332 - DNA, 2202 bp, Mus musculus
atgtcgggcttcgacgacccgggcattttctacagcgacagcttcggtggcgaccccggtgcggaagagggccaggcccgcaagtcgcaactgcagaggcgattcaaggagttcctgagacagtaccgagtgggcaccgatcgcacgggcttcaccttcaagtacagagatgaactcaagcggcattacaacctgggtgaatactggatcgaggtggagatggaggacctggccagttttgacgaggaactggctgaccacttgcataaacagccggccgagcacttacagctgcttgaggaagctgccaaggaggtggcagatgaggtgacccggccccggccagctggagatgagctgctccaagacatccaggtcatgctcaagtcagatgccagcccgtcgagcattcggattctgaagtcagacatgatgtcacacctggtgaagatccctggcatcatcatttcagcctctgcagtccgtgccaaggctactcgtatctccattcagtgccgcagctgccacaacaccctcaccaatatcgccatgcccaggcctagagggctatgccttcccaggaagtgcaatatggatcaggctgggcgcccaaagtgcccactggatccatacttcatcatgcctgacaagtgcaagtgtgtggacttccagactctgaaactgcaggagctgcctgatgcagtccctcatggtgagatgcccaggcacatgcagctttattgtgacaggtacctgtgtgacaaggttgttcctgggaacagggtcaccatcatgggcatttattccatcaagaagtttggcttgaaccccagcaagggccgggacagggtaggtgtgggcatccggagctcgtacatccgagtgctgggcatccaggtggacacagatggctctggccgaagctttgctgggtctgtcagcccacaggaagaggaggaatttcgtcgcctggctgccctccccaacatatatgagctcatctccaagagcatttccccctccatctttgggggcatggatatgaagaaggccattgcctgcctgctttttgggggttcccggaagaggctcccagatggactcactcgccgaggtgatatcaacttgctgatgttgggagaccctggtacagccaagtctcagcttctgaagtttgtggagaagtgctctcccattggggtgtacacatctgggaaaggtagcagtgctgcaggcttgactgcctcagtgatacgggacccctcatctcgaaacttcatcatggaaggtggagccatggttctggccgatggtggggttgtctgtattgatgagtttgacaagatgcgggaagatgaccgtgttgcaatccatgaggctatggagcagcagaccatctccattgctaaagctgggatcactaccaccttgaactctcgctgctctgttctggctgcagccaactcagtgtttggccgatgggatgagacaaaaggggaggacaatattgacttcatgcctaccatcttgtcccgatttgatatgatcttcatcgtcaaagatgagcacaatgaggagagggacatgatgctagccaaacatgtgatgactctgcatgtgagtgcactgacacagacacaggctgtggagggtgagatcgacctggccaagatgaagaagttcattgcctactgccgagcgaggtgtggacctcggctatcagcagaggcagcagagaagctgaagaaccgctacatcatcatgcggagtggggctcgtcagcatgagagggacagtgaccggcgttccagcatccccatcactgtgcggcagctggaggctattgtgcgcattgctgaggccctcagtaagatgaaactgcagccctttgccactgaggctgatgtagaggaggcattgagactgttccaggtgtccacactggatgctgctttgtctggcaatctgtcgggggtggagggcttcactacccaggaggaccaggagatgctgagccgcattgagaagcaactcaagcgccgttttgccattggctctcaggtgtctgaacacagcattgtccaggacttcaccaaacagaaatatccagagcacgctatccgaaaggtgctgcagctcatgctacgcaggggtgagatccaacaccgtatgcagcgcaaggtgctctatcgcctcaagtga

SEQ ID NO: 1333 - DNA, 44366 bp, Homo sapiens
gccagtcttgaacacctgacttcaagcaatcctcttgcctctgcctccccacatgctgcagttacaggcgcgagccaccatgccagcctgaatgtttgttgttgttgttgtttgagatggagtctcacccaggctggagtgcagtggcgcgatctcagctcactgcaacctctgcctcccgggttcaagcaattatcctgcctcagccccccgagtagctgggattacaggcgcccaccaccatgcctggctaattttttttttgtatgtttagtagagatggggtttcaccatgttggccaggctggtctcgaactcctgacctcaggtgatccgcccaccttggcctcccaaagtgctgagattacaggcgtgagtcactgtgcccggccacctgcgtgtttttgtatgagaagtggagtgcaggcaaaaggacctggggtcaaccttcagcgtgtggctctgggcaagccatgagacttctccctacctcagtttccccacccgtaaaatccagtgaggttcagctacttctagcttattggctcagaagtgcacaagaacccctcagaaatcatgggaaactcctgcctccttaatttagactcctttttaggcctttggtcccctgatgtgggccagggagttggggacctgtatccagctatgaacccaccacaggaagatgtcccttctgagtcttgttgtgtgtgagcccctccctcatgtgcctaagaacgatcaaggctggctgtactgaaacatcttggaaacttccaaaaagaccaaagtgctccacaaaatgtaccctcactaagcctaaaacactgagggagggagtgtggctttgggatgggtagcaataaagaggtaaggcttagctacctcctggcaggttatattaggcctcccctcctgtgccaccctaacctacctggcttgtggctttctcacttgtgccagaccacacggacccctctgctaggggtttgtaaccccggagggcttggctatttggtggggtagggagacgtcaccctaatgaagcagttctcaaagtgtggtaccctggctgtgggaggtggtaatcctagtatcccctcaacggggtctgtgaggacaaagcatttttataacactactactatttttttggttttttttttttcgtttgagacagtcttgctgtcacccaggctggagtgcagtggcatgatctcggctcactgcaagctccgcctcccaggttcacgccattctcctgcctcagcctcccgagtagctgggactacaggtgcccgccaccatgcctggctaattttttgtatttttagtagagacggggtttcactgtgttagccaggatggtctcgatctcctgaccttgtgatccgcccgcctcggcctcccaaagtgctgtaattacaggtgtgagccaccgcgcccggcctttttttttttttttttttttttttttgagacagggtctcgctctttcacccagtctggagtgtagtggcacaatcacagctcactgcagcttcaacctcccaggttcaagggattctcccacctcagcctcctgagtaactgggactataggcacgtgccaccacacccagattttttttttttttggctttttttaaaaaagccaaaaataaatgagaaaattagagtttcactttctcatgaatgtgtgttggcattttccaaaggttatgtgacatgtgatgctctctcatggatttgatggctcatggaatgtgtgcctgtatgttcttgtatgttaagaatttctcagttttggccgggcacgatggctcatgcctgtaatcccagcactttgggaggctgaggcacggggatcacttgaggtaaggagtttgagaccaacctggccaatgtggtgagaccccatctctactaaaatataaaaattagctgggtgtgatggtgcacacctgtaatcccagctactcgggaggctgaggcaggagaatctcctaagtccgggaggcagaggttgcagtgagccgagattgcaccactgtactccatcctgggcgacagcgagactccatctcaaaaaaaaaaaaaaaagaaagaaaagaaaagaaaaagaatttctcagttttaatatctaattttgtaaatagtgatagctatactcacacaaacaaaagctcttttggatccttggttgcatttgagtataaaggagttttggaaccaaaacatttgagaactgcacccctaatgcatcagaaggagcaggagcctttaatatgaacaacacacatgtaaatgtcacagtgtacctgcttgcttgcttgcttgcttgtacttcctgtgaccgcagccctgggccaccagacctaaggccctgttttctctggggaagcccttctcatagcccagggcggggctaggattgaaacccagctggtctggctccagagacctgccctggactctgtcctgcttctaaagacctagggagcacccactctgtgcctgaggaggcaggtggcacatctacccaggttgcatggttggctctggcctatcatgttttaaatcttttttttttttttttttgaaatggagtctcactctgttgcccaggctggagtacagtggcgcaatcttggctcactgcaacctctgcctcctgggttcaagcaattctctgcctcagcctcccgagtagctgggattactggcactcgcaaccatacccggctaattttttgtatttttagtagagacggggtttcaccatattggccaggctggtcttgaactcctgacctcgtgatccacctgccttggcctcccaaagtgctgggattacaggcgtgagccactgcgcccggccctatcacattttaataaccagggatgggactgaacttgaattttgacctcagagctcctgctttctagctcctgccccatcatcaccatgcttagcaaacgtgtgagtttgagaggaagatttacagctcagacctaattgctggcaaagtttaaggagaggacagggagcaggcagaagtctgaaaaccacgcctgggcccaagaatgttttcacaatgtggcctggctgcacagggaagaacagacagcttggagaagtagtgagctgcccgtctttgaaggtattcaagcagtggctagagggacacctgtctgtggtcttgcagaatcctggcgttgggcagtgactgtaccacagaccctgaggccgctctgctttgctttcctatgacatcagacaccctgatgcacgcccacctgttaatgaccttgccccattttctctttcagattctgcccccgtggagactcccagagggaagcccccactcaacacccgctcccaggctccgcttctccgatgggtccttacactcagctttctggtggcgacagttgctgtagggctttatgccatgtgaatgcaggcatgctggctcccagggccatgaactttgtccggtggaaggccttctttctagagagggaattctcttggctggcttccttaccgtgggcactgaaggctttcagggcctccagccctctcactgtgtccctctctctggaaaggaggaaggagcctatggcatcttccccaacgaaaagcacatccaggcaatggcctaaacttcagagggggcgaagggatcagccctgcccttcagcatcctcagttcctgcagcagagcctggaagacaccctaatgtggcagctgtctcaaacctccaaaagccctgagtttcaagtatccttgttgacacggccatgaccactttccccgtgggccatggcaatttttacacaaacctgaaaagatgttgtgtcttgtgtttttgtcttatttttgttggagccactctgttcctggctcagcctcaaatgcagtatttttgttgtgttctgttgtttttatagcagggttggggtggtttttgagccatgcgtgggtggggagggaggtgtttaacggcactgtggccttggtctaacttttgtgtgaaataataaacaacattgtctgatagtagcttgaagtagttttcatgggctttgttattcttggggaactgaccttttcctccctggtttcttgcgtgctcggtaggagaagtggtgatagggggttggcaggagctggtctgtttgagaatacagaaggtgagcttttcttttctttttttttttttttgagatggagtctcactctgtcacccaggctggagtgcagtggcgtgatcttggttcactgcaagctccacctcccaggttcaatcaattctcctgcctcagcctcctgagtagctgggattacagaagttcatcaccatgcccagctaatttttgtatttttagtagagatggggtttccccatgttggccaggctggtctcgaactcccgacctcagctggtccacctgcctcagcttcccaaggtgctgggattacaggcgtgagccaccgtgcctggcccaggaggtgagctttaagtagctggtgggcgaatatttgtgttgaaccctgcttgatgcaattctcgactttatggaagatggggttgccctgtttggtggaaatgagcagattctggggcaaaatttgtattttctgtccagtgactattagggactggagtgaaattcttaggttcaaattcctgctacaccactttgaggttagtcacttaacctctctgaggctccattttatcactggtgacatgaatatagtgatacctaactcacctatgtgtcctgagaagcaaacaagatgcaagtgaaatgccaacgccatacacagttagcacctattatgcaaagaaggagaccagtgttttgtgattcttgtactgtcgagtcacctcatctatgtcatccctgtgttgagggggtgtttccactatctgagggtcaggatggatttcactgaggtctgtccagctctaaaacccaagccctttctatggccctaagtcaagaaaatactaaatatgtagcctcccaatctgggaaagtgaaaaaccttttgctgaaagtgtcctgggcagagcatgggacaagattttttttttttttttttttttttttttgagacagggtctggctttgtcctccacactggagtgcagtggtgtgatcttggctcactgcaacctccacctcttgggcttaagccatcctctggcctcagcctcctgagtagctgcggctacaagtgcacaccaccatgcccagttaatttttgtattttttttttagagatggggtttcgctatgttgcccaggctggtctcaaactcttgaactaaagtgatcctcccaccttggcttcacaaagtgctgggattacaggcgtgagtcactgtgcctggccaaggtgtatttttttttttttttttttttttgagatggagtctcattctgttgcccaggctggagtgcagtggtgcgatttcagctcgctgcatcctctgctgcccaggttcaagcaattctcctgcctcagcctcccaagtagctgggattataagcacatgacaccgcactcggctaatttttttagttttagtagagacagggttttaccatgttggccaggctggtcttgaactcctgacctcgtgatccacctgcctcggcctcccaaagtgctgggattacaggtgtgagccactgtgcccagccaaggtgtttctttataggaccagtacctaaggactggaagtcaggagacctttgtcactagtctgactatgccacttcaaggctcattttgttcactggtaaaatgagaacaatacacatacctctcacagctggtgggaggatccagtggtgtccaaacaccagtctgtgcatggtggcatcagaattacttggagatacttaaccacagaatccagggctccacctgggatggggctctagaatttttttttttttttttttttttttgagacggagtcttgctctgtcacccaggctggagtgcagtggcgcgatcttgactcactggaagctccgcctcccgggttcacgctattctcctgcctcagcctcctgagtagctgggactataggcacccaccaccatgcccggctaattttttgtatttttagtggagacggaggtcacaggtttcaccgtgttagccaggatggtctcgatctcctgacctcgtgatccgcccgccttggactcccaaagtgctgggattacaggcgcgagccaccgcacccagcctagaatcagtatttttgaaaagtaccttaggagagtccaacgcgcacccaggtccaggagcacgtatggtcacgtatgcaaagcataggcattcaaatagcagctggagctgggcacggtggctcacgactataatcccaacacttttgggaggctgagacaggcggatttcttgaggccaggagtttgagaccagcccggccaacacagtgaaaacctgcctctactaaaaccacaaaattagctggaagtggtggcgcatgcctgtaatcccagctactccgggggctgaggcaggagaatcacttgaatccgggaggctgaggttgcagtgagccgagatcgcaccaatgcactccagccttagcaacagagcaagactctgtctcaaaaaaacaaaacaaaaacccaatagcagctgggactctcctgccctgggcccagtttcctcatttgtgaaaggggaatagatattcattgtactgacaaagaaaggaaggaagaggggaggggagagagagaaactatcttgaattttactaataggagaatggctgaacaattttttcctatcaattgtcgaacaaagccagacactagttaaagtggtaaggacgaccgggcacggtggctcatgcctgtaatcccagcactttgggaggccgaggagggcagatcatgaggtcaggagtttgagactggcctgaccaacatggtgaaactctgtctctactaaaaatacaaaaattaaccgggcatggtggcgcgtgcctgtaatcccagctaccaggaggctgaggcaggagaactgcttgaacttgggaaacggaggttgcagtgagctgaaattatgccactgcactccagcctgggtgataaagcgagaatccgtctcaaaaaaaaaaagtggtaaggacagattttaatcagtaatgattattgcaacagggaagagagttcagtatgaactgaactcagctttaatttgtatagaggtattttaaagggaggttgaccagcctgggcaatatggtaaaaccccatctctacaaatgaataaataaattcgccgggcatggtggtgaggttgaggtgggaggattgcacgagcctgggaggtcaaggctgcagtgagctgtgattgcaccaccgcactctagcattggcaacagagaccctgtctcaaaaaaataaataaaaaaaataaaggaagattgagggaggaaggggtgggcaagtgattagtagagtcagggaagtgaaatattacaaaaggttaagtcagtgtaaatgcagtgaggctagctgtgtctgccagttggcaatgatcaaagttagaatttttgcctcccacagagcctgggagacagaggtcacatcctcggttgttgcctggaataaacggtaaacatttaccagcagccttgagttttctcaggcaggcaccttagcgggggctggctagagtcattttagagatgttagcagctgttagaaactgttagtgtttgtttaagtctttttttcttttctttttttttttttttgagattaagtttcactcttgtcgcccagactggagtgtagtggcacgatctcggctcactgcaacctccgcctcccaggttcaagcgattctcctgcctcaggcttccaagtagctgggattacaagcgcctgccaccacgcccggctaagttttgtatttttagtagacacagggtttcaccatgttggccaggctggtcttgaactcccgcctcagcctcccaaaatgctgggattacaggtgtgagccacggcgcctggactgtcttttttttctttttagagatgagtctcgctctgtcgctcaggctgaagtgcagtggtgcaatcaaaactcactgcagtctcaaactcctgggctcaggccatcctcccaccttggcctcttgagtagctaggacaacaggtgtgctccaccatgcccagctaattaaaaaaaaatttcaagccgggcgcagtggctcatgcctgtaatcccagcatcttggaaggctcaggcgggtggatcacctgaggtcaggagttcaaggctggccaacatggtgaaaccctgtctctactaaaaatacaaaaaattagccaggcgtggtggcacacacctgtaattccagctacttgggaagctgaggcaggagaattgcttgaacccaggaggtggaagttgcagtgagccgagatcgtgacactgcactccagcctgggcaacagagtgagactctgtctcaaaacaaaaaaaattataaaaaaatttctagagaagcgggatcttgctatgttgcccaggctggcctcaactcctggactcaagggatcctctcatcttggtctcctgaagtgctaggattacaggcatgagccacagtgcctatagatcaaggttgaggcttagaagtgaagggagcccagaggaacctggctagagtttggtcaaggagagtctttgtcaccatactacagaaaattaagcagctgttaaacagaatgaggccggtctgggcatggtggctcacgcctgtaattccagcactttgggaggccgaagcgagtggatcacttgaggccagaagttcgagaccagtgtgggcaacatggtgaaaccctgtctccactaaaaatacaaaaattagctgagcatggtggcgcctgcctgtagtcccagctagttgggaggctgaggcaggagaatcgcttgaaccggggaggcagaagttgcagtgagccgagattgagccactgcactccatcctgggggacagagtgagactccctctcaacaaataaataaacaaataaaagcagtgtgttagggtgcgagaacccgggtcggggacgcgggtgagccgcgcggtaatcgccctgtcctgccaccagctggaggacaggggctcctcagagcctcaggcccagagaacgggccccacgaccgggaagcgaatactccacagggcacagtctcccaatgcaaaatgggcacctggacccaatcatttctgaacttctagttttttctccctatggctatgaaaagggtcattttttttcataggactttaaaagaaggcttaagaaaagcacgcaggcctggccgggtagctcacgccagtaatcccagtgctttgggacgtcaaggcaggcgggtcgcttgagagtagagtttcgagacctgggcaagatggtgagactccgtctttatgaaatattttaagaaaatcacgtacacctgtggtccccgctacaagggaggctgaggcggaaggattgcttgagcccaagaggttgaggctacagtaagccgtgatccagccactgcactccatccccggcaacacaacgagaccatgcgtcaggaaaaaaaaaaaaaaaccaagaaaataaaaaagaaaccacctaaaggcgtcctccgcgcgcccgcccctccgccatctttgcgtccgccccgtcctgcgccgccacttccttcccagccagaagtttcgcgccaaattgttccgcacacaaaatggagcccggaaggaggcgaggtcatgcactttgcagccaatcatcttcggcagacagtccgggcggcggggctggagggctcagaacggtccaatcgctggccgcgaggctccggcgaaccaatgggagcgcagcggctgcggcgtccgaacaccgcctcttgtttttcccgcgaaactcggcggctgagcgtggaggttcttgtctcccctggtttgtgaagtgcggaaaaccagaggtgaggctagtgggagtgggactgggactgggagccagcaggcatctggatttccgggtgtagttggagtgggacaggagtttctcgggaactggggttggagtccgggagcgcggccgggggtccccctgctccggactcagggcagggacccaggcgtcggaggggaggaggtgccaggcgctgcccccagcctgttctggccgtttgttcccaccccaggcgcagtcatgtcgggattcgacgatcctggcattttctacagcgacagcttcgggggcgacgcccaggccgacgaggggcaggcccgcaaatcgcagctgcagaggcgcttcaaggagttcctgcggcagtaccgagtgggcaccgaccgcacgggcttcaccttcaaatacaggtgcggctcctgcggggccgggggctcgagttccagtgtggccgctcacacgcctctaccagcctgctagagtcctggacagtcagggcacagatgggcccagacgggggaaagagccggtcctgggtcacagggctcatcccggcagcctcacgccttggtataaggctttgtgtattttgttttactttattttattttattttattattaacgtatttgtttattattttgagacggagtctcgctctgtcgccaggctggagtgcagtggcacgatctcggctcactgcaacctccgcttcccgggttcaagcgattcttgtgcctcagcctcccgagtaggtgggactacccccgccatcaccacgcccggataattttttgtaattttagtagagatggggtttcgccatgttcgccaggctgctctcgaactcctgacctcaagtgatccacccgcctcagtctcccaaagtgctgggattacaggcgtgagccaccgtgcccggcctgctttgtgtattttatctgtacctggagttaacttctgggtgagtcacctgttgagtgggccaccagcaaccagctagcgccacttggaccgtttagttctttatccagatcttgttcctgttcatctgcttcctatcatccttccatgtcatgtctgagaccttacaaactcaagttccctgtaggtgtaaaaggtgaagatggcagttaggattcacttcacttcgctcattcatttatttataccagtcttgcaccttcattgattgagcacctgctgcctgccagatactgttctgggtgctgggctgcagcactgaagctggacctggctcctgcttctaggtgattgtacgacctgtgacatcatgagaattctcataggcccggcctctatccctgaaatgttaaaatgcagagaacatgaggttgcaggttcagcactggcccattattagctgagtgacttccaggtgtcagtgtctctgggcctcaccaggccagaaatgggtaaagccattcctgctttcacttactcatgcagcagctgatattgcccacctgtgtgccaggcactgcgctacaaagatgaaaagacgtgcttcttgtcctagagaagctcctaagtcagaggagtgagtcgtgaagaccaacagataacttccacggtggtcatttcctccacagaggaaggtgaaaggacttagggaagttttccggggggctgaagtttgaggggacctttgagctaaggtcagagttgcaggtgtagaaagctttctgtctaggtaggagcaattgcttgtgtagaggtgtggggtgtcctcacagcaagtggctttcagtagcagtctggccattttactggctcctggacataagggagacggggctcaggcctgtgatactgcgaggctggggaacagcctgtgcgttggtcagtggtccccaaatatgttcttgccacagcagtcacatgggatgctctgctaagcatctgggctggacgcagtggctcatgcttgtaattccgacgctttgggaggctgatgccaatggatcatttgaccccaggagttcaagacctggctgggcaacatagtgaaacccaggctctatttaaaaaaaaacagtctgactagaggttgataaggcagatgtgttttctgctgccttggtgcctccagtttttttgttgttttgttttttgtttttttttttttgagatggagtctcgctctgtcacccaggtttgagtacagtggcgtgatcttggctcactgcaactgctgcctgccgggttcaagtgattctcctgcctcagtcccccaagtagctaggattacaggcatccgccaccacacccggctaggtttttttttttgtatttttagtagagatggggtttctccatgttggtgaggctggtacctttttggtttttttttttgagacagagtctcagtctgtcgcccaggctggagtgccctggcgagatctctggtcactgcagcctccacctctggggttcaggcattctcatgcctcagtagctgggactacaggcgtatgctaccatgcccggctaatcttcgtatttttagtagagactgggtgttgccatgtggcccaggctggtgttgaactcctggcctcaagtaatccaccctcctcagcttcctaaagtgttgggattacaggcatgagccacctcactgggccccaagtttgagctgtgtgcattgttcttttccaagagaagttaaaggctctgcggagtccttcagtgacagaactggtttgttgttttgtgcacgctggcctgggtgttgaaacatcctttgactgtcttgtggaccccttccatggagctttctttagggcatgcctgtgccagcagtgagtagcctctgcagggttaaataatggaatgatctggaattagatgtgtgtttgggaagaggaatggtgaggtcatggtggctgtggtgtgggcagattcaggggtgcaggcacacctcagccagtgttggtttcctcttctttgcacccttcctgccccaccctgctatgtgcccactccagggatgaactcaagcggcattacaacctgggggagtactggattgaggtggagatggaggatctggccagctttgatgaggacctggccgactacttgtacaagcagccagccgagcacctgcagctggtgagtgggaccccatccctgagcttcccagggctgctctgccccagttactaatagcctgtgcccttccctttctccagctggaggaagctgccaaggaggtagctgatgaggtgacccggccccggccttctggggaggaggtgctccaggacatccaggtcatgctcaagtcggacgccagcccttccagcattcgtagcctgaaggtgggtcggagggcagtggctgctgcatggtgcagagggctttggatgcagccagacctgagtgctagctgtgtggccttgagtgaggcacttgacctttctgaacctgtctcctcctggagacaaaaggatcgtttgttgttttttgctttttgttatgaaaaattacacacccaaaagcagagagtagtataatgaatcccataaagcttcacccagatttaataattaacattttgtgttgtttcctattttgtcctttttcttttttgctaaagaattttaaagtaaattcatgcacagtggctcatgcctctaatcttagcactttgggaggccgagggaggaagattgcttgataccgggagtttgagaccctggctctccaaaaaacaaaacaaaaaaaaaaacaaaaaaaacaaagctaggtatgctggcatatgcctatagtccaggctacttggaaggctgaagtgggaggatcaaggggcctaggaatttgaggttacagtgagctctgattgtgcctctcagcactttagcctgggtgacagagcaagaccctgtctctaaaaataaaaaataaattacagacatgacactttatcccgaaaaaaaaaagttttcttacatagtctcattagcacctcaactgaaacatcaaagatctcttagtatcattgaatatacagtctagattcagattgaccaaattacctcacatgactcttacagctcgtgtgtctcagccaggaccaggcattgtactggattgttgtttaaatctcttttaatccaggacagcttcctttactctgggtgtaagttctttcacagatacattattgatttgctaaagaagcaggagccattatcctgtagaatgtgctgccttttagatttatctgaaggcctccttggggtggttacaacataccccttcccccccgtgatttttggaagctggaagttagatgcaaaggcctgactgtgtttcgatttcacataccgggcaagaacgcttatgggtggtattggatccctcattgcatccctccatccactatgctgagactgaccaggtgctaggttgaggtggtgatggtcactttattgtaatgatgcaggcatggagtcttgaattccgcctccccagcctcgcttctgcttcccacagcctcttcctgctttctttgagagccccagcaaaacttctgctcatgtctggttctctcgttcagccggaggagggcattgagaaacggagacaaggtggagagagattgtcccagtcctgtacactagtggctcaggagctttgtgaagggcaagggctggccataggaaggagtggatcggctgagaatttatgttttactttttattatggataattcaaacattagaatataaagagaatcgtataacgaatcctcttgtactcatcacccagcttaataattagcaactagaggccaatttttttttttttttttttttgagatggagtttttgctcttgttgcccaggctggagtgcagtggcacgatctcagctcactgcaacttccgcctcatgggttcaagtgattctcctgcctcagccccccaagtggttggaattacaggcacacaccaccacgcccggctaatttttagtagagatggggtttcaccatgttggccaggctggtctcgaactcctgacctcaggtgatccatagatgccaaatcttgtttcatctgtggccctggagttcttttgaaacaagtcccatacatcatataatttgatctggaactatttctccatgtatctctaaaagatgaatctctttttttttgagacggagtttgactctgtcgcccaggatggagtgcagtggcatgatctcagctcactgtaacccctgcttccccggttcaagcaattctccggcctcagcctcccgagtagctgggattacaggcatatgccatcacacctggctaatttttgtatttttagtagagacggggattcaccatgttggccaggctggtctcgaactcccgatctcaagtgatccgtccgcctcggccttccaaagtgtcggtattacaggcgtgatccactgcacccagcctttgaagagtcatttttaaaggcatagctacaataacatcacacttaaaaattaacattacggccgggcgcggtggctcatgcctgtaatcccagcattttgggaggccgaggccagtgaattgcctgaggtcaagagttcgagaccagcctggccaacatagtgaaaccccgtctctactaaaaatacaaaaagttagctggacatggtggcagttacctgtaatcccagctacttgggaggctgaggcaggagaatcgcttgaacccgggaggcggaggttgcagtaagccgagatcctgccattgcactccagccttggcgacacagcaagactctgtctcaaaaaaaaaaaaagaaaaaagaaaaaatattactgccttattgtccggtgtgggaatagtcattaagatggggaaactgaggctcaaagagaagtgacccagacagaagaccacacagcaggttttgacagaacttgaactagaatgtgggcccctgcctcccaggtttgttctgtgttgtactctacaggtccaaggatgtcgccatcagagctggggtcaggtctctctcctggcacctgccactttgtagtgaaatgtgcttagtgtatctcttgccctgccacctccccccccaattgtgctgcgaggtctttaaaagcaggagctgtgcctgaggctcctctgaaccccagggtccagatagcctggcactgggtggatgctctggaagcattttttgagcggaacagaagagctgtggccctccctgcagctctgtgcccacctcctccaggctcctgcccaggatatttactggcatatctcagatgcgtcctggctccccttaaccaacaagcttcccgatggctctattacagtcggacatgatgtcacacctggtgaagatccctggcatcatcatcgcggcctctgcggtccgtgccaaggccacccgcatctctatccagtgccgcagctgccgcaacaccctcaccaacattgccatgcgccctggcctcgagggctatgccctgcccaggaagtgcaacacgtgagtctgtggcccagagggactgtgggaggtgacctgagtgaagatcagaaaggatgagaacaagtagcaagcactgcctgcagctgcttctagagatccactgggatgggctgggcaggggtgtgcccttaggattggcacagatctgatgccctgtggctctgagacaccatgaacagggtccctctacattggtgacttctgtctcaccaggatacccagacagcgttgtagggaacccagggttgggagggaaaagcagtccagggtaatgagtctacttggaatcttctgaagcaaactatggtttgctcactaggccagatctagcctgctgaccctatggcccaggaacacgttcgttcatttaagtattgcccacagctggtttcgcactacaaaggcagggtatgtggcctcttggctggcagaacctggaatgcacatcctccggccctttctagaaaatgtttgctgcccccagtctgaaggaaccccaccctcttcactggctgctctttcttggctccttcgctggtgcctcctcagcttcccatccacctgtggcacagctgcctcattccatgctgttgacatctctcacttggagaggcacgctacctcctccctgatcccccgcgtccaccctccaccccctcagtctgttttccacccagcagccaggtgtcccttgacactcaggtggtccagtcatttacttcttagtcaagtcctgcacagcccaccacgatctgctcctggcttccccaggcctcgctgcccctcctctctccaggcccggcctcactgcctccttcctgtttctggaatacactgactacccccagtctcactgcctttgaccttgctgtttcctctactgggagtgctgttcctcaagctaccatagtctgtgtcctcacttcttcaggcttctcttcacatgtccccttaccaggggcatcttgcccaacccttcatcttcagtttggtgtgcatgtacctcgtctctcccacacctgcctacttttttacttttcttcacagcatgtagctgtcactctttaatatgattgtttgcttgtatgtcttttcagcctcccttgataggaacttaggctccacaagagcagggacctttttgttcagtgctgtgccccctgcacctggaatagtgtcagacacatagtaggttttgctatgatgtttacttctttatgttgctataatatctattgaataatgacataattacctagggatacgtagaggcttagaccctcagaatggtctagaactgcctagaatcccactggaaaagatcttgggatttgagtggggctttagtaagagaattgatgaactagctcttcacccatgaggacaccatgatcctgcaagaagaccgagtgtgacctgtctgcctcctctcagcaagttaatggaaggacccagcctcaagcagttcccttgactcttaatccagtgctaggtccgtcagtgttgccttcctttcttacctccaggcagcgttgcctgcctggcttatctccagcttattctggagacccccataaattgccgctggcaacgtctccttgctggctcctgggatgaatgagccctgcctttggattctccaggtagctttggtgactcttttcccttaccttgtacagagatcaggctgggcgccccaaatgcccattggacccgtacttcatcatgcccgacaaatgcaaatgcgtggacttccagaccctgaagctgcaggagctgcctgatgcagtcccccacggggagatgcccagacacatgcagctctactgcgacaggtgaggcagacgggctgggaggtgggcatctacgacggtggatgtcccagctgtggccctaacccgagtgttgggagtgggtcatctggagcagggtgagtagggtggagaaggtggccagttgcagagcacctgctctgtgcctaatgcttccataagttcctctcatctcgtctttccataatctgcaggggcatgtcagccccattttgcagatgaggaaatgtaacttggagagattaaatgacttcctgtgtggaggagagccgggctttcagcctatgtgcattgctttccaaagtctgtgttcttcttaggataagaggcccaggatgcacagctagataaccaatagctggcaaagcctcttcccagcctgacaccccacctcctaccccaggctttcttttttttttgagacggagtctggctctgtagcccaggctggagtgcagtggcgcgatctcggctcactgcaagctccacctcctgggttaatgccattctccggcctcagcctcccgagtagctgggactacaggcgccctccaccatgcccagctaattttttgtattttttagtagagatgaggtttcaccttgttagccaggatggtctcgatctcctgacctcatgatccgcccgccttggcctcccagagtgcggggattacaggcgtgagctactgcgcccagcgtaccccaggctttctgttaagatcctgctgaacagccacggtggctcatgcctgtaatcccagcacttggagcggctgagacaggaggattgcttgaggccaggagttcaagaccagcctgggcaacatactgagaccctgtatctaaaaaaaaaaaatttattagctgggtgttggggcagacacctataatcccagctacttgggaggctgaggtgggagaatcacttgaccccagaaggttgaggttgcagtgagctgtgattacaccactccactctagcctgggtgacagagcgagaccctgtctcaaaaaggaaaacaaaaaagattctactgagggggagagggtactgagcttgggcccctcatagtaacctgggtggaaggttttgagatctttgattagggttctaacctgggcttgcatatcctgaaattgcatgcagatgttctgaggagagcggatctgtagcttctgttaacttcattagtggcaacagagtatgtaggggtcaggctcttgctccctgggcaagttatgtgactttgtcaagcttcagtttcctcatcagtaaaatggggataaggacagtccttaatctctcagagggctgcttgaaaatgcatgtggtgtttagcacaattccttcatgcagattacgtaatcaggatgtatgattttccaagcagttcatgaatcctgaaaacttacgaagtgggtatgggaagaggggagttggaggctcatggagtgacggtgatggtcttttctggagctgtgatgcctgatggtataaagcacttctatgtctgctgcctcacctgactccacaacatgagaggcaggccacttcgtcatccccctaggctcagaggtgcaatgacttcgttgaggtcacacagcgactaagtgtccctccacaccaccctgtctctgactgggggacttggagacttccctgtttcaacatctcattttgaaaacaggaaatgaaaacccagaggcaaaatgagctcacagagccatgaagaggcaaaaagggcgagtggcccctcaaggaggctggggggcgtgaagaggaagtcttgccctgagaggctaaagggcaccacacagcgagctgacagcagacacgtggagatggggcttttggagggctctgtgggctggcactaagcctcctaaaccagcgtacaaatgagttagcgagttcagcgagagtcaggccaccacctgcctttctgtttggctgtcactgtgggcaacaccatcctccaagcagctgagcatgggctgagtgacgtggggagagaggccgttctctgggctccgtggggctggagccagctcagcatgtggtgcctgtggcaaaaatgctgcagtggaccctgcgtgtcctgggcatgggtggaatcagagacttgctgtccaagtcagaatctcagcttttctcctttctcctctaccctcctctcaggtacctgtgtgacaaggtcgtccctgggaacagggttaccatcatgggcatctactccatcaagaagtttggcctgactaccagcaggggccgtgacagggtgggcgtgggcatccgaagctcctacatccgtgtcctgggcatccaggtggacacagatggctctggtgagttggctttggggtcctggcttagccctgctaaaaggctgtgcttgcatacttctggtaacaggcagctcgttacttcatgaggtagcccaggatgtccttgtgttgctcatatcattagaacgttcatttttatattaagtgatccctggaacttccacacattggtcctagctgtggctcctgggctgagggtgtttgcctaagtgcaggattaaggcagaaggactgaggtcaaatcactggggaattactgaaagccaagtcttcacttctgtgacaggaaatacaagagaagtgaaacgcagggttccaggcaggcagccgcctagtgtctagttggagaaataagaaaactgtgagaccgctggggacatgtgggtaaagtggtggctgttgtgggtcacgcagttccaaggaggtgctaaaggaggtctgagaaggaggaggtcggggctgggccttggggaaggttttctgggaggaggttaatctgagctgggctttgaagagtggtggatgtggaagaacttccaggcgggaggggatggcaggagcaggtgaagaccccggcctgggcaaggtactgagtggctggagggccgagtgggagtctaggggatgaggggccaggtggtgtaagaggccttgagtgccgagatggggagctcctgcttacacctgagggcagcaggggccactgagggttttcaggtttgtttcagccctctggctgcagtgaattgattcagaggggtggcttccccagggctcagtccatggcccaccccacatttacacaaactacctagattattacaactttaaaaccactgacaggtaagtagctctcacatttccatttctagcctgggcttctccccacgttccagactttaataaccaactgctgatttgacatgttcacttacatatctgaaaggcatctcgaactttacatggctgaagctaagctcccctttccccaccctcagactggctcctctcagtcttcccatcttcaccctttcagttgctcagacaaaaacccccaagtcacccttggtgctcttttctctcatcccccacatctaatcactcaggaactctggccagctccacctttaaaacgtgtccaggatctgaccacttctcatcctccccacctgctctgagcccttgtcagccctccctggatcaccgttgatcctccccagtgttcgtctccaccttgccctaccttctctgttctgcagcagccagtgagcgatgctgtcatgaccaagacactatatcactcctcggctgaaaggggagaccttccagtggtttccaaggtcctatgccatctggccctctgtttgctcagaacccttctccccacttcccctcaccctttggaccctggaacacaccaggcccattcctgagggcttgagagctgggatctctgtttactcagataggttgtgctgtcctggccctaagggccctaagggctctgccttctgggaggtccctgagctggtgccaggatgggcagtgggctggaagagctcccttgtactcactcatgcgcctgctttgcctaccaaggccgcagctttgctggggccgtgagcccccaggaggaggaggagttccgtcgcctggctgccctcccaaatgtctatgaggtcatctccaagagcatcgccccctccatctttgggggcacagacatgaagaaggccattgcctgcctgctctttgggggctcccgaaagaggtaggggcttgagttcccttgggtttggggaggcggctgatgatggggctcacagtaggataattactggataatcaggactgggcactcttttttgtatttcctgggcccctcagtctgccaggcacctttgccagcccccaagcttgccatcagctggctagtggctgatctgcgcacctgtctcagcgatgccctgaccctggcaagggggagactgggggcctggcaagtgcagtgggagagcactgagcttagggtcgtgtaggtaccaggacttaaatctcagcactgagcttggggtcagtagcagggatattattagcagctgccatttactgtgttcttcctatgcacagccattctttgttttttttttttgagacagtctcactctgttgcccaggctggagtgcagtggtgtgatctcggctcactgcaagctccgcctcttgggttcacaccattctcctgcctcagcctcccgagtagctgggactacaggcgcctgccaccatgcccagctaattttttttgtatttttagtagagacagggtttcaccgtgttagccaggatggtctcgatctcctgacctcgtgatccgcccgcctcggcctcccaaagtgctgggattacaggcgtgagccaccgcacccggccgcacaggcattcttctaagtgctttatgtgtctgaagcccagtcattcctcacagtaacctgttaacgcagctgttgtgcccattttatagatgagggaattgaggcatagagagttaaagggacttgctccccagcacatgcaggggagccaggagcctgctgtcatggtgcttgttctgccgcaccgtgcacagcccacaggcagctctctgtccttttctttcaagctgggaggaacgttgctcagatgctgggtgtacccgagcacagccataagagccatttcctttaaccctcctcttctgggaggcaagctctgtcctcattgctaggcaagacctaccatggtttgggaactacagagctgggtaggaacatgggtctcaggccacagccactaccttcttaccaactctgaggcccatgatagttgggggagtcaactgccagcccaccaatctggtgactggatgtcacatgcgatgccctcatggattctcaccttgtccatctacccttcgtcccccaggctccctgatggacttactcgccgaggagacatcaacctgctgatgctaggggaccctgggacagccaagtcccagcttctgaagtttgtggagaagtgttctcccattggggtgagtggcctgggatacctttgccaccttggcttgcagggaggaaggctgcagggcagggcctctgggtccccaggacacctgtggtgggctggctcacccggaatctcttcctcctttctcttggctgcggtcaggatggccgaggagatgggaggaagaagggagccaacaggtgtatgtaggtttggggcagggggcgagtacactgtactgagagtcaggatggggtttgggtctcaccctggccagaaattggctgtgggctttgagtaagtcacccaatctccctgagcgtcagtttatccatttgctaaataatgatattgttatcattaatagctaaaatctggctgggcatggtggttcatccctgtaataccagcgctttgggaggccgaggtgggcggattgcttgagctcaggagtttgagaccagcctggacaacatggtgaaaccctgtctttaccaaaaatacaaaataactagccaggcgtgatatgcacctgtggtcccagctgcttgggaggctgaggtgggaggatcacttaagcccagaacggggaggttgcagtgagccaagattgtgccactgcactccagcctgggtgacagagtgagaccatgtttcaaataataataataaataataataataataataatagctaaaatgaagggccagacactgcttgaagtactttgcatatatttacttagtcttcacctcaactgtgtggcaggtactattacccctgtgttaggggtgagaaaactcaggtacagaatgggtaagtgtcttggcccaggtctcactgctggtaagcattagagcaggatgtgattgaacccaagtgtctgatgagctgggtcctctgctgcgttgttgaatgggtctgcggggatcagagccagagaaggtctgacatgatccgagtggcggggttgtatagggcgagatggtggtctttggatagataggaagtgtgccaaatttgccacactggcactgtccagtagaaatagtgaactgcacatgcgacccatgtatgtcttctcagattgtctaacagccacattaaaaagtagctgggtgcggttgtgtgcatacctgtagtcccagctacttgggaggctgaggtgggaggatcacttgagcccaggagtttgagaccagcttgggcaacatagcaagaccccgtttcaatttaaaaggaagaaggggaaagaaaaaaggaaaaacaggtgaagttacttctgtttaactcgctatatctaaaatctcatttcaacatgttgtttgatatgtagattattgagatactttacattcttaggagctctgagtctttgaaatcgtgcgtattttgcacgattaaggacatctcagttaggactttcccaatttcaggggctctatggcagtatgtggcgtgtaggtctatatagagacgacaagggactcacgatgggggcaggctttccctgggagtcaggagtcctcatcctagccctgaggctaactcctcttctctgggcctcagtttgctcatctgtgagttgggcctcacaagactgtgtcacagggctgtggtgaggcttaggtgagccatggatgtgatgccctcagcggggagaacatctgggcacaccgaggcccagggcagcatccccttccagagggagacgcactgagttggagccttgagtcctattctgtaccctgcagccagctttgatgtgtgaccttgggcaaatcacaacctcagtgggtctttttgtcttatgggggtcaaagcatggagttgttattgggccctgacaccaccccactgccccaggtatacacgtctgggaaaggcagcagcgcagctggactgacagcctcggtgatgagggacccttcgtcccggaatttcatcatggagggcggagccatggtcctggccgatggtggggtcgtctgtattgacgagtttgacaaggtgagtctgatgaggtgggtagtagccaaaaggtgggtggcaccagggtatgtgacttcctgtgctcagccagcagaaatcacctctgacttgggagacatgttttcaatccctgggccggtcactctagtaactgtgggaagctgcttaacctcttcaagcctcagttcccatatctgaagagtggggagaagaaaggcaagcccacacagttgttcccatgattagaggtgacctggttgctgccattggccttgcgtggagctggtattcaggagtgagggctgctgttagttttcctgtttctactgctccctgctccctcacttcagtaggtctgatgatatttctctcttccccacttagatgcgagaagatgaccgtgtggcaatccacgaagccatggagcagcagaccatctctatcgccaaggtgagtggccctccatggagagcccagcctgcagcagcccagcgtggcccaaccgtcctcaggctgccctgattgggaccaagttctctttgcccaggcctagaatctgtgtgtgtgtgtgtgtgtgtgtgtgtgtgtgtgtgtgtgtgtgtgtgtgtgtgtgttgtaaacgtgtatataagaaggcatctttgccatctcctcccccttttcgtcgtctgtcgcctgttaggctgggatcaccaccaccctgaactcccgctgctccgtcctggctgctgccaactcagtgttcggccgctgggatgagacgaagggggaggacaacattgacttcatgcccaccatcttgtcgcgcttcgacatgatcttcatcgtcaaggatgagcacaatgaggagagggatgtggtacgtccaggggcagggctggtggccatgggacctgcctccaggcaggcttgtgattgtgtgggaaggagaatggagaacaagggccttggctggcaaagtcctgactgtcaggctgtgaaattggggagcacgtgagagggcggttgttgtggactgcagaggattgaagcagggtctggagtcctgtggcctgctctgcctctgccgtgagtgataagctgtgtgatttgggctaaatcagtttctccctgggcctcagtcccttatatatgaaacagaggagttgacattgggttatgagtaatagaacctcagttctggttagtaaatttttcaaagaaaaaaacatagtggtttatagaattggtaagtccggcggcttaaggcccaggtagatctggattctcaaacaactgtctctgcctttctgttctgcttcccttggtggaatctttgtacttgggcagctgttcctcttgtggtggcaaagacaaaataagattttgtcctgttagcttgtagcttaacagcccccaggaaagaggaggccccgtcttttccagtacttctatcaaaagtcccaggatagactcctattggcttgggtagatcctatgtccatgcccaagttggggtggacaagatacatgccccaagtcggggtggacaagctgaacccacccctttatggaccagggcagaggagcaaggagcattaagttctctctaaaggagaatccagatgctcccatcagaacgagggcctggtgctgagcaaacaggctgagcacgcctgagatctcagcaccctttccggctccttgatgccagggccccatcagctctttctggctgttccacctcagtgctgggactcaggcttgggacggcctgtgggatgacccattatcccctctgctctccagatgctggccaagcatgtcatcactctgcacgtgagcgcactgacacagacacaggctgtggagggcgagattgacctggccaagctgaagaagtttattgcctactgccgagtgtgagtcctggacgcaggcccacgggggtgaggttgcccagcttccctgggtgggagagaacccagtcccctggtcctgctcctcctcatgaagaacagcccagatgttgctgttctgaggttctcagctctactgaatctgctctgctcccttctaaccttgcgtagctcactggctcttggcttcagttttcccacctccacaccaaggaggtgggatttagatggtcttgaagacctcctcgagtctgacatgcagggaggcagtgaagtgtagacatggtagacatgggctctgggtcatacctgccttcactctatgactttgggcaagttggttggcctctctgagccttgatttccccaggcctatcgatgtttgctaggatttttgtaaggattgcacaagatgatgagtaagtgcttggcatagccctgccctgggtaaatactcagtgagtcgcagctgcaatttgattgttctcacagattttcaataataataattatatacatagtactggctggttgcagtggctcacgctgtaatcccagcactttgggaggcggaggcaggtggatcacttgaggtcaggagtgcgagaccagcctggccaacgtggcgaaaccccatgtctactaaaaatacaaaaattagccgggtgtggtggtgcacacctatagtcccagctactcaggaggctgaggcaggagaattgcttgaacccaggaggcagagattgcagtgagctgagatcgtgccattgcacttcagcctgggcaacagagtgagactctgtctcaaaaaaaaaaaatatatatatatgtgtacacacacacacacacacacacactcactcttacacactactttctttgtgccaggcattctgaattactattcagtattttctatatgaataaattataaccctcccccaaaacctaccaggtaaggtgtgctattattcccttccctttatggatggggaagctgaggcaaaggaagttaagtaacttgcccaaggtcacatgccagaggtagtggagccaggatgtgaacccagctgcttgcctccagaggctgtgctcttaaccacagtgcttcgattcttgtcgtacagcgctttggtgatcttttgaaggagctaaaacccaggggttgagggctctttgaatgcactaccagtggggggctggtgggtccctgattcagcacctctgccagggtgagtgggtagtccctgggtcttcatccaagtctgagctctgtgtggcccagtcttgagaggcttgggcccacagctgtgagtcagggagccctggattctaatcttccctctgcactaagtccccaggtagccttggggagttccctccctccctctgggtctcagtctccacatccttaggatggttgagctaaggctttccctacatcagtgactgtcagttggcctgggggctagaggggaggggatgggatagggtagatgctgatcagacttccccacacctaccgtcccaggagagtctgaggtgctcccagcccctggactgcagtcaccgccaagcctcctgtgggtgtcatcagcttgtcgtgtcttcagatgtgttgggtggaggagtttgagactgctgcaaagcccaccacccagtgggcctccatgccgctgtgattgtgccattgttcattacatgtatgggggaccttgtggcaagacaccacacagcgtctaacagtggggaagaggcggttttcaccctgcagacgtgcctggcttttcttcacctgttttttaagagaggcacccatatttctccccagtgttgatgtttgtggcagctgcccacagccagatttcacttaaatcttttccgattgttgtcccccagcccatatgagtgggcagctgtggtgtggtgggaaagtgcatgtctgtaagctggcagggggctgggggaaagggtaggtgccctaagagtccctcctggcctcacaccagcctctccccactgtcctgcaggaagtgtggcccccggctgtcagcagaggctgcagagaaactgaagaaccgctacatcatcatgcggagcggggcccgtcagcacgagagggacagtgaccgccgctccagcatccccatcactgtgcggtgagcaggcgggcagggctgggccatggcagatggggcttgctttacacagcagggtgtgcttggcaaccaggggcagtggtccaggcttttcacttggcacaggcccatagtagctctgggcaggaagagtccctttggagcataaactatggcctccttgatctcaatgatgatccatgtttcttgatttaaggccgggcaaacctagacccctcttgtctgaatttggcctggcttctcccattgtaggaagcccgaagggagggaaggacccaggcctgggagtcaagagtcttgggtcccagcctctagcccactgtgtgactgtagggaaattacattccttctctggccctcagtgcttttagctcctaactctgttcattcttgtgactttgtagacaatacagtgggtaagagttgggatttacctggtttgaatcctgtctccagcactgactggttggaaatggatttggctataagtaatggtaaatccagataaagtagcttaaagaaataggaagttcatttctcttttctgtagcactgtctggaggaagatggtatggggactggtgtgaggactcctcaagctcccccttactcttagtccgagatggccgctagaacttcagccatcacctccaggcagcaggacaggaaggaaagagagcttcccttttaaaggacacttcatgaagtcccacacaatgcttggacttacaacttactgccatagattggtcacacaaatacaacctggtacaaaagatgtctgggatgtgttttagtggatcgctgtgtgccagactaaaaactggggttccaagctaggtgcagtggcctacattgtgatcctagcactttgggaggctgaggcaggaggattacttgaggccaggagtttgagaccagcctgggcaacatagcaagactcccatttctacaaaaaataaaaaattagccaggcattgtggtgcatgcctgtagacccagctcctcaggtggctgaggtggaaggatcactggagcccaggagttcgaggctgcagtgagctatgatcatgccactacattccagcctggtccacagagcgagactttgtctcaaaaaaaaaaaaaaaaaaaaaaaattgcagttctatgactaagatcaaaagggagatggattatggggacacctagcagtctccaccacagtcttaccactttgggcaagcacctccctggtaacgggctggctggggaggaagggaatagcggaccgaggctaccctgagcacgctgttgcccccacaggcagctggaggccattgtgcgcatcgcggaagccctcagcaagatgaagctgcagcccttcgccacagaggcagatgtggaggaggccctgcggctcttccaagtgtccacgttggatgctgccttgtccggtaccctgtcaggtgagcagatgcaggggccatggtctcaattgatctgggttccctggctcggagctctgtgggcagggctctggcctgctgggggcctgcagtgtgtgtcttgcttctctgagtttgctgagcttctctgagtttctttttgccataagacccctctcctcctttctccccaccgctgtttcctccaagatgggaagaagcagcttctctccagacccttgaacacaatcctcttgacccaggtcattgatgataacccttctcactggctaggaacaacagttgatgctctgcttcctagagcttgtcagcattttcagtgcttccagagttatttcttgcattttgccttacagctgccccctggaagccaggtgagcagtcagtcctgcccatgttagaaatgagacagctgacactcgaaggggcctttccctggtgcccaagatcacagtcgcttggctggaatgcaagtctcctggcccctaggccagcgttttccacaccataagccatactgtctggtttcggtcagcctttcaacagactgtcccaggcaccgatcatgagccaggctacctacgctggggaaaatctgttccttcacccagcagatacttcattagtgttactgtttgccaggcactgttctaggtgctgggagtataagagcaatcaatcacagggtcccggccctcctgggttctcattctcgttctagttggggagagatagacagtagagaaacaaatgcaggtagtgtaggtagtgaaaaaggcagtgagggagatgatggcagggccaggtgtgttggaaaaggaggacgtgctctttcccatggagtgagtgggcatggcctctgcaaggaggtgatgccaagcagggagctgcatgaaggggacagtgtggctccttgggggaagagctgctcaggtggaggcagcgctaagtgtcagtttccccaggagggagcaggtttggtgcatttgaatggggaggcacttgggtgaggaatggggtgggtggggcctgttcctcctgtcccccttggtgaagactcagcctctaccctggagacacttgctgtcacatgagacattgcaggtggaggcctctgggatgctgcaggcacagagggcaggggtgatatggagtggtgataatttgagttgggtcttatgggctatgtaggagtttgcctcacagactcccctctcaatgacttcttgaccatgagcccaccatctccttagctgaaacaccaaggcctctgtggcagtaattggaagtcacgagcctcctggttgccgagggctcctcagggcacctcgtagatgtgtccagggcaggctggcttccctcctgggtcactgatgggccccttccaactctctctctaatctatctgctccagcaacaaaaggagtcctgctgtggcctccaagggcccgcaggacttggtccctagtgacactctggccatgtctctgctgcgctgggccccgggctgctttttgaatgagacaggtgtgttcctgcctctgtgactttgtgcttggcctggagtgtccccacatgtgccatatcctgtctcctcaatcaggcctgcaccaccctggcacactcggtgcccttttctgacttactcttcggggcctggctcaggctgttcttccttgggctagaggctgtctctgtccaagaactcccattgtcccagctccccggctgcctcacttctccatgcccacaggggtggagggcttcaccagccaggaggaccaggagatgctgagccgcatcgagaagcagctcaagcgccgctttgccattggctcccaggtgtctgagcacagcatcatcaaggacttcaccaagcaggtgagcctgccttggagtgggggtgtgagccggcacggggtgcaggtcttctgctggttcccacccactcagcactggcatcttactcagcagacaggccctgaacgggggtaggatggacaactgtccctttctcagaccttttctagccatcattccttccctagggacatcttcatcaggagcagggatgggggtattttttctgtcccacgaaggggaggggagagcagaggtggttggattctggtgaaaccccatacaagttccccgcagcccttcccgtctgtgcctttccccgttggcgggcgtttcatggagtgggaaggggcagagccatgagagtgagctttctggctcactgaggagggtactgttggccccatagagagaagatgggatttcccagatgctctggaaaacctgtcacctttaaaatctcaggattaatcctagtttctggtctccgctccttgtacatcatctcattttgattcagggcagtttaatgggtggtatcgtgtctattctataggtgcgcagactgaggcttagagaaaggtttagagcttcggttctagagtcagatgggacttaagtcccagctctacctcttaattgctgtgaccttgagcaagtggcttagcctccgtgtgcctcagtgtctggtacacagtgggcactcaggaagtgtgggccctttaggtcaaaggagcctgagtacaaagttccccgtgagcctggggatgtctgggctctgtcggagtcccctcgggcagcacgtgccgttagccagccatgtgctcccacagaaatacccggagcacgccatccacaaggtgctgcagctcatgctgcggcgcggcgagatccagcatcgcatgcagcgcaaggttctctaccgcctcaagtgagtcgcgccgcctcactggactcatggactcgcccacgcctcgcccctcctgccgctgcctgccattgacaatgttgctgggacctctgcctccccactgcagccctcgaacttcccaggcaccctcctttctgccccagaggaaggagctgtagtgtcctgctgcctctgggcgcccgcctctagcgcggttctgggaagtgtgcttttggcatccgttaataataaagccacggtgtgttcaggtatctgtgggtttgtgcactcggtgacctgtcacctccatcgtgccctcatggcagggtaagtgtgagggaacagggtctggaggcagactggccagggtttctgacttggatctgccactcagacttctgggtaagtcacgtgacttgagtgctccggtttcttcatctgtttagcggggctcataaagccactcccttgatgctgggaatccagtgagaccagggagtggggaagcgcttctcaaagtgtgtgattttgatccgcctcacctgttccccagtaacttattggggggctgcgagccgtggtgcggcggtcagactgcctggattcatggaccctctccatgccttagtttccttatctgtaagcaggctgatactagaacctgcttcacagggttgtgcttagggtcagtgagcagctgttagtgaggggaatgtagtggccaccaggcaggaactaggactccagccagttctttcctggtgggccacgtgtaactgtgtggccttgggcgagacatttcacttttctgtgcctgagtttatcagtaaactggagatggggggattcctcaccctgagttgtgaggattgaatgacagaaggcactagtgacagtgatgctggaggaaggagtgttgccaagtgcctcggtcactttgcctaatttcagaaagtcactctgagttggtatgttttgtgtttttaaaaaagctaggattcataaaattaaatagaaatcagtgaaataaaatatttgatatttaaaatacatttagaaatacaaagtgtcaagcaaaacgtgaatttggaaatctatggaacattagataaggtatttaaaagtaattgccatgtaaaaatgacacgaacttgaagtaagattatttgatttttctaaaaatacaagaaagcttggtgcatccgcctggtcattgttgaatcacaaatgtatttttgtgcagaagattcctgcagctcaaagccctttctgattccatactgttcggggaaatggagagatgagaggagctaaatcagctttcctctgactcactcccgttcaaagctcatttcttttctgataattttgagagtgtctggaacagcttttgttttcttggtggggtggcaaccttactgggcgcgctgtgggttttgcatccaaggctgcatctccggttcctgctagcctttcatcttgctcaggtggggactcgcgtgcatctcaggcccaaggtcctcccgtcctgcttgttcatggagtgtggaactctcatgaggttcaccctgcagtggcaactttgctggtggccttttctccacccctgtggtgggtggtgctgctgtggtcacctctgttttacaggtggagaaactgaggctcagagagtcaagtgtcacagtgagggagtgcagggcaggcttcaaacctggtggctccgaactccacccatgtcaccttttctgccagattctctcttggcagtccctgacctcggcctgagtgggatgctgggcagagacagtcctggcctgggggaggcaggtgccagtcaggtgggggagactgaccctggggtaggttcccaggggtaggtggcctgactggcaggcacaggactgagaggccaaagggggtccgactggcttttccgtggtagttggggtagggctcataggaggagcagctgtgctcagagcatgccagtctccttccagatcggggcagcagcatgaagagaggcccctgagccagggaaacacctgcttgttggggaaagcaaaggctgaggagagagcctgaagggaggccaggagaggggagcattcaggctgagtaatagttggggctcggcttagtggaatctccagtcaggcctcagtgacacctagagaggcagggaggtggggcaagggggggagctggattcccgagctggtgctgccactcagggtggctgagctcttcactcacctgtgacctggctcccttaggcttgtcttctcagatctgtccctaccctcaccagctacaggccgcgacccagcggacatttctctctgctgagcaaatcacttcacccctcagcctcctttcatctgtagaaagggcacagcagtacagtagccctttcacccaggggtggctgtgaggattaactgagggggtagacatcagagcagctgggcctggccccggggaggtgctcccaggaagggctgggtgcctgtggttttccctgcctcacagcctctgccgtctcggatttcaccttttcatgcttttgtgtgagcagaggccgagcctctgctgctgtgttccctgccccactctactcctggctgcatgggtctctcaacttcgctcaccactatgagagccgctccaccccttctccagttccaggtctgggaaggagagagcagacaagcttgctcatgatggagtccttttacctggtttctctctctgttcacagataccacctctgttgatctgggaactaagaccatgttgcttgtccttagtcacatatgacttaatttgcacccattgtgggccactggtgtcagacaggaagcctaagcgcaggtatcactgaggaggatacacatgctaactacacgatcttcaccagacctgtgagcttccagccaccagatccaaagtcacagagcacagggacttacaaacccagtgctggaaaacatagcaaaggctatatccaatttaggtttctctttattggaaataaagatggcccatacttcaaatatgttatttagagaatgcttataaagagcagcctaaagtcccattctcttgcctgtaagcaacaaaattacaaaaatgttgaatttctaaaatgcgaaagttaagcattccagagaccagctcatggaagaaggttttatgtttttgggtgttgtaactattatccatatgtatttaaacatgaatacgtctgtttggtatttaacacattttttttttttttggctttcaaggcctttatttttttatttttatttttttcccttttttaatttattatacttgtttttggggtacatgtgcagaacgtaaagttttgttacatgggtatacacatgccatggtggtttgctgcacccatcaacccgtcatctacattaggtatttcttctaatgttatccctccctagccccccaccccccacaaatgtttaattaggagtgtcaagtctggatgaaccaaggtagatatttattttaagacattatggtgaggccaaagagtacattaaaatggttttaatttgtttttatagatcaaaaacaagcattttttattaaaaatatgaggcagtaaagcacagtggttaagaacatggacttggggccaggtgtggtagctcattcctgtaatcccagcactttaggaggctgaggcaggagaatcacttgaggccaggagttcaagactagcctgggcaacatagtgagacccccatcgctctctctctctctttttttttttttttttgagaccaagtctcactctgttgtccaggctggagtgcattggcgcgatctcggctcactgcaacctccgcctcccaggatcaagcgattctcctgcctcagcctcctgagtagctgggattacaggtgcccaccaccacacccagctaattttttgtatttttagtagagatggggtttcaccatgttggctaggctggtttcaaactcctgaactcaagtgatctgcccaccttggcctcccaaagtggtgggattacaggtgtgagccactgcacctggcctattttattatttttttagagatgggggtggttctcactgtgttgcccatgctggtctggaactcctgggctcaatcgatcctcctgcctcggcctcccaaagttcttagattacaggtgtgagccactgcaccagccaggattaaaggagttaacagccccaaagcactcagaacaccaccaggcccagggtaaaggctttttcagtgttccatatgtaaactatctacatatgtagatagttttttacatacgtaaaaaacctactattgacgtatgtaaacctacacacattggcttgctctaacagaagggctgtgttgtaaggtagtaagctccctgtttctgcacgtggtcaggtagaggcaacccagcatctgttggcgggcttggtcttccaggtcagggagacttctccccggctcctactcagggctcaccaccacctatttcatacttactagttgttttagagacagggtttctctgtattgtctggtctggaatcctccagctctggttattcacaggcatagtcacagtgcactacagccttgaactcctgacctcaagcgatcctactgcctcgacctcccaagtagctgggactacaggcgcatgccagtattcccagttcttttctttgaccttttttttttttttttttttttttttttcttttttgaggcggaattttgctctgttcccaggctggagtgtagtatcatgatctcagctccctgcaacctccgcctcccaggttcaagcaattctcctgcctcagcctcccaagtagctgggattacaggtgcctgccaccatgcttggctaatttttgtatttttagtagagacaagatttcaccatgttggccaggctggtcttgatctcctgacctcaggtgatccacctgcctcggcctcccaaagttctgggattataggcatgagccaccgtgcccggccaaatcttttctttgaaatgctaggtcctaaggttattatctccaaattacagatgagaaattgaggctacaagactttgaggaaatgactcaatgtctcagaggcagaagtgaaggatctgggtgagccaccaagggtcgtcttcttaggagatattattgccttcaagatttcaagattgattgttccgggctctgagattctagaattctctcctgccattcctcctcacccctcctgcccttgttttttgttcttccttttttttttaagatggagtcttgctctgtcacccaggctggagtgcagtggcttgctctcttggctcactgcaacctccacctcctggttcaagcaattctcctgccccaggctcccgagtagctgggactacaggcgcgcgccactgtagctggctaatttttgtatttttagtagagatggggtttcaccatgttggctaggctggtgtcaaactcctggcctcaggtgatccgcccacctcagcctcaaaaagtgcaggcctgtgccaccgtgcccagccattttttgttcttccttagagaaccagctcagcctagtgcttctcagccagtaggcctcattctagagcaagacttctgggctccatgctcaatagctgtggaatatattaccctctccaaatctcagtttccgtgtctgtaaaatgggtcgggcttttctggtgttaacaccgaaagtcttgcatcccaggagccccttcagccctaggcacacccgttggtcaccctaaaaatggggggaataaaagcccatctggaagagttgtggtcaggttgggctgaacagcgttcactggtattgagcatggtacctttcaggggcctgcagagaatgggagagaaaattactgctccttacacagggtgacggagtccatggcctgagtgtgacacctaatgccaccacttccagctgtgtgccctgagttcagtttatcttcctgggtctctgttcccccagatgttaagaggattgataatagtgtgggctgagtatagtgagagtataggaagatacagtgaaataacaagagctttgccaggaagtgggcacctggtgcccgctgggcaggagtgcctgtagttaatcattatgtgtctcaaaaggtgtcaaaagcttctgaacacttaatgctgtgttttgggcctggagccccaaaaccagccagtggggactttttttttttttttgagatggagtctcgctctgtcgcccaggctagagtgtgcagtggtgcgacctcagctcactgcaacctccgcctgccagtttcaagcaattcttctgcctcagcctcccgagtagctgggactacaggcgcgtgccaccatgcctggctaattttgttttgttttgtatttttagtagagatggggtttcaccatgctagccagtctggtctggaactcctgacctcctgatccacctgcctcggcctcccaaagtcctgggattacaggcgtgagccactgtacccagcctttttttttttttttcagtcgtatttccatgcaggacacagaaggaccagtggggactcttaccttgtctctagctttggtctttttaaaaaaaataaccctgaataatcaggagaatttttttgatgaatgagggcactcctctccagctgtcccaggggtgcgaggagaacagtgtccatgagggggcgccagagcaccaggcccggggctgcagcctcccgcacccacccggcctggcctgcagggccagctctccaggcgctcccagggacttcccggcctcctaccctgggaatctggaaactccctggctcagactcagcagcccagacgctgcctggaggatcctctggttctgggcattcaccactggctttgtttggacaaaggctctgctgcgtgacagatcctgggggatgcctgagttatcgttatcatgctccagcggaagtgggtatcctcgtcctgggttacacaccaggaaactgaggcacagaaatgcacggagccggggtccaaacccacggatgcccaacccccgaatctttgccagcagtctctgagaatcagtctggatctcagaatgattgtaataatcttggaggcttagaaggctagactcttagaaatattcagttcaaatatacacgtgtattattttttgtatgggtagcgcatgggtgaaaagacaaaagtaaaaccagtcccccttctctctgaccgtccccagccaccctggaggtgaccacagtgatagtttctcgggtcttgtctcctcctgatataggactcatcaaatcttagaattagatgggatttctgggtgactcggtctctggaacccatcagcttctagcacgcagccctaaggttcccactgccatccctgtcaaactcaaactcatgggtgagtttgaggatcttggctcctggaaccccccagcttcaggcccagctactcctttagagttgaaggggctgttttctccagcgacccagacttcagttccctctgtgcctctcctcctccagggggccctccttccagaaacaccctgcctgcttctggtggtataatagaggacactcagcatggcaccctctcactttatgcctggtgatgggcctgatctgtcgggtcagtgcctttccccagaaggaacgtggtggcatttgttgattcatccgtttgtgtcatggagataatgaccgtacctacaataaagggcgaggtgagcattaaatgcatgaatgtatgcagagctcttagactagtgcctgttacattctctatgggtttctattattattgatacttttagttcattcagctaaatttaccaagcattcacaggtttccgggacactgggaatacagagaacaaagcatgtttcttcctgcttgggggagaaagatccagaaagaacgtcagcgccagcatgaagagccttgtgagaaagaacaagtgctctgtgatatttcaagagatgggaccccatggaggcctggtgtgtgggtaccggggtggccttgtgctttgagatgaagccagggggtctagcggggagtacaggtggcaggcaggcatcagttacataagcgcctcaccctgggagctcaagtactgtgtgacggttctgttcacggcccccacacagaacgtgctccttgtcagtagagcagagcagggaggagaagcaccagagagctgctgcgtggagtctggaagtatctcctccaacttccttggggaggaaagcaagggcccagactcttaacaccagcccatgtagtcaggtgaataattcccagtcactatctagtccctggccctggccatctgctcagccccttcggcaactccagcctggtccagcctcatctggctctgtgtgtgtgtgtgcgggggggtggtgggtgagaggctggaggagagtggagggggttggggattggggccaggcagcgctgtgtgaggctagagatgggaggtcctagagggagaccaggaaatcaggcactcaggagagctgggagggtaaaagttgctgggggcaggtgtctcgggggcagatggtggagcccaggtgaaccccctaggttgtctctgtcccatcatccttgatcctctttgttttttgagacagggtctcacaatgttgctcaggctggagtgcagtagtgcagtcatggcccattgcaccctcaaccttgtgggctcaagggatcctctcacctcagctcctggagtagctgggactacaggcatgcaccaccatgtctggcttatttcttaattttcttgtagagacagggtcttgctatattgcccaggctagcctcaagcttgagggctcaaagtgatcttcctgcctccacctcctaagtgttgagactataggtatgagccactgggcctggccccttgattccctttgcatgatagaacttcaacccttggagccccagaggatccaggcagtatcaagtcaccatccatgttatagatgagaccatgtataacatcaccatctttaacaccaccatccagccttcagatgagatcacagccctgactgcaacctctctgaccacagctcagagagggcatgtggcatgctcacaaacagtctgttaggggcttcccctgggtcagaactcagacccctcggctcttagtccaatgctcctctcctaacccaggttgcctttggggaccttgggggggtctctcatttcattgggaatgcctaatggcattggttgccacgtgttgccattgttggtgtatgtaagtcgctcttctgtcctcatatccccactctgtcgtcctgccccttcttgggggtggatcctgcaggagagggggaagcagccaagcaaggcttcatttctacttttccatctgcaggacccagggctgggcacatttggtgcaacaggctggaaatattctcccctaccccaccctccccatccctcctcagaggcactgggccggggactggagcctgtggtgaggtccttcccctcaagccctgtcgggggcagccactaaatggccccaagatcccatggactcaagggattccatgtggcatcccttcccgtgctgcagaggctgggaaacttaaccacatttccagactctcttgcagctagtgtttctgatggcatggaaatcctgccattgaatgcaaacgcacaagactagaatttggaactgagtttcgtggggagagaggcagggcatggagcatccaagcatccattttgctgtgtggatggtggtagagtgcaggcctaatgctggagctggcagttgtaatggtggcttctgaattccacagcttcttgatggaggcaggagccctggcatcttagcccagttcagcagcgttttaggcagctttcctggatgctcagacacttagtaataatatgcttgaaaaaaaaaagccctttttttccctactagctggaatggattccgttgtctgtcactgaaccctgatgatacatcttctacacactgtgtgggacaaggccccatggaagtcccaagtcagtaacctgaactccccaccctctctgccaagaaagagcttttttctctcagtatccatttatcggtcccaggggagctctctgattggctgtgcttgggccagtcattatctcctgg

SEQ ID NO: 1334 - DNA, 2525 bp, Homo sapiens
ttttcccgcgaaactcggcggctgagcgtggaggttcttgtctcccctggtttgtgaagtgcggaaaaccagaggcgcagtcatgtcgggattcgacgatcctggcattttctacagcgacagcttcgggggcgacgcccaggccgacgaggggcaggcccgcaaatcgcagctgcagaggcgcttcaaggagttcctgcggcagtaccgagtgggcaccgaccgcacgggcttcaccttcaaatacagggatgaactcaagcggcattacaacctgggggagtactggattgaggtggagatggaggatctggccagctttgatgaggacctggccgactacttgtacaagcagccagccgagcacctgcagctgctggaggaagctgccaaggaggtagctgatgaggtgacccggccccggccttctggggaggaggtgctccaggacatccaggtcatgctcaagtcggacgccagcccttccagcattcgtagcctgaagtcggacatgatgtcacacctggtgaagatccctggcatcatcatcgcggcctctgcggtccgtgccaaggccacccgcatctctatccagtgccgcagctgccgcaacaccctcaccaacattgccatgcgccctggcctcgagggctatgccctgcccaggaagtgcaacacagatcaggctggacgccccaaatgcccattggacccgtacttcatcatgcccgacaaatgcaaatgcgtggacttccagaccctgaagctgcaggagctgcctgatgcagtcccccacggggagatgcccagacacatgcagctctactgcgacaggtacctgtgtgacaaggtcgtccctgggaacagggttaccatcatgggcatctactccatcaagaagtttggcctgactaccagcaggggccgtgacagggtgggcgtgggcatccgaagctcctacatccgtgtcctgggcatccaggtggacacagatggctctggccgcagctttgctggggccgtgagcccccaggaggaggaggagttccgtcgcctggctgccctcccaaatgtctatgaggtcatctccaagagcatcgccccctccatctttgggggcacagacatgaagaaggccattgcctgcctgctctttgggggctcccgaaagaggctccctgatggacttactcgccgaggagacatcaacctgctgatgctaggggaccctgggacagccaagtcccagcttctgaagtttgtggagaagtgttctcccattggggtatacacgtctgggaaaggcagcagcgcagctggactgacagcctcggtgatgagggacccttcgtcccggaatttcatcatggagggcggagccatggtcctggccgatggtggggtcgtctgtattgacgagtttgacaagatgcgagaagatgaccgtgtggcaatccacgaagccatggagcagcagaccatctctatcgccaaggctgggatcaccaccaccctgaactcccgctgctccgtcctggctgctgccaactcagtgttcggccgctgggatgagacgaagggggaggacaacattgacttcatgcccaccatcttgtcgcgcttcgacatgatcttcatcgtcaaggatgagcacaatgaggtgagggatgtgatgctggccaagcatgtcatcactctgcacgtgagtgcactgacacagacacaggctgtggagggcgagattgacctggccaagctgaagaagtttattgcctactgccgagtgaagtgtggcccccggctgtcagcagaggctgcagagaaactgaagaaccgctacatcatcatgcggacggggcccgtcagcacgagagggacagtgaccgcgtccagcatccccatcactgtgcggcagttggaggccattgtgcgcatcgcggaagccctcagcaagatgaagctgcagcccttcgccacagaggcagatgtggaggaggccctgcggctcttccaagtgtccacgttggatgctgccttgtccggtaccctgtcaggggtggagggcttcaccagccaggaggaccaggagatgctgagccgcatcgagaagcagctcaagcgccgctttgccattggctcccaggtgtctgagcacagcatcatcaaggacttcaccaagcagaaatacccggagcacgccatccacaaggtgctgcagctcatgctgcggcgcggcgagatccagcatcgcatgcagcgcaaggttctctaccgcctcaagtgagtcgcgccgctcactggactcatggactcgccacgctcgccctccttgccgctgcctgccattgacaatgttgctgggacctctgcctccccactgcagccctcgaacttcccaggcaccctcctttctgccccagaggaaggagctgtagtgtcctgctgcctctgggcgcccgctctagcgggttctgggaagtgtgcttttggcatccgttaataataaagccacggtgtgttcaggt

SEQ ID NO: 1335 - DNA, 2202 bp, Homo sapiens
atgtcgggattcgacgatcctggcattttctacagcgacagcttcgggggcgacgcccaggccgacgaggggcaggcccgcaaatcgcagctgcagaggcgcttcaaggagttcctgcggcagtaccgagtgggcaccgaccgcacgggcttcaccttcaaatacagggatgaactcaagcggcattacaacctgggggagtactggattgaggtggagatggaggatctggccagctttgatgaggacctggccgactacttgtacaagcagccagccgagcacctgcagctgctggaggaagctgccaaggaggtagctgatgaggtgacccggccccggccttctggggaggaggtgctccaggacatccaggtcatgctcaagtcggacgccagcccttccagcattcgtagcctgaagtcggacatgatgtcacacctggtgaagatccctggcatcatcatcgcggcctctgcggtccgtgccaaggccacccgcatctctatccagtgccgcagctgccgcaacaccctcaccaacattgccatgcgccctggcctcgagggctatgccctgcccaggaagtgcaacacagatcaggctggacgccccaaatgcccattggacccgtacttcatcatgcccgacaaatgcaaatgcgtggacttccagaccctgaagctgcaggagctgcctgatgcagtcccccacggggagatgcccagacacatgcagctctactgcgacaggtacctgtgtgacaaggtcgtccctgggaacagggttaccatcatgggcatctactccatcaagaagtttggcctgactaccagcaggggccgtgacagggtgggcgtgggcatccgaagctcctacatccgtgtcctgggcatccaggtggacacagatggctctggccgcagctttgctggggccgtgagcccccaggaggaggaggagttccgtcgcctggctgccctcccaaatgtctatgaggtcatctccaagagcatcgccccctccatctttgggggcacagacatgaagaaggccattgcctgcctgctctttgggggctcccgaaagaggctccctgatggacttactcgccgaggagacatcaacctgctgatgctaggggaccctgggacagccaagtcccagcttctgaagtttgtggagaagtgttctcccattggggtatacacgtctgggaaaggcagcagcgcagctggactgacagcctcggtgatgagggacccttcgtcccggaatttcatcatggagggcggagccatggtcctggccgatggtggggtcgtctgtattgacgagtttgacaagatgcgagaagatgaccgtgtggcaatccacgaagccatggagcagcagaccatctctatcgccaaggctgggatcaccaccaccctgaactcccgctgctccgtcctggctgctgccaactcagtgttcggccgctgggatgagacgaagggggaggacaacattgacttcatgcccaccatcttgtcgcgcttcgacatgatcttcatcgtcaaggatgagcacaatgaggtgagggatgtgatgctggccaagcatgtcatcactctgcacgtgagtgcactgacacagacacaggctgtggagggcgagattgacctggccaagctgaagaagtttattgcctactgccgagtgaagtgtggcccccggctgtcagcagaggctgcagagaaactgaagaaccgctacatcatcatgcggacggggcccgtcagcacgagagggacagtgaccgcgtccagcatccccatcactgtgcggcagttggaggccattgtgcgcatcgcggaagccctcagcaagatgaagctgcagcccttcgccacagaggcagatgtggaggaggccctgcggctcttccaagtgtccacgttggatgctgccttgtccggtaccctgtcaggggtggagggcttcaccagccaggaggaccaggagatgctgagccgcatcgagaagcagctcaagcgccgctttgccattggctcccaggtgtctgagcacagcatcatcaaggacttcaccaagcagaaatacccggagcacgccatccacaaggtgctgcagctcatgctgcggcgcggcgagatccagcatcgcatgcagcgcaaggttctctaccgcctcaagtga

SEQ ID NO: 1336 - DNA, 27846 bp, Mus musculus
  misc_feature (800)..(3999): n = a, g, c, or t.
  misc_feature (6822)..(7192): n = a, g, c, or t.
  misc_feature (8486)..(9520): n = a, g, c, or t.
  misc_feature (21270)..(21289): n = a, g, c, or t.
gcgcagcgagactgcgcctgcaaccgtctgggctcccgggccctgctgaggcagttggtccttcctgcagaaccgagcaacagcccgtcagggcactctcaccttggtcttgcattggcttcaccctccagccaggacccgcgaggtagacacagggtggaggacagaagaacctgggaacacataacatcattttcactgtcttaaaagtgtctcaaggtggcataaatttttaaagaatcatgatttagtgtcccctctcccagagtgaaaccgttaatgcattattagacctcatcagtaagtcctgcccgctccatcttcaaaacacatctggaatccgttagattcctaccaacttcaccttggtcctaaccactatcccttgccttcccaactcagccttccatctgtctctcccttgctacagatgcctcttttagtttgtttttcacacagcaactagattactttaaaaaatttatttatggatatgagagctctatttgcatgtatgcctgcatggcagaagagaccatctgacagaagagaacatcagatcccattacagatggttgtgagccagcaagtagttgcgaggaattgaactcaggtcctctggaagagcagccaccagtgctcttaaccctgagtagtctctccagccccagattagttcttaagtaacaggtggctcagtggataaaaggcttgctgaggcaagcatgataacttgacttcaatgcccagaacccatcaaaaggaggaagagaaccaactgtacacctaactgcacacannnnnnnnnnnnnnnnnnnnnnnnnnnnnnnnnnnnnnnnnnnnnnnnnnnnnnnnnnnnnnnnnnnnnnnnnnnnnnnnnnnnnnnnnnnnnnnnnnnnnnnnnnnnnnnnnnnnnnnnnnnnnnnnnnnnnnnnnnnnnnnnnnnnnnnnnnnnnnnnnnnnnnnnnnnnnnnnnnnnnnnnnnnnnnnnnnnnnnnnnnnnnnnnnnnnnnnnnnnnnnnnnnnnnnnnnnnnnnnnnnnnnnnnnnnnnnnnnnnnnnnnnnnnnnnnnnnnnnnnnnnnnnnnnnnnnnnnnnnnnnnnnnnnnnnnnnnnnnnnnnnnnnnnnnnnnnnnnnnnnnnnnnnnnnnnnnnnnnnnnnnnnnnnnnnnnnnnnnnnnnnnnnnnnnnnnnnnnnnnnnnnnnnnnnnnnnnnnnnnnnnnnnnnnnnnnnnnnnnnnnnnnnnnnnnnnnnnnnnnnnnnnnnnnnnnnnnnnnnnnnnnnnnnnnnnnnnnnnnnnnnnnnnnnnnnnnnnnnnnnnnnnnnnnnnnnnnnnnnnnnnnnnnnnnnnnnnnnnnnnnnnnnnnnnnnnnnnnnnnnnnnnnnnnnnnnnnnnnnnnnnnnnnnnnnnnnnnnnnnnnnnnnnnnnnnnnnnnnnnnnnnnnnnnnnnnnnnnnnnnnnnnnnnnnnnnnnnnnnnnnnnnnnnnnnnnnnnnnnnnnnnnnnnnnnnnnnnnnnnnnnnnnnnnnnnnnnnnnnnnnnnnnnnnnnnnnnnnnnnnnnnnnnnnnnnnnnnnnnnnnnnnnnnnnnnnnnnnnnnnnnnnnnnnnnnnnnnnnnnnnnnnnnnnnnnnnnnnnnnnnnnnnnnnnnnnnnnnnnnnnnnnnnnnnnnnnnnnnnnnnnnnnnnnnnnnnnnnnnnnnnnnnnnnnnnnnnnnnnnnnnnnnnnnnnnnnnnnnnnnnnnnnnnnnnnnnnnnnnnnnnnnnnnnnnnnnnnnnnnnnnnnnnnnnnnnnnnnnnnnnnnnnnnnnnnnnnnnnnnnnnnnnnnnnnnnnnnnnnnnnnnnnnnnnnnnnnnnnnnnnnnnnnnnnnnnnnnnnnnnnnnnnnnnnnnnnnnnnnnnnnnnnnnnnnnnnnnnnnnnnnnnnnnnnnnnnnnnnnnnnnnnnnnnnnnnnnnnnnnnnnnnnnnnnnnnnnnnnnnnnnnnnnnnnnnnnnnnnnnnnnnnnnnnnnnnnnnnnnnnnnnnnnnnnnnnnnnnnnnnnnnnnnnnnnnnnnnnnnnnnnnnnnnnnnnnnnnnnnnnnnnnnnnnnnnnnnnnnnnnnnnnnnnnnnnnnnnnnnnnnnnnnnnnnnnnnnnnnnnnnnnnnnnnnnnnnnnnnnnnnnnnnnnnnnnnnnnnnnnnnnnnnnnnnnnnnnnnnnnnnnnnnnnnnnnnnnnnnnnnnnnnnnnnnnnnnnnnnnnnnnnnnnnnnnnnnnnnnnnnnnnnnnnnnnnnnnnnnnnnnnnnnnnnnnnnnnnnnnnnnnnnnnnnnnnnnnnnnnnnnnnnnnnnnnnnnnnnnnnnnnnnnnnnnnnnnnnnnnnnnnnnnnnnnnnnnnnnnnnnnnnnnnnnnnnnnnnnnnnnnnnnnnnnnnnnnnnnnnnnnnnnnnnnnnnnnnnnnnnnnnnnnnnnnnnnnnnnnnnnnnnnnnnnnnnnnnnnnnnnnnnnnnnnnnnnnnnnnnnnnnnnnnnnnnnnnnnnnnnnnnnnnnnnnnnnnnnnnnnnnnnnnnnnnnnnnnnnnnnnnnnnnnnnnnnnnnnnnnnnnnnnnnnnnnnnnnnnnnnnnnnnnnnnnnnnnnnnnnnnnnnnnnnnnnnnnnnnnnnnnnnnnnnnnnnnnnnnnnnnnnnnnnnnnnnnnnnnnnnnnnnnnnnnnnnnnnnnnnnnnnnnnnnnnnnnnnnnnnnnnnnnnnnnnnnnnnnnnnnnnnnnnnnnnnnnnnnnnnnnnnnnnnnnnnnnnnnnnnnnnnnnnnnnnnnnnnnnnnnnnnnnnnnnnnnnnnnnnnnnnnnnnnnnnnnnnnnnnnnnnnnnnnnnnnnnnnnnnnnnnnnnnnnnnnnnnnnnnnnnnnnnnnnnnnnnnnnnnnnnnnnnnnnnnnnnnnnnnnnnnnnnnnnnnnnnnnnnnnnnnnnnnnnnnnnnnnnnnnnnnnnnnnnnnnnnnnnnnnnnnnnnnnnnnnnnnnnnnnnnnnnnnnnnnnnnnnnnnnnnnnnnnnnnnnnnnnnnnnnnnnnnnnnnnnnnnnnnnnnnnnnnnnnnnnnnnnnnnnnnnnnnnnnnnnnnnnnnnnnnnnnnnnnnnnnnnnnnnnnnnnnnnnnnnnnnnnnnnnnnnnnnnnnnnnnnnnnnnnnnnnnnnnnnnnnnnnnnnnnnnnnnnnnnnnnnnnnnnnnnnnnnnnnnnnnnnnnnnnnnnnnnnnnnnnnnnnnnnnnnnnnnnnnnnnnnnnnnnnnnnnnnnnnnnnnnnnnnnnnnnnnnnnnnnnnnnnnnnnnnnnnnnnnnnnnnnnnnnnnnnnnnnnnnnnnnnnnnnnnnnnnnnnnnnnnnnnnnnnnnnnnnnnnnnnnnnnnnnnnnnnnnnnnnnnnnnnnnnnnnnnnnnnnnnnnnnnnnnnnnnnnnnnnnnnnnnnnnnnnnnnnnnnnnnnnnnnnnnnnnnnnnnnnnnnnnnnnnnnnnnnnnnnnnnnnnnnnnnnnnnnnnnnnnnnnnnnnnnnnnnnnnnnnnnnnnnnnnnnnnnnnnnnnnnnnnnnnnnnnnnnnnnnnnnnnnnnnnnnnnnnnnnnnnnnnnnnnnnnnnnnnnnnnnnnnnnnnnnnnnnnnnnnnnnnnnnnnnnnnnnnnnnnnnnnnnnnnnnnnnnnnnnnnnnnnnnnnnnnnnnnnnnnnnnnnnnnnnnnnnnnnnnnnnnnnnnnnnnnnnnnnnnnnnnnnnnnnnnnnnnnnnnnnnnnnnnnnnnnnnnnnnnnnnnnnnnnnnnnnnnnnnnnnnnnnnnnnnnnnnnnnnnnnnnnnnnnnnnnnnnnnnnnnnnnnnnnnnnnnnnnnnnnnnnnnnnnnnnnnnnnnnnnnnnnnnnnnnnnnnnnnnnnnnnnnnnnnnnnnnnnnnnnnnnnnnnnnnnnnnnnnnnnnnnnnnnnnnnnnnnnnnnnnnnnnnnnnnnnnnnnnnnnnnnnnnnnnnnnnnnnnnnnnnnnnnnnnnnnngttaaatgcagctgccgcttgggctcgccctggctgtctggcattccccacttagggcaacctgcccacgccgccgccgttacctggtccaactccccaggaggctgggcccgtcgctctgtagccgcacctctgagctgtccggcaggctcaggtgagtcaaagggcccgggggcaacgaggggtctgcagggaagccagcgtaaaacccgtagggggacaagtcttaacagcctacgtgtccacgtctaacctgcagtaccttttccgatccccctctggcaaggccaacaaaatgcaggtcctccttccctaatctccctccacgcctggcaccttcccaaagtgtcctttccggattagctcttgaactcagacctctttggagcgcactttccttgggaatgcactttccctatcctaagggcgtccgagaaatttcctcttcaatgcaaggatccttatcaggagacctgggctcactctaatgggccactacttcaaagcaagcctttgaacgatgatgactcttctttgccctccctagacccccccccccccccgtggaacagcggatttggaaagctgaaattgagagggcagctgttttgactttctaagagtcctgaggtgcaagcgacatcaagtgcgtgttgacttaagccaagaggagcttaagggagcccttagtcaagagccaaccctgagtttcaaaggcccggtggagctatactcagatgtttgccctggggtgctggctccgctctggcccactctagaaaaggcttgcctttcctcctacctccaccatcaagccactggcacatctagctagcttgtcaccttaccaccacagaccctgccagaaggatttttgttcttctaccctcgctggaaagccagaagggagaagaatctcggataggaagctggtctggagtcagagccacgcaccggccttgctcagaatgggctcattcaaggaactggggggttgggggaggggcagccgtgggttaaggggcgatggcctgctctgccaagaaaccacagaaaaatggatagagcaggctcagtgtgccgtgtgggggtggggtggggaaacggaaagaaaggcttagtgattcttaggtgcaagggaaccaggcttctctggaggaagagacaggggtggggtgtaggggggtgagagctaggtttagttctgtgcctggagcccagctgcgtagtcttattgggcagcacattttccatccgtacagtgtgtgtgttcccttagtggttctcaagggacctagttaggctacacaggaaggagagggctcacctgttgtctccctggggtccatggctgctcatcgaggcccaggccgctctcttgctgccctctgggcacatctaccgccactgacttcgataccgttcacacatctaagccccgatccgatcctcacactggatttatcctgtccaagccttatcttcaaggtcccgggactcccagcggcctgtttgctctgggcagggacacctgctgggcagatgtaggcttcccaaggcagtagaagccagacccagcaggcgccccctggcggcctctcctaagagcaggcgagaaacagacaccgaggcgtgtcttgtgcaggactccactctctggcctaccactaagaacccagaccccaagagctgctctttggcgtgtggcacgggtttgggggaatatggggaatgatttctgtccgcagaagaagagagtgtggagcaccttagctgactcacacaccagatagacaggactctatctcggccgcagccactttcctgctataaggcgttgggtagcagcatttaatttcttaaagcctatttctgaatagggagaaccgaaccaaaacagccttaaatgtcggaactacaaagagggtcaatgccacaacggaaaagcacatttagcactatatctggtatttaggaaggggttctttcggggactggcaagatggctcagtgggtaaaggtgcttgctgtcgggactgaccaccggagttcagtcctgtttaattctgggacacacacagaggaaggagaaaacggacttcagcgaattgccccctgacctccacacgtgtgtgccatagtgtgtgagcacacaccatatacatgtatatatatgtaacacacacacacatatatggtgtgtatgctatataatatatatgatgtgtatgatctgtaatatatatcatatatatggtgtgtgtgtatatatatatatacacacatatgtatataattttttaatacaagcgtttatctccttttgagttttatgtatttttatctacttcttattaacttagtgccctgtagttctgtaaaatgccattttttacaaaggctcctctgtgagtttcagcaatcccagtgtggtgacatcaaaaaattatcatgagcctttttgttttgttttgagaaagaatctcactatgtagccctgggtggcctggaactcactatgaagaacagactggtcctcaaactcccagagatctgcctgcctttgcctcccgagtgtgcagctatgcctggcaaaacattttgaacatacgcaaagccagagtgttcatcccctgcaataaaagcaccgtcaaaactgttgctttgcgaccttcttttctagctgcaggctgtgacactgtggttcgtcatccttccaagcaccatgagaggcccctgctgctggccactctctctgttgctgctcttcctgcagtcctgggaaactcagctccagtctgcaggtgagttggatcccagccnnnnnnnnnnnnnnnnnnnnnnnnnnnnnnnnnnnnnnnnnnnnnnnnnnnnnnnnnnnnnnnnnnnnnnnnnnnnnnnnnnnnnnnnnnnnnnnnnnnnnnnnnnnnnnnnnnnnnnnnnnnnnnnnnnnnnnnnnnnnnnnnnnnnnnnnnnnnnnnnnnnnnnnnnnnnnnnnnnnnnnnnnnnnnnnnnnnnnnnnnnnnnnnnnnnnnnnnnnnnnnnnnnnnnnnnnnnnnnnnnnnnnnnnnnnnnnnnnnnnnnnnnnnnnnnnnnnnnnnnnnnnnnnnnnnnnnnnnnnnnnnnnnnnnnnnnnnnnnnnnnnnnnnnnnnnnnnnnnnnnnnnnnnnnnnnnnnnnnnnnnnnnnnnnnnacctgcttgctgggacaatccaagttatcagagatacaggagatgagatgttctagatataatctaatcagttcattcatttatggtgtctggctggctcatgtaggcatttgagacagcgacatctctttgttcactcctcaatacataacacagactcagaacagctcccagaactgcatgcgcgcgcgggggtggggtgggggaaccttgtgtgatttcctggctcaggtctcctcaaatgatggatgagtaactgtatccaaggctaatttgttaggttaaagacatgctgggcactgttccattcagataacagcaggtcttccggctttttctaagagaccagctttagctgacccgtgagagtcctcctccatcttcccgcaggtcctaggtgctataatgggcccctggatttggtgttcatgattgatagctcccgcagcgtgcgccccttcgagtttgagaccatgaggcagttcctagtgggcctcctccgcagcctggacgtgggtctgaacgccacgcgcgttggggtgatccagtattctagtcaagtgcaaagcgtctttcccctgggcgccttttcgcgccgcgaggacatggaacgagccatccgcgccggtggtgccgctggcgcagggcaccatgaccgggctggcgatccagtacgctatgaacgtggccttcagcgaggccgaaggcgcgcgcccatcggaggagcgagtgccgcgcgtcttggtcatcgtgacagacgggcgacctcaagaccgagtggccgaagtggccgctcaggcgcgcgcccgcgggcattgagatctatgcggtaggggtacagcgagctgacgtgggctctcttcgcaccatggcttcgccgccgctggatcagcatgtcttcttagtggagtccttcgatctcatccaggagtttggcctgcagttccagggccgcctgtgcggtgagttagagtggcacccagctcaggcaatgcagatgctcattctagttcgcatcattaaaggcgatccctcaattttactctgccctctgggtaccagttgccgtggtccctcctgcagagtggtatcctcagcagccagtcatgctgtgtcagagactgaccctgccacaagctgtcacccccccccttctcccgcctcccacaccaaatgtcttttaatcaagaatcgctcaaaattgatagtattgtctgtcaggagtcatgccccgcccacccgagtatgttcctccaactttaagtcccttttaaatacttgtgtgtgtgtgtgnnnnnnnnnnnnnnnnnnnnnnnnnnnnnnnnnnnnnnnnnnnnnnnnnnnnnnnnnnnnnnnnnnnnnnnnnnnnnnnnnnnnnnnnnnnnnnnnnnnnnnnnnnnnnnnnnnnnnnnnnnnnnnnnnnnnnnnnnnnnnnnnnnnnnnnnnnnnnnnnnnnnnnnnnnnnnnnnnnnnnnnnnnnnnnnnnnnnnnnnnnnnnnnnnnnnnnnnnnnnnnnnnnnnnnnnnnnnnnnnnnnnnnnnnnnnnnnnnnnnnnnnnnnnnnnnnnnnnnnnnnnnnnnnnnnnnnnnnnnnnnnnnnnnnnnnnnnnnnnnnnnnnnnnnnnnnnnnnnnnnnnnnnnnnnnnnnnnnnnnnnnnnnnnnnnnnnnnnnnnnnnnnnnnnnnnnnnnnnnnnnnnnnnnnnnnnnnnnnnnnnnnnnnnnnnnnnnnnnnnnnnnnnnnnnnnnnnnnnnnnnnnnnnnnnnnnnnnnnnnnnnnnnnnnnnnnnnnnnnnnnnnnnnnnnnnnnnnnnnnnnnnnnnnnnnnnnnnnnnnnnnnnnnnnnnnnnnnnnnnnnnnnnnnnnnnnnnnnnnnnnnnnnnnnnnnnnnnnnnnnnnnnnnnnnnnnnnnnnnnnnnnnnnnnnnnnnnnnnnnnnnnnnnnnnnnnnnnnnnnnnnnnnnnnnnnnnnnnnnnnnnnnnnnnnnnnnnnnnnnnnnnnnnnnnnnnnnnnnnnnnnnnnnnnnnnnnnnnnnnnnnnnnnnnnnnnnnnnnnnnnnnnnnnnnnnnnnnnnnnnnnnnnnnnnnnnnnnnnnnnnnnnnnnnnnnnnnnnnnnnnnnnnnnnnnnnnnnnnnnnnnnnnnnnnnnnnnnnnnnnnnnnnnnnnnnnnnnnnnnnnnnnnnnnnnnnnnnnnnnnnnnnnnnnnnnnnnnnnnnnnnnnnnnnnnnnnnnnnnnnnnnnnnnnnnnnnnnnnnnnnnnnnnnnnnnnnnnnnnnnnnnnnnnnnnnnnnnnnnnnnnnnnnnnnnnnnnnnnnnnnnnnnnnnnnnnnngcttccgcgggttgcgtggcttccgcagttgcgtggcttccgaggttgcatggcttccgagggttgtgtggcttccgagggttgtgtggcttcaggaggttgcgtggcttccgagggttgcgtggcttccgagggttgtgtggcttccgagggtggtgtggcttccgagggtggtgtggcttccgagggtggagtggcttccgagggtggtgtggcttccgagggtgtgtggcttctgaggttgtgtggcttccgagggttgcgtggcttccgagggttgcgtggcttccgagggtggtgtggcttacaagggttgtgtggcttccgagggttgcttggcttctgagggttgcgtggcttctggaggttgtgtggcttctgagggttgcgtggcttccgcgggttgcgtggcttccgtgggttgcgtggctaggctgtgaaatgaagcccctagcaaagactgacttcatcctctttccagccttggatctctgcgctgaaggaacccatggctgtgaacacctctgtgtcaactccgtggactcgtatttctgtcgttgccgagctggctttgcgctccagcaggaccagaggagctgcagaggtaagtgagcctcccacaaccccctctctgtgagcgttctgaatggcccctggtggctacactcagaagtgacatcctgcggtttcttccttccctcagccattgactactgcagctttggaaaccacagctgccagcatgagtgtgtgagcactttggcggggccacagtgtcgctgcagagagggccacgacctgctacctgatgggagaagctgtcggggtgaggaggtgtctctcatatttgtagggaatagaaagggattctagctgctgggatctaacctgaccggtcctacttggtgtctcctttaaagtcagggacttctgcaatggtgtggaccatggctgtgagttccagtgtgtgagtgagggtctttccttccactgcctgtgccctgaggggaggcgacttcaggctgatggcaagagctgtgaccgtgagttatatataaggcagagggtctgctccggccccattgcctgcctcttcttcaatgcccagttacagccccacagatggtggtgtgtatgtgcgtgtgttggcggatgtgcttataatgcccagcttcttttccaaccagtcctctatcctgctgtcaagactgatttcaaaatccatatctgatcacgttcctctttcactcaaaatacttttgtggttcaccagtgtctacaaaagcaagtgccttccctccgaatttttccagtgctgggcacaaccacattaatggataatgaaaccaaattagtgggttgcaaccagcatttaaagaaaagaagagaaaaatagtttcctgagtttaggagagtaagtattgcttcatgagctggaccgttcagttacgtgaaatgcaccgtggtctatcattattctcttttttcatcgtgggctgtggtcaattttgaaatcatcacttaatctcattaccatgtagctttggccagctctttagcccatctcttgccacacttgaacattttagtcccactggcctgtccctctccgagtgtgtcatacccttcccggctcccatgcctttgtgtgtgctgtgccaaccttctagaatgccccccttgccttggcaaattcccggtcatccttcaagacggcattagcccatttcggttgccatggtgcaacaccgatgtgagttgctataatgaaaacgctcaaagcggggtgattggttagagagtagagcttacgtggctcacagtctggagcatagcgtcaacatctcagtattggcgatgaccacgtgacaggagagagcccctgagattgaagagtatgtgtgtgtgagggttcaaatgcaggaggtggccgtcctttgtaacctttcactgacagggtcattctagtctctcgagacctactcaatcctgtgatgtgggcgttaatttcttcctagggtggtgctccatgacctaatcgtctcccagaaggcctgttatgattcagagagaaagtgctctcttgcaagctcatgcctcaaaggcttggtccttaatgccaacatgttcagagcctgggatcttattaattgattaacccaaagatggattaaacacgagagtaggtttttagggtgttgggagatggaactgtagaggataggccctagattgagaaagtgggtcactgggggggttaatgccatttttttttgagacagggttttatgtagcccaggctggccatatactagctatgtaactgataatgaccttgggcttcctaatcctactgcctccgaatgttatggtaacccccttttctgtggtgttagggctctaactcagggcttggtacaagctaggcaactgctctaccaaatgagcttcatatccagttcctgaagcctgggatttggatgtgtattccaggctggtcttgatcctgcctgtctcccaagtgctgagattacaggcttgtgcctccatgtcctgtttgaagagtgtcttgtccctgcctgcctgtctgtctgtctgtgtttccttctgtaatgaaggatgttgcattcctccatcattttcctgctgtcatgatatctggcctctacccaggtcaaaggcaatggagccagacagccgtgcactgaaatcttcccaagtcgtgagctaaagcaaatccttccacccttaagttacttccatcactgcaatggaaagacccctaggtctcaatcacttctcagtcctgttaccctggggaccaagtttctagcacatggtctcttgggcacaaaccatatctaagccacaacaatatcttaaatgtttatttctcagttctggaaaggctaagaccaagattcgggcagatacggtgtcccatgatgctctgcttcctggcttatacaagatagttttctctttgttctcccttgatggatggacggaggaagcagactctgtagaagctcttgtcagaacattaattaattgcattcatgaaggcctgactctcatgtctgtgtctaatcccaatttcgtcccaaagatgatcacattgagacagggttttatgtagctccgactggcggtgtatagctatatactgataatgaccttgggcttcctaattgaaccccaccacctccacgaagccttcctcaaccactctcagggaagtgatttattccggtcttgggctcccttactgcctcctcatagtgcactttccttaactgtggcagatggcatgtctgccttgctacagtctgccctgatcttgtgggtcaggactgtgttttctttgttgttgaatccccttctggtactcaagaagccactggatcaggacaaaggaggcagtgtcttagtgagcaggtccagtggtttgtggtttagatgccgctgccttccaatcttggctttgccgctgttaacttcagaacctagtttatgggaaatggggagagcactcgaggagaaagtgtgtcaagtgcgagtttcagcgtctgacacgtgacaaacaccagaaaatgttgttcttgccattgtcattaatactgatatggtgcttagaatggtgacagatacatactaggtgatcgaggaatgctagctattgtggtatatttttgctcttggttgtttaataacgaaccgggaggtggtgatgtttgcctttaatctctgcacttgggaagcagaagcaggcagatctctgagtttgcaactagcctggtctgcatagtgaattccaggtcagccaggactacaccgagaaatgctatcttgaaaaaaaaaaaaaaaaagccaggcagtggtggtgcacacctttaatcccaacactcaggaggcagaggcaggcggatttctgagtttgagaccagtctggtctacagagtgagttccaggacagtcagggttatacagagaaaccctgtctcgaaaaaccaaacagagaggggggggggggagaagagagctttcaataaagcatttggttagtgccaagcacttaacatcaaaagttgtcatacaaaagaggacgatggttatgtattgattgctgggcacacacagtcaggacacataactggaatgcgttatatagtaaatactggcgatgaataactagacgagtatgtggttctcctgggcaaggacctgatccctccatccaagccttctccttggcagggtgccgggagggccacgtggatcttgttctcctggtggatggttccaagagcgtgcgcccacagaacttcgagctggtgaagcgcttcgtgaaccagattgtggatttccttgacgtgtctcccgagggcacacgtgttgggctggtgcagttctccagccgggtgcgcaccgagttccccctgggccgctatggcaccgcagctgaggtgaagcaggcagttttggccgtggagtacatggagcgcggcaccatgacagggctggccctgcgtcacatggtggagcacagcttctctgaggcgcagggcgcgcggcctcgcgacctcaacgtgcctcgcgtgggcttggtgttcactgatggccgctctcaggatgacatttcagtgtgggcagctcgtgccaaagaggaaggtaggtttggcaagggatggactggtgtggggttggagttggggctgggaagcagttttctccaggcttggagctttctcttgagtgtctgggccctacaggcatcgtcatgtatgccgtgggcgtgggtaaggctgtggaggaagagctgcgtgagatcgcatcggaaccatcggagttgcacgtgtcctattctccggactttagcaccatgacgcacctgctggagaatctcaaaggcagcatttgcccaggtgagtgaatctcttccagccgaccggagtgcatgcgtatgcgcgcgcgcgcgtgtgtgtgtgtgtgtgtgtgtgtgtgtgtgtgtgtgtagggatggggacgagagggcagggtctgttgtcttttttacctagcctctgatagatgccctggtcctcagctcttcactacccttcagctctctacacagagcttgttatttaaaacccagagcaggtctgtcctttaccgtagcttgtcaaaaacgcagccccgacagtgaatcggacccttatgtgctttgtgtgcacctcagagtcaacgaggcgttgggatttttttttcactcaaattagtagtgtctggaataacttgagaaaactgtattattaaaaatatgtttaaaattgcatttcatgcacaccttttgcctgcatgtacgtatgggcctggttcatgtggaggccagaagtggggggcagttcctgtgagactacagatggtttgtgagtcgccgtgtgagtgctggacattgaacctgggtcctctggaagagcaggcagtgctcttaaccactcagccatctctccaggtcaagagaaaacttttaaaaaagcaagtcaaatttagcatttacaagcgtaaccgactataagcttccagcttgtggagattcaactttatagatttggcaaagtgacaggacagggttgtttttttatttttattttttatttttatttttttacagtggcttgtgctttctggggacatagaccataaatgccatcattgtaatgtatctggtctccagctgggggtgggggggaggggaaggatccagacatgcccgcggggaacagctgggccttatagggggcaaagtttcttggtggggggcttgattttgactatggggtctttagattctaacacatgtctaaggcgtgactcttcttccactgtctactgctgatagaggtaggtgagcagggctgtgtccagggcagagaatctgtagttaaaagtgctccctgccctgccaccaactctaacaattaactaaggtgttttggacacatcaggcttaagggcccttcccgtcccgacttatttacaatggaccctggataactcacttaaccccggccctaccttaccctcttctgtatgaggaaagatgcccaaagttactgccagctttagatttcggaggcaagttggaacgctctgctaaagctcttcactggctgaccattcaggcccaggcagatcctcatctttctgtaaccctcggttctacagctctaaagtcagaggtgaacatttgggagtgttaacgaggccatcaataaaatgacacaaggatgagggtttgactgatagtagaatctccctatggaggctgaggctaagaatcttgctgctattttagtgcctgcaatattaaaaaacaagagctggtgagatggcacagcgtgtaaaagcagctgccatgcaaacccggcgacctgagttcgatcctggaacacattaccaaaaagcccgatgcgatggctcacatctgtacccagcatccctgcagggagatgggtggtgcagacggaagcacctgaaagcttgcctggatacaaagagaggcaaaaactaaagagagacgctgcctcaaaaaggtgtgaggagagagttgactcacaatagatgttctctgatgttgacatgaatgctgtggtctgccctcacacatgtatcatacacatacataataaaacattaaaatagaaaatggcgtggaccagcagtgatgctatctccgtaatattccccaccattttctgtactgttaaggaaacatagacaaccaagtttatctctactctactcttagatgttgaagtgtgtgtgtggagataaacttggatccataattttttgtttttgcgtttgagacggggtttctctgtgtagctttggctgtcctcctggaactcactctgtagatcagactggcctcaaactcacagagatccttccttctgcctatgcctcttgagcgctgggaccaaaggcatgtaccaccacgcctgacttggacctataatttaaacattaatttcatcagaatcagtggaatcgcatattgttgcacttcatcctgactcactaggtctgggatagggtttgataatttgccattatgacatattcctaggttatgctaatactgcttgtccacggaatgctggtttactagaaatacacagtacagggttgacttgtgcctggcattgctctagatattgtgccagtacggtattcagtcgctacgtgtgtatgatgaattacaattggtcacaataacacagaataaaaactgagttcttcagttgtacccgccacatttcaagtgtcttaagctccaggtggcttttgggtattgaatcggccaggacagacagatagagaacatgtccattgtttgtcgtggtctcatttggaccagctcatccatctagactttttctaatcaaagtgaaacccatggacttcagaattaatgtgtttcaggagcttagtgaaagtgcagatttttactctgagtcgaaatctggattctagcaagctctgtggtaatcccagcaagcataagggttggagaatttctcttgcaagtgggtccacatatgcaaatcgtctaatctcataaccactagtgggtagcttctttcattatatccattttacggatgcgggggaattgagacttgaggggttgagtttcccccaggacttctgtgctatttggctgggactcaggctaggtctaaatccaaagcctgcatgtacaccatcgactcggtagaggtgtatcagaaggtcgaagccacagcctggtgggctcccttttggttcctcattcctttgactcttggctctctccttgcagaggagggcattggcgcggggacagagcttcggagtccctgcgaatgcgaaagcctcgtggagttccagggccgcacgctgggggcgctcgagagcctgacgcagaaccatatccttttgggctggaggtgcgggttgcagggcgggtgaagggatctctgagaccacatcttccttaaccgctcactggctcggctgacagagcgcctggaggagctggagaaccagctggctagccgaaagtgagggtcgcacgctgtctgagcagccacgcgagaccgaggccgagccccgcagcctggaccgtccaggagggggcgctggcgggccccacgcgctgccttcgagctggcctcacctggaccaggagccagatttaggggatggggatgaggggatggggaggtgctggtggggaaggactgctacactcgccgcgagctttgttggatttctttttttgttttccttttctaaaaaaaaaaaaaaatttggttttcacggggtcggtttgtggctattgctatgctggcagagggaggggagttcagacgagcgtgctcataggcgcccgggtggcgtcctcttggagaaaggcgcattgtgcagtactggggctggggggcagggggccgctgcttcccgtctcttgtttattcagccccagaacagatggcccgttatgtaggacgtggggagggaggggatgccccgagaacctttgggtccgaggaagtctgagtcccccatcttctagcacgtcgttttcttgctgttcctgtcttctggagccaaaaaatgtggctcaaaggccgcttgggacctggctggggatgtgagaaactctgttgagcccctgaccagaaagagtgggggatgcgggatgtgctccacctggattgtatcatctgcctctgacacttggtggcatccctgagcctgtggctctcttctgccactccttcaagaagcaaagctgagctgcatgcacacaaccctctctaccagcaaggaacacgaacttcccgggtacacacggcaaactaaagcttaaaatacgttgggttccagaatgggcgtcaggtaaattcccccgggtttgttttgccgttgttaaagctgggacaagggttaactggtacaagcaggactgtggctagaggaatgtatgctaaggtacctgactttgtgcccgacatgtattttaggtcctttgttaatgatagttagcaattattcttatagaaatatgtcttggacctggtttgaagcgatttcctaatattgccattgtatccgttttttatccagacaacctcgtgagataattaggatcttagaaggcaagatggctcagctggcaagcacatttacacattaagatttacaatctgctttcaaacatcagggtcctcatggtaaaagagagaactcctcctgtaggatgctctctgacttccacctgccacctgttcctacttcatcagaatggtcagaaacggggcgtggtcagaacggggtgaaagggaggggcctggactcgataccaggtgacagaaggctggataccttagagggaggggaagggtatgactgacctgagcctcgtgttctctaaagccacattccagaagggccggaggagagaggggagtggagggcagttgcttgtgaatcaaggaataaccacgatgatgaaaatggtcctaataatgtaaaaataaatgctaaagataattattgccttcatcatttccattttagacaagaggaaatggagtcatgtagtttcccaaaacggcacgtctagtcagaggctggactgacatgctatatttctgattgctgctgtaacaaacgagagcttcgaaggcaaaatcagttccctgtctcacagttcccggagtcagaagtccaagatgggttggcagggttgcattctttctggagaaatctgctttcctttgtagcttctagaggcctcccaagtcccttggctcatggtctcactgccctctgatcttaacacctctctctctctctgtgtgattctctctttctctgtgattatattgttatgactttgacaatcacagacatgcttctacttcagaaaaactcccagaagtctcctttgtcatgtagagtcatagatttattcataggttcccatgattcaggcatggaagttgttgagcggaacagggccgaggctaggctggctgatgtctgtactgctaaggctggatagggagtgaggtccacctgtgtacaactgtatagaaaaggggaatgtctgatgaaggatagtgcaggcaagaaaaaaaaaagggggtggtggtggtggggagctttgagcaaaaccttaaatgatatggcaatactttctgtgattggtcatgtgggtcaggagcggctgggaacaggagctgagatgatcaggaccttacttagatatcatgatcagataaagtaagcaggccggggtagtggctggcatgagagctcaccttgcccaatccctcaagtttaaagttaaggaaagtccttcctaggggccacaggttcttgtctgagagcacaccgtgagtaagcagaggggccagatagaagacttgcgtggatgcgggactgcaatagggcacttcctgttggggaactgtgagggctggtggaagctagagcatccatctttcctggatgcaaccaacacctacctgcttcctgtccctaccatttctttacgtctgcattctcccttgtggccacaggatggcgccggaagctctgctttagacctgtatctcagcaccctagcaggtgcccccctgccccctggagcttgggctaatgatggtccttccttttaacaccaagggttttgaactgcaaagaggtccgtgggccagggaggaagtctcgggtaactaagatggaagacatccttcacacttggtccatttccccgaatcaagcacactttctcagggttggatcttaccattttattttggactggagggcaccatcgattcaacctctgttaacttgcgggtctgatggtaaatgttcccctttcctgcgagcatttaaagtttatgaggagccaacagggaagagagagggagagagcaatggttgatgcgaagagaacacatggaagggctttagacaggttttagacagccaagggggtaggagcgttgtgtgaccacgtgattctcaaggcaacactgtgaggggtttggagcatagatcctttcactatcagaggaagccactggtgagagaggggaagacagatgtcccaaatcactcaccaagctcgtaatgtcctggccccttcctaactcatcagaatggtcagaaatggggcgtggccagaacgggacgaaagggaggggcctggactcaataccaggtgacagaaggctgtataccttagaggagaggaggggaagggtttgattgacaggagcctcgtgttctctaaagccacattccagaagggcaggaagagagagggagtggaggacagttggtgtgtgaatcaaagaatagccacgatgatgaaaatggtcctaatagtcaccgtgactggcgtttatggtgattcacaaggaagtttcccatcactttgcagctcagcagagccacgtgccacccaagggggattacagggcagtgcggtggctgctattttactgaagggagacacgggctacagaggggagggtgcctcgttcaagattatacgtccaattactgccagcgctgggctggacagagacctcctggctcccagccacacatgggctgccccacatgggctccagctgtggccagccagaaagaatggggcctttgtcagagctgaggatcaggcacaagcctcccgnnnnnnnnnnnnnnnnnnnnaaacttttcagtcctcctgctcaaagaaaaggagccccttctttgtgagtaatgtccactgagttcctactgtgtgccgggcttctgccaggcacttttatcttttttttttttttttttttaagatttatttattacatgtaagtacactgtagctgtcttcagacacaccagaagagggcatcagatctcgttacagatggttgtgagccaccatgtggttgctgggatttgaactctggaccttcagaagagcagtccggtgctcttacccactgagccatctcaccagcccccccaggcacttttatctttgtggtctctaccacaccttcacccttttgtgatggattttattttctctgttaccttcctatcccgcgttcaaaatggattgtgattcagggtggatatttctttccagatttcattagtgtcttgtgactttcaaggaaggtcatggcaggatggtggtagtgactatccctggaattttgctgtctttaaccagacattcttatattaaaaaaaagaaaactaacaataaaaatcctactatgcagaatatgcttgtgttgctcttgatgagcctgcgtctgggcccagggtgtccttgccaagcaaaatagaatccctactgtgttccatccttctgtcctgcttacgcattatctcatatgtgggaaatgcacagtggattagagagtagagaggaaaggacagagaataaacaaataccacctttaaaatatccgaggtgagttcaatgccaatactgatagataaaaactagagcaagaccctagttacattctctggtagacgccagccacaagcctcctcttccaggaagtgtcccatctgtcccgaaggacctggttgtctcctggagaagaggactcatgggtccttggatctctctggtgtctgatggtctatgtacccattgaactttcttatgctctgcagcttagagaggggtggcctccagaccccagaaataaaacctataattaaccaggaatactgtctgcatctctatagttcaaagataaatagtgctatctcaagcttcataattccaatcattggaggacattttataagactttggtacacttccatattactctctaggagtacagctgtattttttcccaacttgggttttaagtaatttcaaggaggacatgtttctcatagcaagaacaaagttttaaggccaggtctacacgagcttgagttacttctctgccactttttttttttttttttagctgtatgatgttaggggaaaaaaaggtctctcttaaccctttgaactttaacttctctgtgagataatgacagcacatccccaattgcaaatcccaagcctgagtgcagggattcaacgtgagcatgcacaagaggcacggttcacaggacgtcagtaattacagggatgacagcaaacagtcatttgcgtgcttgctgtgtgccaggccctagacatccatcattgtcgttaatctcagaattggctcacagagtagatgttgtaacgctccccattgcacatccgggaaggggcaaaattagcaccgagctcatcccttggtgctgtgcctgtgaatggcagcagggtagaaaagaggccaggaacttgaggggtctctctctgtgtctctgtatctctttgtctctgtgtctgtctctctctgtctctttgtgtctgtgtctctctgtgtctgtctctgtctctctccctctctccctgacaaggttttgctcaggctccattggagcttgctctccttttgcctctgtatcctgagcactgggattacagccaagtatacaccactctccccagccttggagagccttacagagagatttcctgagacccgggaaagagtcaagaaagcatgaccagctctagcttgtaaactgggacaaaggaggaagctggacagacctctgcttctgagataaactagaaggtgtgcatcttgtgggtgtaggagaccacggaggcaggggagagcacagcaaggaagctttgttcccccaccccaccccccgactccatcccaatcccaaagacagggcttctctgtataactccagctatcccagagctcactctgtagacgaggctgaacttgaattcacagagatctgcctgtcccagtgctgggactgaaggcatggaccactatggtgctcttatgaggaagagtatagggaataggagttaggtggcaaagaactagttcagtgggttggagactaaagcgatggcagtcatgcacctgggaaggactgtaggccaagctgtgctagatcgtcatattaagaaatggatgtgaaagcagaaccttctcccctccatcttgggaatcatttaattgaggaaattacaggtgcttcaaattcagtttcacagtcacatctaagggtagcacaagccaggtttcccagtggattacacagggcatctgaaagtaaatgagtcaaaggacatcaaggtttttggtctgattgactcaggatgatgtcatcgtcagagacaggaaaaggtaaggcagcccagggattcagtattagagctattaaacgggagacgtgtaggaagcactcatgttgagaaatcagaagtcagttggatttgtgagctggaagtcaggagagagactggggaaacaagccatcagtgtgtagctgatacagaggctgcacagtggatgagatcagatgggaagcaaatgtgtggatccagaagaaccaaacctatgcttgccctcctggctgccctggatgcagagactggggcggagaggagcaattagcgggaaaatctgaggagcatctggagactggagaggaaggggtcaaaccatgacgttatggtgtcctagaaacaactgtgaaggaaactggtgaaggaagactgggggactagcgacagtaactgagcatggcgtttagcaacccaaaagtcagtagtgacttggcagggacacaatggagggatgtgaagttggtcatcctaggaggcataaaagagagaggatgggaggaaaagaattagagattttatacacacacacacacatatgtatttgtgtgtaaatatataagacattgttatatatattatatacattatagacagattatatatgatatataatatatgtattttatatagggaaggtatatacaacatagagatttttatgatatatattatatgtaatatatgcatagttatatgatatattatatgtaatatatggagagattatatataatatatatgctaaataccatatatatattatagagagagaatttcttttttgttaatcaagacatagtctcaatatatagctctgcttggcccagaactcttttgtagattttggcttaaagatatccacctatctctgccaactgaatgctgggattaatcaccaggttcggtgagtatgggtggagttttttttttaaataattgtgtatttgttgagcttatagtataattgcatcatctcccattatccttttctcatgccaaaacctttcctatatccattttctgcaaataagcaataccctacctgtccttggctcggaagtttaactgtagagataaacttaacaaatgtgttagggaggtgaagagatggctgttcttccagaagcccagagttcagttcccagcgcccacaagggggctcacagccagcggggactcctgtcccagcagatgtgatgtgatgctctctgctggccacctccagtactgcatgactatggtacacagacatacgtgtagacaaaacactcacagtcaatatttttgttaaagaatagttttaaatctatagaacgccttgagagctgtggaggcagcatgcggtcttcatcctctgagtgtctctctcaacgcagatgcacctgtggatgaattgttagagctccagagtattttttttttaacatttcctcgttttcccccaatattatatgagtctatccaggacttattcctgtgtctccttagactcttccagaatgtttccatgaccttccttttcttcctgatagccttggtcacttaaaatttacatttatttatttatttatttatttatttatttatttatttattgtgtgtgtctgtgggggtacatgtattctagggtgcacaagtagaggtcagaggacagtttgtgggaatccattctctctttcatttccactgtgtgagctccagggcttaaactcaggttatcaagtttgtttgtttgtttgtttgtttgtttgtttgtttgagacagggtttctctgtgtagccctggctgtcctggaactcactctgtagaccaggctggcctcgaactcagaaatccgcctgcctctgcctcccaagtgctgggattaaaagtgtgtgctaccatgctgggttatgtcatcaagtcttgttggcaagtgtcttcatccacggagctatctctctggcctgactttgataattttggagagtgtaagttaggtgctttctaggttatttgttaactggggtccacataatgtttttcatggttaaaaatgggatataaatttttgcgaggtagaccaggggcggtgaatgcactattacaagaggtagcttgaaaactttgtgctaggtggtactggggctaaaggacaagtgttaggagaagtttgagaccccgtacaacactctagtcacactaactctacctgaggggcatccaagtgatgtggaagagcactgatctccacaaaccaaggaaggaaagggaagaagaggtaaacctgggcttcgatgggcttcctcttagagcagtgtccagcctttgctgacaccggctctgggtacaggggtgagtcttcaactttttctgttttccactttgttcttattggcctcttgaggtgtttattatattccaggaaccaaggtcaccaacggaacagagagaacacaacacttacgcaggggtgtgcagtttcaaagcagtgagatcaagccggggtagtctgtcttcacagaagatcagcgtgcctcagagtgtccattgtggtctccgatctgcagatgtattaaagggaggtgggaaaaggggaagggacttgtttggggacacaactggcaagtgacaaagtaagacctagacttgaggcaagtgtaaatcaagcttagagtccttgccaccactggaaagatgctcaagtctgccatacatatttactagtgtgtgctagggagtatctacttggtgagtgttctcagccctcaggtatgaggcctggagtctgttctctgtccttcctgctattaatgcacacagacaaaccagttagtcactgagaacgacactaagtccctttctgacatacggatgagagtgagcttattactgtatttttcttggaaaatggtttttccataagcattaagaaacttacatcttgggctagagcgatggctcagtggttaagaacactgactgctctttcagaggttccaagttcaattcccagcaaccacatggtggctcacaaccatctgcgatgggatccaagtccctcttctggtgtgtttgaagacagctatagtgtactcatgtacacaaaataaatagataaattaagaaaagagaaagaaacttacatctcagccaggcagtggtggtgcacgcctttaatcccagcacttgggaggcagaggcaggtggatctctgtgagtttgaggtcagcctggtctacagagtgagtgccaggatagccaaggctacacagagaaatcctgttttgaaataacaaaaccaaaagagaaaaacaaaacagaaaagtaagaaaaaaatctttacatttttcatttctgaacacatctactctgggaactatgggctaatgaataaatataaaacagaggagatgtttgtattttaacaatatatgaagaacagctacaagtcaatcatgtgaagataaaacagacacacagctcaagactaactaaggactatataggaagggcctatacaggaggagaaaatatcattgatcatcagaaaacacaaattcaatccacaataagatatcgcttcatgcccactggagagtttaagatgtaactctgtgaagtgtccatacgactgtggaaaacatttcctttttatgcagttatggggataaaatccagggcctcacacatgtgtggcaagcacactgagccctgcaagtgggccctgatcctcctgcctcagcctctccagagctgggattaccagtgtgtgccaccatgtctagttcctggaactcttgcacacagctaacgatacactaggatcaccattctttgcatatgttgcagagtagtacagttactttggaaaacatttggtagtttacaataaaggttaaatatgtgcccactctctggccagcaattcatttcaggtgtgtatgttcaaggacgtacatcgacttttattaaacctgaactcagaatattcgaggcaggaaaaatcca

SEQ ID NO: 1337 - DNA, 2193 bp, Mus musculus
ggcccgtcgctctgtagccgcacctctgagctgtccggcaggctcagctgcaggctgtgacactgtggttcgtcatccttccaagcaccatgagaggcccctgctgctggccactctctctgttgctgctcttcctgcagtcctgggaaactcagctccagtctgcaggtcctaggtgctataatgggcccctggatttggtgttcatgattgatagctcccgcagcgtgcgccccttcgagtttgagaccatgaggcagttcctagtgggcctcctccgcagcctggacgtgggtctgaacgccacgcgcgttggggtgatccagtattctagtcaagtgcaaagcgtctttcccctgggcgccttttcgcgccgcgaggacatggaacgagccatccgcgcggtggtgccgctggcgcagggcaccatgaccgggctggcgatccagtacgctatgaacgtggccttcagcgaggccgaaggcgcgcgcccatcggaggagcgagtgccgcgcgtcttggtcatcgtgacagacgggcgacctcaagaccgagtggccgaagtggccgctcaggcgcgcgcccgcggcattgagatctatgcggtaggggtacagcgagctgacgtgggctctcttcgcaccatggcttcgccgccgctggatcagcatgtcttcttagtggagtccttcgatctcatccaggagtttggcctgcagttccagggccgcctgtgcgggaaggacctgtgtgctgagttggttcatggctgccaacacctgtgtgtcaacgccccaggaacattctactgcgcctgcaactctggctacaagctagcaccagataacaagaattgtttggccttggatctctgcgctgaaggaacccatggctgtgaacacctctgtgtcaactccgtggactcgtatttctgtcgttgccgagctggctttgcgctccagcaggaccagaggagctgcagagccattgactactgcagctttggaaaccacagctgccagcatgagtgtgtgagcactttggcggggccacagtgtcgctgcagagagggccacgacctgctacctgatgggagaagctgtcgggtcagggacttctgcaatggtgtggaccatggctgtgagttccagtgtgtgagtgagggtctttccttccactgcctgtgccctgaggggaggcgacttcaggctgatggcaagagctgtgaccggtgccgggagggccacgtggatcttgttctcctggtggatggttccaagagcgtgcgcccacagaacttcgagctggtgaagcgcttcgtgaaccagattgtggatttccttgacgtgtctcccgagggcacacgtgttgggctggtgcagttctccagccgggtgcgcaccgagttccccctgggccgctatggcaccgcagctgaggtgaagcaggcagttttggccgtggagtacatggagcgcggcaccatgacagggctggccctgcgtcacatggtggagcacagcttctctgaggcgcagggcgcgcggcctcgcgacctcaacgtgcctcgcgtgggcttggtgttcactgatggccgctctcaggatgacatttcagtgtgggcagctcgtgccaaagaggaaggcatcgtcatgtatgccgtgggcgtgggtaaggctgtggaggaagagctgcgtgagatcgcatcggaaccatcggagttgcacgtgtcctattctccggactttagcaccatgacgcacctgctggagaatctcaaaggcagcatttgcccagaggagggcattggcgcggggacagagcttcggagtccctgcgaatgcgaaagcctcgtggagttccagggccgcacgctgggggcgctcgagagcctgacgcagaacctggctcggctgacagagcgcctggaggagctggagaaccagctggctagccgaaagtgagggtcgcacgctgtctgagcagccacgcgagaccgaggccgagccccgcagcctggaccgtccaggagggggcgctggcgggccccacgcgctgccttcgagctggcctcacctggaccaggagccagatttaggggatggggatgaggggatggggaggtgctggtggggaaggactgctacactcgccgcgagctttgttggatttctttttttgttttccttttct

SEQ ID NO: 1338 - DNA, 1875 bp, Mus musculus
atgagaggcccctgctgctggccactctctctgttgctgctcttcctgcagtcctgggaaactcagctccagtctgcaggtcctaggtgctataatgggcccctggatttggtgttcatgattgatagctcccgcagcgtgcgccccttcgagtttgagaccatgaggcagttcctagtgggcctcctccgcagcctggacgtgggtctgaacgccacgcgcgttggggtgatccagtattctagtcaagtgcaaagcgtctttcccctgggcgccttttcgcgccgcgaggacatggaacgagccatccgcgcggtggtgccgctggcgcagggcaccatgaccgggctggcgatccagtacgctatgaacgtggccttcagcgaggccgaaggcgcgcgcccatcggaggagcgagtgccgcgcgtcttggtcatcgtgacagacgggcgacctcaagaccgagtggccgaagtggccgctcaggcgcgcgcccgcggcattgagatctatgcggtaggggtacagcgagctgacgtgggctctcttcgcaccatggcttcgccgccgctggatcagcatgtcttcttagtggagtccttcgatctcatccaggagtttggcctgcagttccagggccgcctgtgcgggaaggacctgtgtgctgagttggttcatggctgccaacacctgtgtgtcaacgccccaggaacattctactgcgcctgcaactctggctacaagctagcaccagataacaagaattgtttggccttggatctctgcgctgaaggaacccatggctgtgaacacctctgtgtcaactccgtggactcgtatttctgtcgttgccgagctggctttgcgctccagcaggaccagaggagctgcagagccattgactactgcagctttggaaaccacagctgccagcatgagtgtgtgagcactttggcggggccacagtgtcgctgcagagagggccacgacctgctacctgatgggagaagctgtcgggtcagggacttctgcaatggtgtggaccatggctgtgagttccagtgtgtgagtgagggtctttccttccactgcctgtgccctgaggggaggcgacttcaggctgatggcaagagctgtgaccggtgccgggagggccacgtggatcttgttctcctggtggatggttccaagagcgtgcgcccacagaacttcgagctggtgaagcgcttcgtgaaccagattgtggatttccttgacgtgtctcccgagggcacacgtgttgggctggtgcagttctccagccgggtgcgcaccgagttccccctgggccgctatggcaccgcagctgaggtgaagcaggcagttttggccgtggagtacatggagcgcggcaccatgacagggctggccctgcgtcacatggtggagcacagcttctctgaggcgcagggcgcgcggcctcgcgacctcaacgtgcctcgcgtgggcttggtgttcactgatggccgctctcaggatgacatttcagtgtgggcagctcgtgccaaagaggaaggcatcgtcatgtatgccgtgggcgtgggtaaggctgtggaggaagagctgcgtgagatcgcatcggaaccatcggagttgcacgtgtcctattctccggactttagcaccatgacgcacctgctggagaatctcaaaggcagcatttgcccagaggagggcattggcgcggggacagagcttcggagtccctgcgaatgcgaaagcctcgtggagttccagggccgcacgctgggggcgctcgagagcctgacgcagaacctggctcggctgacagagcgcctggaggagctggagaaccagctggctagccgaaagtga

SEQ ID NO: 1339 - DNA, 32055 bp, Homo sapiens
atttttagtagagacagggtttcaccatgttggccaggctggtctcaaactcctggcctcgtgatcctcctgcctcagcctcccaaagtattgtgactacaggcatgagccattggcccggcctgggatagctgatttctaagggtcttttttcttgggattccagaatttttttttttttaacattgtgcaattctatgctctaataatctacaattttaatattctttgggaaggaatattcttggggaaggaataatacttgctattttccacatattataattctatctcgtaacattctatgataatattcttttgggagtactactgcttaacgataattattattttccacattctataattttccacattctgtgtctttatctgtgcttcgaatagtctttgctcattaattctctgctctctattacctatcatgatttttatttacatcctacaattttatatcccaatttatttacttactttttttgagatggagtcttgctcttgtcacccaggctggagtgcaatggtgtgatcctggctcactgcaacctccacctctcaggttcaagcaattctcctgcctcagcctcctgagtagctgagattacaggcgcccactgccatgcccagctaatttttgtatttttagtagagatgggatttcaccatgttggccagtctagtctcgaactcctgacctcaggtgttctgcccacctcagcctcgcaaagtgctgggattacaggcatgagccaccgcacctggctatatcccaatattttatgactctaaaattctttgggaaggaatattgcttcatactattacttattactatttttctacatcctatgattctgtcctgggagtctatgattttaatgttccatgggaggctgctcaggaagtagcaaccatggtgagggtgatgatcttacattctgtggttctctgcattctccctttccaggacacttggtgctggtattctctgcttcttacctgaaattgcaccaccttctctgtggcaaggcataagtaggtgccaccccctcctgggggactgcctggaaactggaatgcacacttgtgcagctgggagatgggctcatccacatcaaggagcgcacactgttttgctactttacggatgatctgcaatggaaggatggtaagaacagtggtggcaaggagcccgggcgtccagaggctgccctcctagccggctgtctgctactccaatagccacacaggcactagcagattccccctgccctttgacttctgtctggtcctacgcgacactgggtgagaacaggtgtctccatgccttggggcctcactctccagccctgcccgtgtgtgccacattctctgcatggatctgaggggacccctccaggcatgccctcccttcctataccatgggaggtagtgtgatgccggtgaccgtgcagacgagctgcaccagggagccatagcgaacgtagccctctcgcggtgggaagtctccttgggcagagtgcccatcagctgggggacaaaaaaagcaagggacaaggttttcagcggcccccaagcttctgccttaaaccctgccttgttgcctctggctcttcctcacatcacacatgggccctgcgggaaagcttggtactcaggggagccaactgaaggttctaattctggagaggccatttgaggccatcctcacaaatgtctgccctgggggcaggggttgggggcaggcagcttagttgatatatggggaaagggcatggataagggagtcagaatagcttggaacagtcaccagctcactgggactgtagtcaagtatttttgtgtttctgagccttaatcacatggggcagagtttaccttccttaaggagttgtggtggaggttaaataagctaatgcatgtgaagtgcccagctccagggcctgcagatgtcattacccaggtggagcgtgaaggcagcccactgtcgtgcactggccacaaaggccccatcctccacagagaggtagcgtgtggagaccgtctgagagcgcaggcggttgaagagggagacctttgagccggaggatatgcacactgtgagggtgagggtcagggttagggtgagggtgagggtcagggttagggtgaggggatagggttagggttaggattggggttagggttagggtgagggttagggtgagggtgagggttaggattagggtgagggttagagtgagggtgagggtaaggattaggattagggtgagggttagggtgagggagggggtcagggtgagggttaaggttagttggtgctatcagtgccctgtcctggcttggttccttggactttccagacagtttccaatcttctgtccctgtgccggcctggctaatgtgcccacaggcctagatacactgggcattcccagttcacagctgtttttccaggacctgctgcagtcctgctttggaacctttgcctgttcctttgctgtctggacatctttcagttcaacaaacaaaagtaaaacttttttttttttttttgagatagcatctcaccctgtcacccaggctggactgccgtggtgctatcacagctcactgcagcctcgacctcttgggttcaagtgatcttctgatctcagcctcccacgtagctgggacaacaagtgcaggccaccatgccaggctaatttttctttttctttttttttttttttttttggtagagacaagatttcgccatgttgccctagctagtcttgaacttctgggatcaactgatccgcccaccttggcctcccaaattgttgggattacaggcatgagccaccgtgccccacctatgtcacttttagtctgtccctagttcaactcctgcctagttcaacttttgtctgctctgggaccccaactcccaacctggaatttggtatctgtccctttcctctctgcttttcatccttcaactcttctcatccccaggcctgggccgcacccactcatccagactccttcccctctcggctccgactccaccttttccactctgacccctaagcccagcctacccccacctccgcgccccagtttagccgttctgggcttggttgcacctccccgcccgggccgggggtcaggccccgccctgctcacgatcggtgtttttcagcgactgcttcttctgcgagggcttcgagatgaccttgataaggcggctgtggaaggtacccagctcccggcccccgcgcagcaccagccgcagcaccagccgaaagtgcttcctcttgtctgcatctgagatgtacagggtcttggcgcagccgaattcctagggggctcacaggtacagggccatctcatcccagccctcccccgtcggatgaaccaacctctcccagatatcggacgtccgccccgtcggaggtgaccagaagctccaccatccaggctctcaggctcggccttaaggcaggaccccggcctcccggtctccccacctatctcttggctttcggaggggagtaaaggagccctcctttcccaggagaggcagggatgggagcaggaatcggaccccttcccgtgcgctctcaccctggagtccggctgctgctcgaaattcagcttctgcgtctcagtggcgctgccggacgcgctgtccagtcccatgtaaccgcagaccgtgggccccgtttcccccgcctggtgagctggaaagggacgcgaactggctctgcaaggactcgggaggacgcaggtgccaggcaagcttagcgctcgccgccagagggcgcggggagactgcgcctgcgaaccgccccgtctcgggcccaatctcgtggtcctccctacagagcaggcggccggcagcccttgattccgccctcaccttgatcctgccctggcttcaccctccagccaggccccgagaggtagacacagggcggggggcagaagaacctgcggagataagtgagtgttggagtcgtgcatccatctccacttggctctcctgtaagcacggcaaggtagtagcataaacccagcagaaccttcgtttcctcctcccgctccccccaacgctttttcacgactgtaaaccccattcatagccaaaccttattgtttttacacccctcattcaactcatcagaaggtcctgtccactccaccttcaaaatataatatatccagaatccactggcttcttaccacctcgcccttcatcccagccgccattactttttgcctggaccacagcatcagccttcaaactggtctatttccagaaagttctgtttctatctccttcccatttcgcacagcagccagagtgctccttccttccttccttcctctctctttctttctttttttctttcattccttccttcctgtttctttctttttctttttctttttttttttttttgaggcagggtcttgctctgttgcccaggctggaatgcagtaacttgatctcggctgtctgggctcactgcaacttctgcctccccaactgatcctcccacctcggcctcctgagtaggtgagactacagacacaagccaccacacccatctaatttttgtgttttttgtacagacatggttttgtcatgttgcccatgcaggtctggaacttctgggctcaagcaatctgcccacctgggtctgccgaagtgctgggattacagggatgagccaccaggctggccagagtgttttgttaaaaacatgagtcacatcatgttaactccttaaaatcctccactggtttaaaattcaaagtcctcctgagatctgacccctgcttacctctctgacttgtttcctacaactcctccctctgatttcagccactgtcatttcttttgtacctcaaacaggcctaattggtacagcctcaaggtcttcccattttctgttgccctttttttttttgagactgagtcttgctctgtcgccaggctggagtgcagtggcatgatctcggctcactgcaacctccgcctcccgggttcaaccaattatcctgcctcagcctcctgagcagctgggattacaggtgcccgccaccatgcccagctaattttgtattttttggtagagagggggtttcactgtattggccaggctggtctcgaactcctgacctcaggtgatccgcccgcctcggcctcccaaagtgctgggattacaggtgtgagccatcgcgcccggcccttctgttccttctaattgtagcacgctttccccagatattctcctgtctggctccatttcagcattcaagtttcagttccaatgttacctcccaaaaggtctctcaacctccttgacctttctagctaatgtcccccctgccttcagtttccgtcaaatggcctcgttcagttttccttctagtgctcatcataatctgcaagtatcttgtttcctgacttgtggggagtttactgtctgtctcttccacacttgagtgagagtgtgggctacagagcaggggctgtttctgtcttgttcagctgtatgcccagtgcccagcagtacccacagagcctggtgcatacatgacaaacactcagtaagtagttgttgaatgaatgaataagtgaatcaatgggagaatgagtgaatgaatggagacaggagattcacagggaatctcctgctgtagaactatagaccaaagtgggggctaatggtggctgagggtcaaggccctggtcgaccaatagctgagatctcagccctgaggcctgctctgcgtctaaaagaggcccaatgggtggatggaggaggtgcatagggctgacagttgcagagacctgggaggggctgcggaggcacctaccgcttctcatttccgtatgatttctgggccaccttggcatgcaggatccgcacagtctgttcacactgttgctgcaggcacctgcgcacgcctcccctcagaatggtggtgtgctctggggatgacctgggagtagggcaggcaggtcgaccagccacaggagggagaagggtcaaggtggcacagggtccaagcactcaggttgagtaaaatgaagtgagcagggggttagagtgagtgggagggtggggctgctctatatcctgcccctgtggggtcaggaagaggaagcattaggtaaggaggagacttggctgcaaattgtaggctaaatatttaggctgcaaggtgctcaacgaagcctgcatggaacccatgggaccacccaggttccactctgtgggtctggcatcatgcccattggagcccagggccatagggacacgtggctgtgacacaaaggctgcacttatactggccttgggatggagaagagtattttagggctgatggaattggtagagatgaagcttccccaccctggggaaggcagggtggggggtgaggagggaggggaagggagagcctttcctgggctcctggcctggagcgctctctagcctcctgcctgcaaacagaaaagggcccaaaaccttgtcctcaggatgggggatggcctgggggaatctgagcctttctggggccaaagccatattcttccctttctcccatgagaagtggcctgttgctgtgtgggctttcctacccttgattacaggagtcaaggcagatgacattggtcctgcagagtgagccaggttagagcctagaggtctggtggcttcttaacctgggggtcttgagcggtgtgggtgggtaggcccgagcaattgcagggagcaagtagaggaggggaggtgggagagatttggggggttagcaggttgaggcccaaggagagccatgaaaactgaggctgtccttctgagcccttattcctcttggcaggaccagagtctctcctcactcctggaggggacagcgcaagaccgcaccctcgaaagccaggccagacaggcagcagccacagccaggaccgctccaccccttggggctctcctcagggaagtgccttctaagcttccaatgaattccggctgtggagtgtggctgccccggtctccccagtctcccgctgtagctgacttccagcctggcccgcagctagccctgtctgcagctccaagcgtggtaggagcagggggtgctgggtttgccccccctcaggaggaaggggggatccctccctgccagtgggaggggttgcagcctgcacttcccctccccacccgccagccctgggttaaatgcggccgttgcctctgtgtgctccagctgcctggcagtccccacctagggcacgctgccacgccgccgttacctggtccaagtgcccgggaggctccgcctgtcggcttcgctctgcagctgcatctctgatctgtcctgcaggctcaggtgagtcaaaggattgggaggcactgaggggtctgcaggggagtaggcatcaagccaggtcaggcgagtgtattttagcagagacgctgcctagggtgccctatctgatttgcagtgcccttccccacttctgcagggtcctttccaaatcgagcccccaccctcaaagccatcaaaataggatcatcccttttctactctcatccctccaggaaccccctgaaatgtccctaagggacttttgagaatttatttacaggcctctcctcccttgctgctccactccctcaacctcacctcagggcatctctgaatctttctttttttaatgcaaggattaactcctcagaggaatcccaggttctagtatcagtcctgccacgacatcgccatgtacccttcagcaagacactaccctctctggacctagttcctttctttgtagaatgaggggtttggaaaggtgatgaactttgaggcatttgctattttgactttctaggattcctggggtggaggcagggtgccaggtgagaagttggctcagactaagaatgggatgaggggaaccttaaccaagatttaggggcccagaggcatctccgggtaggaaagtatgggaggtggcagaggccccttgtgccttagccctcatgctgcccagggatgttggctttgcctgtggcccaagcttgacaagggttccccgccctcccacttccaccagcgctgccacatcttgcttggtcaccctcccacgacgggccctgccagaggatttatgttcttctaccaggcctgggaggggaaaagggagaagaatccgggatgagaaggtcgcctggagtgagaagcaggcactggcctcgctcagaataggcgcattcacggaattggggggcgggggcggagctgctgttgggttaggggcagctggccctctctgccaagaaacagcaacagaaaaatggctaacacagcttcagcatggggcgcggcggtggggtaggagctggaaggaaatgaggtttagtgaattctaggcgccagggggcctcaagagagagaaggggaaccaggagccctaggttctaatcctgcttttgcagttcggcgggctgcctccttggggcttagttttcctatttgtatagtggggagggggtgggggggtggtccttcgtagttctcacggggcgtctccggggcctcgggagggtaagcgctcacctgctgcccctgcggggtccatggtggctccacggggccccagccgctcacccgccgccctctggacgagtccagtgctgctgtcgctggaaccctgcacacccctgctcctcggctcttgcgcgggttatatcctgtccaggccttatctccaaggccccgggccccggccccctgtttgctcggggtgggcgcacctgctgggcagatgtgggcttcccacgccccctgccatctcgggcgccccctggcggtcgctcctgagagcaggcgggaaacaggcgccaagccgcgcgttctcgtgcgcagtgggttttggtccactcgctgccacgccaccacgctcagccccgcaacagggcgcagcccctccctgccgcctgcggttgggcagtgcatgtctgtgtttgtgtgtgtggaggggtctgggggggttggcgagttgcaaagacagccacacagaagcctgtgtgcgtaggggagtgggccgaggtggggaagggcttctgtctgcagaggttcgcctggcaggaggagaggcaccaaacgcccaggctggctcacagaaactagcaggcgtgggattgtatcctgccgcagccactttttggccgaatgactttgggtaccagcgcttaacttttctgagcctcaatttcattgtctgtatgatgggggacaatcacagccttagtcttacaattgcagagaggattaaatgccacaatgcgtgaagagcatttaacactgtgcctgacatttaaggaagacctgtttttttctgtttaaattttgcatatttgtatctatgtatctattcttatttaccattctcttgtgggccgagcgcggtggctcacgcctgtaatcccagcattctgggaggccgaggtgggaggatcacctgaggtcaggagtttgagaccagcctgaccaacatggcaaaacccgctctctactaaaaatacaaaaaattagccaggtgtggtggcaggagcctgtaatcccagctactcgggaggctgaggccggagaatcgcttgaacctgggaggcagaggttgcagtgagccgagatcatgccactgcactccagccgggacgacagagcaagactctatctaaaaaaaaaaaaaaaaaaaaaaaaaaagaatctcttgtgtttcccagcaatcccactgtgatgagaattttttaattctgaaacatttcaaacatacacaaaaatagagagattagtaaaataaacctgtaactgtcttccccctccaagtgcctatcacccagaataagagctctgtaaatactgttgcttttctattttccttcctccctccaggctctgacacctccattctctgtccccaagcgccatgagaggccttctttgctggcccgtgttgctgctccttcttcagccctgggaaacccagctccagttgacaggtgaactggggcccagccctcaccagtgggaggaggggagcggaagcaggtcctccctctgcagccagctcctcctgctggggagagggaagcaagggctttggaacatatgggactgggtttaagttccccacttcacctttctgggcctcagtttcttcatctgtaggatgtggcttagttttgggcgcatgcagaactgcccatggggtgtttaatttggaaaaattatttgaaaacatggaaaaaaaccaggaaattttacataaaaatccctgtttagtatttctcttgaaaaaccagggatctgctgacatccaattcgcaggggcatggcctcatttggatgcagctacctgcccaatttaggagtgataggggctctttgggtctccagcgtcctaacccaaccagttcatccatgttccctgcctggtccctgcaggctttgagtttgcgacgcttccttgccccctcgtcaatgggtaataccgcctcagaatagccctcagatctgtaagatgagggaatttgtgaaatctcctagcccaggtgctaggcacatgccgggcgagtgcatctgtctaatctgcgtttgctgtgctgggcgctgttatgtcggcatagcggcatttcccctgggtttcctagggggtctcctcggaggtgaggctttgctgacctaggagagtcctccctgatctccccgcaggtcccaggtgtcacactgggcccctggatctggtgttcgtgattgacagctcccgcagcgtgcgccctttcgagttcgagaccatgcggcagttcctcatgggcctcctccgaggcctgaacgtgggtcccaacgccacgcgcgttggcgtgatccagtattcgagtcaagtgcagagcgtcttccctctccgcgcgttctctcgccgcgaggacatggagcgcgccatccgcgacctggtgcctctggcgcaaggcaccatgacgggactggcaatccagtacgccatgaacgtggccttcagtgtggccgagggcgcgcgaccgccagaggagcgcgtgccgcgtgtcgctgtcatcgtgacagacgggcggccccaggaccgcgtggccgaggtggcggcacaggcgcgcgcccgcggcattgaaatttacgcggtgggggtgcagcgcgcggacgtgggctccctgcgcgccatggcatcgcccccgctagacgagcacgtcttcctcgtagagtccttcgacctcatccaggagttcggcctgcagttccagagccggctgtgtggtgagttaggagggcgctggagtgaagctcgaactctcaatccaaatgcttggattcctttcccaccacagtaaatcccatcccgtgggggtggccccgcgatttccaggtagagttgccctgacctaccgcaggctgtgtcagatttcagctctgaccacttctgctcagcctccatcaacaaggagcaacctataatttcttgccctacccgccacagcttaccacaggcttaatgtcaaattccagcaccaaccccctgcacacacggaaccagtgattctcaaagctaagagggatcggctgctccaaagagtcgtggccctcccacatggggatgacttctcccattatcatcttagctcctcccacaaatgctgcaagatctgttctgatctgttttgagtttattccgcccacctcgacttagcacctctccaccttcctacccactcctgcccctgtgtagtcctgtcccagcccactgacgtgtctaattgagtgtctcctcttctgagcctactcacaggggctccttaagccttattctttccctaagccctctcacttggtacggcccttctcaaattagtcatttccttctgaaagccatttgagggtgatgcctgcctctgaccccatccccatccagctctctcttgttggaggcttctgcccatctgttccctactgattctagtcctgtgtgtcctcagggaaggaccagtgtgctgaggggggacatggttgccagcaccaatgtgtcaatgcctgggccatgttccactgcacctgcaacccaggctacaagctagcagcagataacaagagctgtttggatgacagctatccctgtcctgcaatctcactgctcctgaaccttctttggctctccattgccccaacatcagaccaatgagtctggaagggcctttggcagtaaaagcacacctccatcactttacaggcctaagaaagaaaggtattgcctggggtcacataagtccctggtgggagcccacagttcagtgtgctttctgccctctttctccctgttttcaggccagtctctaatcaacctcccaaacttgtttctgttttcttcttttcttttctctctcttttttttttttttttttttgagacagagtctggctctattgcccaagctggagtgcaatggtgcgatcttagctcactgcaacctccgcctcccgggttcaagtgattcttgtgtgtcagcctcccaagtagctgggattacaggtgctggccaccacacccagctattttttgtatttttagtggagatggggtttcaccatgttggctaggctggtctcgaactcctgacctcaagtgatctgcccgccttggcctcccaaagtgctgggattacaggcgtgagccactgcgcccggccatttctgtcttcttacaggcacatccttacggtttctcttcttagatactgttggggggtcttcaattaggtgggtgtcccccctcatgccacccattcttgactctgcacctcagctctttgtgtgctgctcacctgagctgcccttgccactcccctctgcctttgcaaatctttcaagactctctctttttaagagatagggccttgctatgttgcccaggctggtctcacactcctgggctcaagagatcctcccgccttggcctctcaaagtgctgggattacaggtgtgagctgcttcttcatttttgtcttctgaaaagctatggcatagaataccttgcttattcaattcagttttttactgagtaccaagttagtattagacattgtgctaggagcattacacatgttattatctctcagcctcacaacaacctggaaaaagaaatcatgtaatcccaataacccagatgtcagctggggtcttcttgtttctagaaactaaaagttggcttgaactctgatttgatgactgtttaacattcaaatctctctccaagacctctggaaatcccccaagtgcttatcttctggttgtcacctcttgctgtgagcctctgctaaattcatttgatttatggatcctctctcatttctcaaccctgcacatgctgttcttgttccatgcatgttaatcaacctcttcgttggtttacacacttgtgtatgcaggggcatacacaagcgtgtatgtgctaagtaactcatagcgcgtgcacacacacacgaaaaactcattataattgaatattagacagctttgtttctgaaagtcctcagtcagcctagtacaagggatttttcacaggcagcctcaacccacagagttactcatcttcatactggctctcttgttcttttttttttttttctttcctctctccactctcatctcctttccaggaaccccaaatactcacttttttatacagggtaattatcttctctccagtccagctctcggccatctttgcctatccagatcatcaagatgctcaacagggcaatagttccccatcttccatggaaggaagctgtgaatagcaatcactgtcttccattatattcccattttgcaaatagaaaaatggaggctcaaataggtaaagtggccaaacctgtcctctgtaagtcagagagcatcttgaggacaggggccctgactaattaggtcaggatttttggggttggggcccaggcgtaggtattctttaaaatttccttaggtggttgtgctaccagagctgagaagggcagtcctgggcatagactgaccccatttcttcctcagccattgatctgtgtgctgaagggacccatggatgtgagcaccactgcgtcaattccccaggctcctatttctgtcactgccaagttggctttgtactccagcaggaccagaggagctgcaggggtgagcaacacccccaccctcccaccacaccctggactgtggcctccgagggctccaatcagaggcaacatcttgctgtttcttccctcctgccagccattgactactgcagctttgggaaccatagctgtcagcatgagtgtgttagcacccctggtgggccacggtgccactgcagagagggccatgacttgcagcctgatgggaggagctgtcagggtgaggagggctctcctacatttgtgggaggggtaagagatcttagctggtggggtccatcctgactcatcctgacctgtctctcctttcagtccgggacctttgcaatggcgtggaccatggctgtgagttccagtgtgtgagcgagggcctctcctaccgctgcctgtgccccgaggggcggcaacttcaggcagatggcaagagctgcaaccgtgagtgatgggcgggagggtgttctgttggcttctgccccattgcccacattcggagtgtccttgactttgccattgctgtggcccctaggctgtggtgtgaatgtctgtgtgtgttgtgggggtgacattggagggtgtgccattccctccttccatctctttcctacaatcctctactctgctgtcaatgttaatttaaaaatacatatttgatcacattcctcctttgtgcacaagccttctgtggctcaccaatgactacaggagaaagatcaaatgacttacccctaagtatttcaaatggtgagcagaaccacattaatgaataatgaaatcaaattactgggttacaaccaacattaaaaaaaaaagagtggaagacaatatagagtttactgcctgtagaaagagttatattatttctgaaattttagttctgtgtgaaatgtctcatgatgtattgtcattattattatttttactgtgggctgtgataaaaattttgaaaccactgccttaggtcatcacgatctagcttcagccaactccatctgcccatctcctgccacacttgaacatttcagtcttactggcctgcccctccccggatgtgtcaggatctccccagatcccaagcctctgcacgtgctgcatctcaccttctagactgtcccttactgccttggcaaactcctactgatctttcaagactgtcttagatcattcaggctgctatatcaaagtactgtagactagacatttagttttcacaattctggaggctgaggagtccaagaccaaggtgccagcagatatggtgtctaatgaaggcctgttttctgattcttagatggcacacctttcaaagcctccccacgccaacacacacacacacacacacacacacacaccaattttcttgctgtgtcctcacatggtgaagacaggaagcaagccctcttcgactcttttttttttttttttttttttgagactaagtctccctctgtttctcgggctggagtgcagtggcgcgatgtcggctcactgcaacctctgcctctggggctcaactgattctcctgttacagcctctggagtagctgagactacaggtgtgccccaccatgcttggctaatttttgtatttttagtggagatggggttttgccatctcagccaggctggtctcgaactcctaacctcaagtgatctgcccgcctcagcctcccaaagtgctgggagccaccatgcctgacctcttcagactcttacaaggacagtaattttactcataagcgctgtaccctcatgtcctcatctaatcctaattaacctccaaagatctcacctccggagactatcacataaaggcgtagggtttcaataaatgaattttgggaaacacactcattcagttcataacaaagatcagatagaaggccatcatctccatgcagccttccttaacaactccaggaagaatacactattcctaccttgggatccctgcatgatcttctcttctagcactttccttgaccagagcacatagcatgtctgacttgctctgctctgtcctcatggaacaggattatgttttaattatttcaaaacctttgaaaacctccccacgccaacacacaccacattttgggcctagcaactttcctggctcagaataggggaggtgacattgtagagtcattcaggagcatgggttttggagtcagatggacctggcttcatgtcttggctcagtcagtactagctatgaaatctggggcaatcactttatccatcagaacctcaggtcatagaaaatggggacaatattcaagcttattgggaggattgagaatatatataagcacttcacccagtacctaccacatggtaagctgtcggtaaataatgtttttgttattattattgttaatactggtagagtgcttagaagtgtgcctgatacatagtagatgatcaataaatggtagttattgtggtcattactatgattgttgttaaaaaaagatgcttttagcagagtggtttgttctaagcactgaataaatgtcaagggcgatgatgagggtgatgatgatggtgatggtgatgatgatggtgataattattattacttagcacactgcctggcacaggaaggactcaggaaatgttgtctgttatataataaatgtttgcgaatgaacgactagatggatagacagctgctgccagtccagaatctggtccctcaattcaagcttttctggctgtgcagggtgccgggaaggccacgtggaccttgttctgctggttgatggctccaagagcgtgcgtccacaaaacttcgagctagtgaagcgcttcgtgaaccagattgtggacttcctagatgtgtcccccgagggcacgcgggtggggctggtgcagttctcgagccgcgtgcgcaccgagttccctctgggtcgctacggcaccgcagccgaggtgaagcaggcggtcctggccgtggagtacatggaacgcggcaccatgacagggctggcgttgcggcacatggtggagcacagcttctccgaggcgcagggtgcacggccccgtgcccttaacgtgcctcgtgttggcctggtcttcacggatggccgctcccaggatgacatctcggtgtgggcagcgcgcgccaaggaggaaggtgggcttggcatgggacacagtgggctggggttgggtcagacgctgggaggcagctttcccgaggcctggggcaccctctgagaccccggccttgcaggcatcgtcatgtacgccgtgggcgtgggcaaggcggtggaggcggagctgcgcgagatcgcctcggagccagcggaactgcacgtgtcctatgccccggacttcggcaccatgacgcacctgctggagaacctcagaggcagcatctgtccaggtgagcgcatctctctcggggctcctcctctctctcattgcccgtcctctgatatctccccttcctattcactccctgcccactttgtagttatagccagaggttgggctcactagacagagctttgctactccaaatgtggtctgcaggccagcggcagggcggtcacccggtagcttcttagaactgaaacatttctggtgctctccagaccgaatgaatcagaatttccacttcgacaagattctcaggtgatttgtaagcatattaaagtctaagaaatcctagactaggctacctgtcccccaaatcagtggaggttcagaataatttgggaaatttttttgaaggcacaccagacagcatttgtaagtggagccacagcatatatccctgaacttgttagaattcaaccttatgaacttggcaaagtggcaggactgaatatattttaagtatgcaaagactttttttttttttattggggacaacatacctcataagtgcaatccctctacttcatcatctggtgctcagctgaggaaaaagagactgactctacctgtgaagaaggggactcttgaatcgcatgcagtgtactgtgctctaggtgatacagggaatgtctccagggtaacttttaccctagagactttagacactagcccaggcttaagatgtgactcttcttcccatttatcagactgcagctccagaaacagactaagtagggctggtttgggtctggagaatttgcctttttttttttttagatatatgtaggggggctgggcgcagtggctcacatctgtaatcccagcactctgggaggccgaggcggctggatcacttgagatcaggagttcgagaccatccttggcaacatggtgaaaccctgtctttaccaaaaaatacaaaaattagccgggcaaggtggtgggcactgaggcaggagaattgcttgaacctgggaggtggaggttgcagtgagccgagattgcaccactgcactccagcctggtgacagagtgagaccctgtctcaaaaaaagtatatataatatactatatatactatattatataatatgtgtttgtgtatgcatgcacatgcacgtgcatgtatatacatatacaaatatacacatacagtccttcccccaactctccttccctccccgctctcagccaattctaattattgtggctctttcagattaggggctctttcagagctcttcctatgtgactcttatgggccctgcagtgtgactttggacgagtcacttaccccacacctaccttaacttttctcttcggtaacaggagaggcactggctgcccaaggttacctctagttctagagttctaagagaagtctgggttttgtggttgaagctctttatcaattggtggtatgactgttccctgtctccaaccctttgtttagagaaacaaatctgtgaagttaggggtctttgctggattccagcagtttgttcatagtacatataagactaagatgaagagacaacttttaaatcattatggcagtgttttcaaaggttaaatggcaggtattgtgcttattatttcaccacctgtaatcctttttcttttttttcctaaggtacttttattgtagcattttttttttctatgtcattccctgtaatctttttttttttttttttttttttttttgagatggagtctcgctctgtcatccaggctggagtgcagtggtgcgatctcggcttactgcaacctctgcctgccaggttcaagcgattctcctgcctcagcctctcgagtagctgggacaacaggcgcatgccaccacgcccggctaattttttctagttttagtagagatggggtttcaccgtgttagccaggatggtcttgatctcctgacctcgtgatccacccgcctcagcctcccaaagtgctgggattacaggtgtgagccacagcacctggcctccctgtaatcttaacaatggcacatgcttatagaatttcagtgaatctaagataccattcattttaagattcatcactaccttatgtactgctaagaaaaaacatgtgccagttttaattgtaaggcctcctgcccaacccccaagatgttgatgtgtggggagatagagttggatcaggatcagtggttcctaaaaattaggtcacaccagaatcacctggtggacctttaaaaacacaaattgcagctgggcatgatggctcatggctgtaatcccagcactttgggaggccgaggtgggcagatcacaaggtcaggggatcgagaccatcctggctaacacagtgaaaccccgtctctactaaaaatacaaaaaattagcagggcatggtggcacatgcctgtaatcccagctactcgggaggctgaggcaggagaatcacttgaacccaggaggcagaggttgcagtgagccaagattgcaccactgcactccagcctgggagacagagctcaaaaaacaaaacaaaaacaaacacaaattgctgggcttcaactctagattttctaattcagcaagtctggggtgttgtctgataattagcatttttgataaattcctacacgatgccgatgctgctggtccaaggaccacactttgagaatcactggtctagttgaaatacactataaagcagtggtttccaacctttttggcaccaggcagtggttttacggaagacaatatttccatgatggtggtggggagaatggttttgggatggttcaagcacattacatttattgtgcactttatttctattattacattgtaatatacaatgaaataattatacaactcaccataatgtataatcagtgggagccctcagcttgttttcctgcagctagatggtgccatccgtgggtgatgggagacagtgacagatcatcaggcattagattttcataagaagcctgcaacctagatccctcacatgcacagtttacaatagggtttgtgctcccatgagaatctaacaatgccactgatctgacaggaaaggagctcaggttgtaataggagcaatgaggagcggctataaatacagatgaagctcccttgcatgctggctgctcacctcctgctgtgtggcccagttcctaacaggccatgggctggtactggtccatgtaatgtgctggtactggtccatggcctggggattggggacccctgctgtaaagtatttacttgaaccaggcagtgttctagatctgtgctttttcaaaaaggtaggcagtacctatttaattacaattgattaaaataaaatacattttagtcctttagtagcaccagtcatatttgaagtgttaaacagccacatgtggcttgtagctactgctttggacagggcagatgtagaacactttcatcattgcataaaattttatttggagagtgctacacaaagtgtggtccacagaccaggagcatcagcatcatttgggagcttattagaaatgtaccttctgagcttcttctccattctgaagcagaatctatattttaacaagctctcctgatgattccaatgagcattaaggtttgagaaacagtcttgtaagttgtgcgtgagcacacacacacacacacacacgtacacaggtgaatgaatcctcgaagccactaatgcgtacactctttcattatatccattttatagatgagaaaactgagcttagaaaggttagtgagtttttcagtatctcacagctacttagcttgggactcagcccaggtctctctaaatccaaagcccatatactcaaccataggcccagtgcagggaaatcagagggccaaagctagggcaatttctcatccccctgaccctctgtgtccggcttgcagaggagggcatcagcgcagggacagagcttcggagcccatgcgaatgcgaaagcctcgtggagttccagggccgcacgctgggggcgctcgagagcctgacgctgaaccatatcctttggggctggtggcgcgggctggagggaaagtgaagggacctcggcgaaccccaacggcctccttaaccgctcactggcccagctgacggcgcgcctggaggatctggagaaccagctggccaaccagaagtgagggccacggacggcccagacccgggctggggcgcggcaccacggacggtgccccttgcgcgccatcggtgcgccggggccaggcagaacctgggcccgtccggcttgggctgtcggggcggaggcgctggcgggcttccggcattgagctgagttggcctcgcccggaccattaggcggactgcggcgtcagggggatagcgggtggtgagggaaggggcacgtgctagaccggcacgccctcgccgcgtgctgcgctcagttctttgttggatttcttgtttgtgttcttaaaaaaataaaaaaaactgatttccacggggtccgtttttgggtcttgctgcgccgcctgggggaggggaagccagacggagcgtgctgtggcggcgcccgggcggcgtctccttggagaaaggcgcattgtgcgggggtcgggctcgggggcaggagacccggcgctgcttccccctgcttgtttattcagccgagaacagatggctccttatgcaggctgcgggaagggagggggctcaacaggaatccttggggtctgagtaagtctgcgccactccattccccagcggactgaacgcttcgctcccggccacgcctatcccatgatgcccccaaatctggctcaaaagctgctagtactgagcgctggtaaggggtgcgggggtggcgttggtgggaaagtgagaggcagtaattgaacccctaaatggatggggtgggagtggatagatgagctttgaccgattttaactctctcctgcactaggtaggaagagaaggaggtatcagctaggacccctgtctgtccagcctgtggccttccttctgtcatcttatcaacccctcccaaaacacctctatcagcaaagaacacaaaccagtaccatttcccgagtgcatgtaagaaacaacgaagtttaaaatgcttccagtcctagagtgatttggggaaaattattttgtgtttgtttcctcatctgcaaagtggagactggaattgttacccccaagcgtgatggggagaatcaaggacattcttctaaggcatgtgccttgtacctatccctcaattaatggtagctattaactgttcttatagtaacagctaacatatttagtgttgggcattattgtaactgatttgcaggtattttcattttatacttggaaccagtgaaataagaattattgcctttatcatccccattttacagatgaggacactgagacacagaaaggttaagtttccaacagtaacataaccagtacgaagctgaaccaggatgtttcctatggctgctctaataagttaccacaaattgagtggctagcaacacacatttattaccttacagtttttaggtcagaagtctaagatgtgttggcaaggctttattccttctagaggcttttgtttcctggccttttccagcttctagaggctacctgaattccttgggtcatggccctacatcacttcagactcagtttccatcagcacatctctttctctgactctgaccttcccgtctctgtcttataaggacccttctgtttatattggcatgaccttgataatcaaagataatcccatctcaagctatctttttttttttttttgagatggagtttttgctcttgttgcccaggctggagtgcaatggcgcgatctcggctcactgcaacctccgcctcctgggttcaagcgattctcctgcctcagcctcctgagtagctgggattacaggtgtatgccaccactcccagctaattttttgtatttttagtagaaacagagtttctccatgttggtcaggctggacttgaacttccgacctcaggtgatccgcctgcctcagcctcccaaagtgttgggattacaggcgtgagccaccgcgcccagcctcaagctctctatcttaaccacatctgcaaagtcccttttgtcgtgtgaggtgaaatcacaggtgccggggattaaaatgtgtacatctttgtggggaaggccattctgcctaccacatggggcttgaagccaggctgactgacttcagagcagctgctcttaagtactctgtgccgggcaccttgctaggcttggtgaagagggagaaactgatgattgagaaaaactcttgagctgaggaagctccgggctagaagggctgaggtccacctgactgttgcagaaagagggaacttcagatgagaggagggagaaatcctggagaggtgatccttaaacggtggctggaatttccgcaggaggccatggaagactttacaggtgagtgaagcttgaactatgcgtggtcaggagggactggagtatggggggatgggaatgatcatcttacctggccatgaggatcagatgagctaaagacctatggacttggcatgtgacctcaccttgccttaccattcattttacagttggggaaactgaggcctagaggccagagttgcctgcccaaggtcacacagagagaaaacatcagttgcaccaggaagaagcctagtggggaggtcaaactggagcagggtagtcaactgatagggggcactgagggcaaaggccaggctccttccttcctcttccctggagttggcaggcactggcttctctggggtttcttttctcatgcttttttctcttgcaatctccctaatggccactggatggcgccgggagcactgatttggagctgggtcctagagccttcgcaggccgttggcatctggcacttgggctgcagagcctgtcctcccttaattccccgactctggcagccccaccaccgaagtctacaagctgcttctgttcccatgcagtggccccatagtcctggatttgaagaccagccctgctacttaccaggtgtgtgttggtgttgacaggtactggttccctttctcacttcttgattcctttctctcatttccctttcctcctaccagcttaaccctgctggatacagggaattcctgttccctaaccatgccccacataaggtcagctagcgcttgcttctttgtttatacccccatcttacgttatgggatagaagacttacaaaggacccgtgaattcaggaaaacaaacatccattaactcaagaacagaaagtgagaacccaagtaacagtgtgaggagagtaacactgccaagaaagcttagatggagaaggcaccgagcccgaacaaagacccccgggcccgggtcttttggtacccaggcaagcacgggtttatgtggctttcagagcctgttaagatcaggaataaagcacgtagatattgggggagtcctgagcccaggtgtgtggagagaactcagcgccctcagccttcttggttccctggagagtttgaatcattaaaaaacgacaatatcttccctagtggttagcagagatgccacttctggagctgtttcttagacttagtaacatgaactaggcatggccttgggtgggaaagggcagggcaggaagggcctgtaacttcagccaagtgctggactcgctttctgaatttcacctctgtgttgtctggctctgtttctccgtggtttttggcctttctcttcttctattctagctcacagctctctccatttctgcagccggcacagctgctgtctctaaggactgtctactcttctggttctttggacctaggatagtgaaacaggagagaaaactatcaattaccaaacactggcctgcatgctgggggccaggctgtgcctttcatctgtgttgtctcgttgaaacctctcaacctacaggagggaaaactgaacttgaaagaggccagttagttgcccaaggcccagagcttccaagttagggtttgaacccaggtggtcttgatcccagagtaggcccatttcacatttctacccttcagttattagggacaaatttggactttttcaaagaaacctttttcaggaagtttatggagtagaccaaagcaaagcccgagatacagtgcaggtgaatggcaggagccgctctgccgtttgtcagcagcacagcctccatgggacacttttgcctcagtgtcccctcttgtaaaacctgtgagcaggccaggcatggtggctcacacctgtaatgccaagcactttgggaggttgaggcgggcggatcacaaggtcaggagttcaagaccagcctgaccaacatggtgaagccccgtctctactaaaaatacaaaaattagccgggtatggtggcatgtgcctgtaatcccagctactcaggaggctgaagcaggagaatcgcttgaacccaggaggcagagtttcagtgagccaagatcgcgccactgcactccagcctgggcgacagagggagactccgtctcaaaaacaaacaaaaccaagaaacaaaacaataacaacaacaaaaaaaacctgtgggcaacgccaacctcataggttaaaaggaaagagcgaagtcattgatgaatgtgaacatgcacagtggatgatcaggaagggcccctttctctgcaggccattacttgccctttttccacaccctcccactcatttgaagtggcgtggcttcagatccccaggcccaatgaagaagttcggccacatcacacaatgaaaagcaaattgctgttaaatacacagaggagggcataagcagctcagctttatggagcccaggaaggcttcctggaggaggtggcaagtgagctgcaccagcaaggaagggtagacattccgcagatgataaaggaggagagggctcctgggcacaggactcgagtggcttttcaagggcatgtggggagggtgaggctggagaagacagtcgccctcagtcccccaggtggatcatgctgcatcccatgacaagggcttgtgggttagtggttctaacccacaagacttcatggacttatgaatcacctgagggtctgttaaaatgcagcatcctgcagtggggcccaggaatctttgtttctcccagctcctgggtgacactgcacaagtgatcagaggaagaaaggagacacaaagcttctggtgatggacatgagtgctgggcaagggctcagtgtcctccaccaggcaggggagcagactagggtctcaggatcttgggtgtgggcgtgtactagaccttgcgccccacatgagcggacgtgaggagctaagctgagaaacagcaaatgggaaagcaaatgtgaatgccagggcaagcattacaagtttgttaggagtcaccaggggctgggcagagaaggcaggttcagtcacaagggttttagtccagagacatgtgctggagaggagagggaaggctggaaggggaggtatgaggagcaactgctgggaagcaatttttttgttgcgggaggtgagtggcagccctggggctttggaaaaggtgataaaaaagaacatatactaagggcctgaaattctaaggacttatgaagaacccatttaattcccataaccatcttaattagaaaaatatattgttattcttaatttacagacaaagaaacccagtcccagaaagtaatttgcacagcaaataagccgtggagcagagacttaagtccagactgtgtcagtccagagctgggcactgattcttcattctagggtatcccaagctcatttaaaactcccggatccatgagccactgtttctttctgttcttcctcctgccatggacaatcccatctccagcccacctcatcccttgctctgctctttcccaggtccaagatggttctttttcctgaagcggtgaatggaactgctgctgtttatccctctctaggcagccagggcatgcgtgttcttcccagcagctgagatgaggatggaaattaatagaggatatagacagaaaaaagctaacaactaactacactatgcagataataattgaggtgtattttctcccagatgaacaagataatctgagtgacccctgttccctattacaggactccaattcctaatcttggcagttgccccccaaaataccctcccagtaaatgtttcttgaatacctgctttgggaatatgttaggtactgtgctgaacactggggattcagtggtgaaaaagagagtcctacactgtctttaagaaacttgtgttctaggagagggcagacaacaagtcagtaaatgaataaggtttcaactagtgatcattgctgggaagatgatgaaattgagtaagggtagagagctgcgctgtccacaggatttccgtgatggtggaaaggttctatatccttgctgtccaacatagcagtcaatgtgactaatgtgaccaagaaactgaattttaagttctgttttagataatttaaatttaaatagccccatgtgatttgtggccactgcgtcactcatcacaggtatagaggacacctggaaaggggagaggtgattaagtgaggtggtcaagggagactccctgagggggcgaaatttgaactgaggtctgagagggaggcagccttccattgttccagggggagagagtgcagatgtgggggccttctgggataaacaaagcttgaagttctggggcggagagaaggcttgtgagctggcattcactgggtgaggtagtgtggtgggagctgatggtggaggggtggtgggtaccggataactggggcatggcaggctgcggcgaggtgggcacccctcattccccttagcaacacagcaggtatagctgccctgcccttgcctgcccccttctctctcagggctgtggggaggactagatgagaccaggtaacgtgcacatgctctgtaagttgtacagagctgccaggcgatggctcatgcctgttaatcccagcactttgggaggccgaggcagatggatcacctgaggtcaggagttcaagaccagcctgaccaatgtggtgaaatctcatctctactaaaaataaaaaattagctgggcatggtggcgggtgcctgtaatcccagctactcgggaggctgagacaggagaatcgcttgaacccgggaggtagaggttgcggtgagccgagattacgccattgcactcgagcctgggcaacaagagcgaaacttcatctaaaaaaaaaaaaaaaaaaaaaaaaaaagttgtacagtgctgcccataagggtagagctgtggttctgagtgtgatcttggaccagcagcatgagcatcatctgggaacacgttagaaatgaacattcttgggccacaccctggatctactagtttaaagctctgggtgtggggcccagcaacgtttccaaaagccctccgggtggctgtgatgcaggctcaagtttaagagcaactgcagaagactggcggcaatcacctcctcctcctccttctcatctcaggcccccaacaaattgtccttccaactccaaccctggcagaattccttggtggctcattgcgcgccctagccctccttccctcagagctagctcagcttttggcttcacatacacagactaaaacaaacaaacaaaaatcagatagataaaacctttgtattaaaaatattttcaccatacaagccgtccagggtcgtcattaaaataaaacttaggccagacacagtggctcatgcctacaatcctagcagtttgggaggccaaggtgggcagatggcttgagctcaggagtttgagaccagcctggccaacatgaagaaacctcatctctgctaaaaatacaaatattaggtggtcatggtggcatgcacctgtagtcccagctacttgggaggctgaggtgggaggatagcttgagcctgggaggcggaggttgcagcgagctgagattgcaccactgtactctcgcctgggcgacagagtgagactgtctcaaaaaataaataaacaaaacgtctatagcatagaaccgatcaagtgaaaaaagatcccctgcttccgttaatcctattccctagagattaccacagaatgatttcttgtgattccttctagacgtctcctatgcctgtagaggcagctagtgtagtgctccaaaaccagtttgtttggtttaaaatcccaggtttgcttatttgtcaaataaattggacaagttgtctcagtgttgtcattcagaaaatgaagttaataatagcaccaacctcatagaattgttgtgaggattaaataaattcaaataaagcaatcaggagacaatccacttaacattcttacaacagtgcctggtatatagtatgtacaaacatgagtgtttgttaataaataaaatgcatggctgaggtttaattattctatgccttttccttggggatatagtcttgagagaataagccaaaggtgcaggaacagttggaaagccatttacgatggggatgatattgagagccactgaaaaaatcctgaccagatgattcttgccggtgacctcggctgacttccttggtttctgatcattatttcttattttattttattttattttttatttttttttgagatggagtcttgctctgttgctcggctggagtgcagggacgtgatcttggctcactgcaacctccaccttccaggtccaagcgattctcctgcctcagccttccgagcagctggaactacaggcacacgccaacacactcggctaatttttgtatttttagtagagacggggtttcaccatgttggccaggatggtctcgatctcttgaccttgtgatccgcctgcctcggcctcccaaagtgctgggattacagccataagccaccatgcccagcctctaatcattatttctataaactccctggtatctttgcaaagcttctaagtttcacagtttcaaaaaacatagcaggaggggggtatttacatagaacccagtgtggatggtacaccctggacttgtgaaatggtctgtctgatatcagccaggtgtggcatgtctgttgcttgcaaccaagaactctgaccatgccttcctccattctttctaagggctgtgtagtattctactctatgtatgtgttgtatttcacttaaccatttcttattgatggatgtctggatagtttagctattctacactacacagacaaatgcaatgacaagcttcccagagcctattgtccagcccccacctgtaccctattccccccgctttttttttggagacagggtcttgctctgtcatccaggctggagtgcagtggcacaatcacagttcactgaaggcttgctctcgcaggctcaagtgatcttcccaccttagccttctgagtagctaggactacaggtgcatgccaccacaactagctatttttttcattttttgtagagatgagatctcactatgttgtccaggctggtctgaaactcctgggcgcaagtgatcctcccacctcagcctcccaaagctctggtattataggcatgagtgactgcatccggcctgaaatgggctctttatcttacatgatcctgtgtagtgctcatgccaacactgtgaagtttgcatcaacactttccctctacagatgaggcagctgaggtcagagagaggatgagatatgcccccaaaccatcagtgagccccttgatgagcagggctcttgccacttcatcagggtggtcagtcggggggagaatgtttgggatgaaagcgggggccttcccttgactcaataccagctggcaaaaggcagaggttcttggaggagagaggtaagtcagggaaggactcgtgggagtgctggggagccttccactgtcaactcagctgctttccagagggcaagaggagagagagggtggaggacagttggcatgtggattgaggaacaataatgatgatgatgctaataatcacagtgactaatgttttgggcgagtcacaaagcaatttcctattatgaatagttcagcagagccacacaaccatccccttggaggaagacaaggcaatgtggctactcccattttgcagaagggaaaattcaggactggagagggagagtaacttgcccaagtttacatgtcaagataatcgccatgctgggtggggccagacctttcaggtcccagcccaggatctagctccctcccatgggccacagctgtggctggcagagaggtgcggcttttgtcagggctgaagctcagccacaccctctctccagcctcaagttgggtgccaggcagagggtttggactgaaggctg

SEQ ID NO: 1340 - DNA, 2092 bp, Homo sapiens
ccaagcgccatgagaggccttctttgctggcccgtgttgctgctccttcttcagccctgggaaacccagctccagttgacaggtcccaggtgtcacactgggcccctggatctggtgttcgtgattgacagctcccgcagcgtgcgccctttcgagttcgagaccatgcggcagttcctcatgggcctcctccgaggcctgaacgtgggtcccaacgccacgcgcgttggcgtgatccagtattcgagtcaagtgcagagcgtcttccctctccgcgcgttctctcgccgcgaggacatggagcgcgccatccgcgacctggtgcctctggcgcaaggcaccatgacgggactggcaatccagtacgccatgaacgtggccttcagtgtggccgagggcgcgcgaccgccagaggagcgcgtgccgcgtgtcgctgtcatcgtgacagacgggcggccccaggaccgcgtggccgaggtggcggcacaggcgcgcgcccgcggcattgaaatttacgcggtgggggtgcagcgcgcggacgtgggctccctgcgcgccatggcatcgcccccgctagacgagcacgtcttcctcgtagagtccttcgacctcatccaggagttcggcctgcagttccagagccggctgtgtgccattgatctgtgtgctgaagggacccatggatgtgagcaccactgcgtcaattccccaggctcctatttctgtcactgccaagttggctttgtactccagcaggaccagaggagctgcagggccattgactactgcagctttgggaaccatagctgtcagcatgagtgtgttagcacccctggtgggccacggtgccactgcagagagggccatgacttgcagcctgatgggaggagctgtcaggtccgggacctttgcaatggcgtggaccatggctgtgagttccagtgtgtgagcgagggcctctcctaccgctgcctgtgccccgaggggcggcaacttcaggcagatggcaagagctgcaaccggtgccgggaaggccacgtggaccttgttctgctggttgatggctccaagagcgtgcgtccacaaaacttcgagctagtgaagcgcttcgtgaaccagattgtggacttcctagatgtgtcccccgagggcacgcgggtggggctggtgcagttctcgagccgcgtgcgcaccgagttccctctgggtcgctacggcaccgcagccgaggtgaagcaggcggtcctggccgtggagtacatggaacgcggcaccatgacagggctggcgttgcggcacatggtggagcacagcttctccgaggcgcagggtgcacggccccgtgcccttaacgtgcctcgtgttggcctggtcttcacggatggccgctcccaggatgacatctcggtgtgggcagcgcgcgccaaggaggaaggcatcgtcatgtacgccgtgggcgtgggcaaggcggtggaggcggagctgcgcgagatcgcctcggagccagcggaactgcacgtgtcctatgccccggacttcggcaccatgacgcacctgctggagaacctcagaggcagcatctgtccagaggagggcatcagcgcagggacagagcttcggagcccatgcgaatgcgaaagcctcgtggagttccagggccgcacgctgggggcgctcgagagcctgacgctgaacctggcccagctgacggcgcgcctggaggatctggagaaccagctggccaaccagaagtgagggccacggacggcccagacccgggctggggcgcggcaccacggacggtgccccttgcgcgccatcggtgcgccggggccaggcagaacctgggcccgtccggcttgggctgtcggggcggaggcgctggcgggcttccggcattgagctgagttggcctcgcccggaccattaggcggactgcggcgtcagggggatagcgggtggtgagggaaggggcacgtgctagaccggcacgccctcgccgcgtgctgcgctcagttctttgttggatttcttgtttgtgttcttaaaaaaataaaaaaaactgatttccacggaaaaaaaaaaaaaaaaa

SEQ ID NO: 1341 - DNA, 1746 bp, Homo sapiens
atgagaggccttctttgctggcccgtgttgctgctccttcttcagccctgggaaacccagctccagttgacaggtcccaggtgtcacactgggcccctggatctggtgttcgtgattgacagctcccgcagcgtgcgccctttcgagttcgagaccatgcggcagttcctcatgggcctcctccgaggcctgaacgtgggtcccaacgccacgcgcgttggcgtgatccagtattcgagtcaagtgcagagcgtcttccctctccgcgcgttctctcgccgcgaggacatggagcgcgccatccgcgacctggtgcctctggcgcaaggcaccatgacgggactggcaatccagtacgccatgaacgtggccttcagtgtggccgagggcgcgcgaccgccagaggagcgcgtgccgcgtgtcgctgtcatcgtgacagacgggcggccccaggaccgcgtggccgaggtggcggcacaggcgcgcgcccgcggcattgaaatttacgcggtgggggtgcagcgcgcggacgtgggctccctgcgcgccatggcatcgcccccgctagacgagcacgtcttcctcgtagagtccttcgacctcatccaggagttcggcctgcagttccagagccggctgtgtgccattgatctgtgtgctgaagggacccatggatgtgagcaccactgcgtcaattccccaggctcctatttctgtcactgccaagttggctttgtactccagcaggaccagaggagctgcagggccattgactactgcagctttgggaaccatagctgtcagcatgagtgtgttagcacccctggtgggccacggtgccactgcagagagggccatgacttgcagcctgatgggaggagctgtcaggtccgggacctttgcaatggcgtggaccatggctgtgagttccagtgtgtgagcgagggcctctcctaccgctgcctgtgccccgaggggcggcaacttcaggcagatggcaagagctgcaaccggtgccgggaaggccacgtggaccttgttctgctggttgatggctccaagagcgtgcgtccacaaaacttcgagctagtgaagcgcttcgtgaaccagattgtggacttcctagatgtgtcccccgagggcacgcgggtggggctggtgcagttctcgagccgcgtgcgcaccgagttccctctgggtcgctacggcaccgcagccgaggtgaagcaggcggtcctggccgtggagtacatggaacgcggcaccatgacagggctggcgttgcggcacatggtggagcacagcttctccgaggcgcagggtgcacggccccgtgcccttaacgtgcctcgtgttggcctggtcttcacggatggccgctcccaggatgacatctcggtgtgggcagcgcgcgccaaggaggaaggcatcgtcatgtacgccgtgggcgtgggcaaggcggtggaggcggagctgcgcgagatcgcctcggagccagcggaactgcacgtgtcctatgccccggacttcggcaccatgacgcacctgctggagaacctcagaggcagcatctgtccagaggagggcatcagcgcagggacagagcttcggagcccatgcgaatgcgaaagcctcgtggagttccagggccgcacgctgggggcgctcgagagcctgacgctgaacctggcccagctgacggcgcgcctggaggatctggagaaccagctggccaaccagaagtga

SEQ ID NO: 1342 - DNA, 52479 bp, Mus musculus
  misc_feature (13300)..(15985): n = a, g, c, or t.
  misc_feature (50929)..(50948): n = a, g, c, or t.
gtcttgtgtcaatttatatggttttatccagtctccttccttctggagctccaagtttacatacacaagaccatgtggttgtgttccatacattcctcgagttccatttttattttctcgtgttctagttatattttcaaatgatatatcctctatgtttctcacttttgaagtcttttattgaattggctttagattaattgtatcagccttgtacctggtgctcagtaaatacttgctgagtaagcaaagatcaggagaacaaagacacgaagggctgacaagaaacagcacagggtgtgaagacagtatgcattgtttatgttcccaaagtagacttttacatgcagggtacacagtgataaaagacgggactaacggcacacgttgaataatgaaggagcaagaagctcaggtctcaaacattatgaaggtaacacacataatcagtagatgaaccaggaaggttggttccatggggcaaagcagaacaagaagaaaattatttttacactgcagataccaaagggcaagaggatttagaagaagcgagagggaaattggggttctgggaaagcgtcaacacaggtgatttcttttcataactgcttgcttctgtcttaaatagcaacagaagatgtgtgattatggatacgtgcctacagcttccggatctgatgagatagcatagaaacacaagagcacagactgactccgagacaaaactgtttgcaaccatgggtgggcctatgcgttaaacagaccattcagaacaagggcatggttcagcaggaaagggcatttgccaccaagcctgacaatcctgcttaatgtccagaacttatgtggtggaaagagagaactgattccctcgaagcagtcctctgagccacacgcgtgctctacggcatacaaacacacattaatgtaaagaatagactctataacgtctctataatgtctgaaaagagaagcaatcccatattttaccgagacttgatgccatatatcttaagagatgtgtggaatctattggaaactccaagcgctggcagaaactcactggcttgcctttggttgctctcttgtggaggaaacactttccttaccttgttcataagtgcctaccactgcccaagatgcacccagtcaccagacatagtcaggtacagtagacattcacattagtgaactctggtagagtggggccagaaagctgagcaactgggggagccatctagagcaagggtgaggtggagacatgtccgaatcctgaaaatctcatcctgaaactgacaggagtaggactgttctccccctgctctgggcctgcatattctggtgcatgtagccttgagactctcacctctgccatctctgaggtagtcacatagcttggtagccaggttacaggttaaacttcctctcttcctataaggatgtgtccagcaagcacctgaaattcctcctcatgcatatgaagcattcccagctccccaggcccagccaatgctgtcctctcactctgacaattcctaccccattccccaaggtgtatccatagcccttgttcccctccttcccaataaggagagacttttcactaaaatctttctccagagaaggctgtttctcctgcattcacaacaacagagatcttgcctaacccacccagctggataagctccacttctttcagtccagcctggtgtctaatgtgcctggataccctgaagggagaagcagaccaggggtggcttggtgtaaaaagagaaggttaatgtcctttacatttctaccaccatggttctgaaagctcgagtcaacacacaagcataagtttttttttttttttgttttttgggtttttttgttttgttttggtttttggttttttgttgttgttgttgtttccagaaagttggttagaagaagtggagtcatggctgtgactaaactggaccaagtagttcagagtcttcagaaatagtttttgagagggcttagaaaattttgaagaaattggcctgagaaagccaaaagtgtctttagtgaactacactaatgagaagttatggtagaacttaatgactgaaatgttggcaggaatatagacaacagagattgtgatggtgaagtttcagtaggaatgagagtgctactgtggactggactcgtggatactcatgttattttgtgacaaagtccgtgtctatattttgtttctattctgagactctgtggtagactaagtttcaagatctctggaagataaaattccaaggcagcccaagatggagcactgctattgctggcttcttttagccatctttacgctgaaaactgggaacaaaagcagaacatagacattagaaaccactgtgtgcatcggtaggaaaacaagaccattgaagctgtagacaaggaaggtgtataaagaaggagataaactcagttaaaaggaaatgagaacaattcactatgggcaataggaaagaaatctcaggaattcctaagaccctacccattcagagtataaaatagtaaacttatttgaaagttttttccccctggagaagagagtacactcagaggctggaagagacgtgcgtgtgtgtgtgtgtgtgtgtgtgtgtgtgtgtgtgtgtgttttaaattagatattttcttcatttacatttcaaatgctatcctgtaagtcccctataccttccccatgccctgcttcccaacctacccactcctgcttcctggccctgacattcccttgtactggggcatataatcttggcaagaccaaaggcctctcctcccattgatggccaactaggccatcttctgctacatatgcaactagagacacgagctctgagggtactggttagttcatattgttgttcctcctatagggttgcagaccccttcagctccttgggtactttctctagctcttccattgagggccctgtgttccaatagataactgtgagcatccacttctgtatttgccaggcactggcatagcctcacagagaaagctatatcagggtcctgtcagcaaaatcttgctgacatatgtaatagtgtctgggtttggtggtttttttatgggatggatcccaaaatggggcagtctctggatggtccttccttccatctcagttatgaactttgtctctgtaactccttccatgggtattttgttccccattataagaaggaacaaagtatccacactttggtcttcattcttcttgagtttcatgtgctttgaaaattgtatcttgggtgttctaagtttctgggataatatccacttatcagtgagtgcatatcatgtgagttcttttgtgattgggttacctcactcaggatgataccctccagatccatctgttgggctggagagatggctcagtggttaagagcactgaatgctcttccaaaagtcctgagttcaattcccaggaaccacatggtggctcacaaccatctgtaatgggatctgatgcccctcttctggtgtgtctgaagatatgtgttttgtatcacatttccttcaactgaccaaaaaattaataagatgaggcaagtgaatgctgatgtatggcaatgggaaatcaaatacatttttttaggttgatggctgggaaatgcacagccttcaccataaaggaacatacttctagtaggaagttatcagctacaaggtggatgagttagttactctgttcacactgggaccaaacacccgaccagcacaacttaagacaagggtttcttggcacaccccaaactttcctttgagtcttttaagtctctatgactctgtagcttcttacaaacatggctgctgaactagcaccatgttgctgatgacacaaaggtgaggaagtgcttccaagagatccagctgtaaggcattttctcaaatagtgattaagggggaaaggcccattgtgggtggtgccatccctgggttggtagtcttgggttctataagagagcaagctgaacaagccagggaaagcaagccagtgagtaacatctctcatggcctctgcatcagctcctgcttcctgacctgcttgagttccagtcttgacatcctttggtgatgaacagcaatgtggaagtgtaagctgaatcaatcctttcctccccaacttgcttcttggtcatgatgttttgtgcaggaatagaaaccctgactaagacagagtccatgtgggctgcagtcaggaaggctgtggattagagctgtccagcccttccttagaagcctgtatcacaccaagaaatgtgccagatgccaggcatgatctgcaggattatccaattgccctctggagtttggtcttgctgtgtctgtgccttctttcaatgtgctcctcttccttcttggaatggaaatgtatagcatgttccactgctgtgtgctagaactatgtctttcatttttgcttttacagaggctcacagccaagagttctgcctgagtctcagagggaatttgaacttagaattttgaaaaagattaaaactcttgacactttggggattgttagacatggactaaataaacttcgcattgtataatgaacacaaacctagagggatgaattggagtgttctctacaggagcagaaccgatagaatgaatatatattaaatgagagtttatcgggttactgtacatgtgtaccagtttgggtaatctaacaatgactgtagccacactggagaaagctgaaccagtagatgttcagtctacatagttggacgcctcaaaagtccaaatgtagggctgagggtctggaggattcctgaagagccacccatcttcatcttcttggaagcctgaagaggctcggttctgatatcagtgaagaaatgaagcagcaaggtgataaatgaaccgagcagtgtaaggtgggaggccatgaggggaaagtgaagctttgtccccagagctccttttatctgggctgcccagccacatgcaggatagatctttctacttcacatcacctgagcaagaaaagcccttcgaggtgtgtccagcagcttacttctcggtttcttccagtcaagtactgacacaagaatcaaagacagaatgtgtggttggagtctaccatgccttcccaaagctcctgtgtggaagcccactactgcagatagggcttagaggaatccattggatcaggaaagctctgacttactggttgcatctatccactcatggggtcataatttgagagcacagttgtgatggttgagatttataggtttgtgcctagtgggaggagctgggctgcctgggaggtgctttttgaaggacatattttgtttctggaccccatttgtctttgttttttcttcctggctaacagaggtgagtagcattctccactacatattcctgctgccatgttgttcagcctacctcagtgttggagccaaaggactatggattaaagattcttatactatgagtcaaagcgaaactccctcatacaaaataaagtagtaaggaccctgttttcctcctcctgggttgccttctcctgccttgatgtgatggatggcatgtgtctagtctcattgtagcttgttatgcagtgtttgaatgatgtcccttggaagcccgctcttttttgaggtgaggcagggtgggtggatcttggggaaaggagagattgaggagggaggaagctggggagaggagagggaagggaaactgttgtcatgatataatttatgagagaagaattttaaaaaatattaaaggtcctaaagaaaaaaaaaaacaagaaaacagagagatatctataagaagaaatctaaaataattaggaaagttcttgagctacatgaaagcatctcaaaagactgacttaaaacttaggtctggatttccaaatacagcagatcactcaaacaacagaatagaaacagctgaaaaatctaacaaagatctattacagaagatcaagtgaagggcgtatatatgtacgtatgagaaatgatacagaaaagttctaacaataagaatggaagaattcctatgatccacacagtaagagcttcagccatcaggacagaggagacattaacacggtagcgtttcataagcaaaacgaaactgcacattgattcagaaacaattaggggatacatacaatgcgatacttatatatcatttgactgttttcagaaacaacaacaataatcttccttatttatttcaatattctcaaaagtttgcttcaaaggtccaatactcaagacagtatttttcatttgataaaatgctagtattagtagttgtgtcacatgcttagattcctcatccaatgaaatgtgcatatttaaagccaagtgctttcttactttaaacgtgttgctttgggtgttgctgaaaatagtatacagagttgagtacatactgaccttggtcacagcaacttttcttcagaggaaagcttaacagggagtgtactgggtaaaagatgggaccaggctgtctcatactgcagtgggaatgtgaaaattagcctctatcctggtggtgatctgatggttcaagaagagaccctggtgagttctgctgtgtagatttggacgtaggaaatgtttatgaaaccggtgtccttataccagttaactaggaaaagtaatcaccagggacagaggataatgactgacattccttgttgccctgaatgggcccgatctcctctgatctcggaagctaagcagggtcgggcctggttagcacttggatgggagaaacgttgaggcaggctagagtgcaattcccaacactggcccattgcttagtgtttctgagttccaagctcctcacttgtgcctgactcatttccttcttccggataacatgtctttctctcttgctttagaatcccccagtgctatttactaccttcaaaacttcttttgaccaagcacttgccatatacactaaaactagctgtactgtgcatggctttcccaaaagaatttttcactgaagacaatgattctcacccttcctaatgctgcaatcctttaacacagttcctcatggtatggggaccccaaccataaaattactttgttgttactttataactgtaactttgctactgttatgagtcataatgtaaatatctgatatgcaggatatctgatatctcccaagggggtcacgacccacagattaagaacagctggtctaagagagcaatgtttctctaagggtcctcttagcaccttgacaggatcacacctatctttatagtatccctgtggcatgggtttatttatttaatagttgctcagttttttactatgtagacattaacactgacagacagaatggtccagccgcatcacaaagcaaggagagccagcatgaaacctgtatagaagaacagaagacatttttcatctaagcatgtccttcgctagctgggcatgatggcgcacgcctttaatcccagcactcaggaggcagaggcaggcagatttctgtgttcgaggccaacctggtctacaaagtgagttctgggacagcctgggtaatacagagaaaccctgtctcaaaaaaaaaaaaaaaaaaaaaaaaaaaaaaaaaaaaaaaaaccacccaaccaaacaaaaacaaacaaaaaagaatgtccttcgctgaggctgcaaaaatggccctggcgttatgaccacttgttactcttgtaaaggacctgggtttggttttcaggttccacatgggggttcaccagcatgctggaacttcatgtccaggtatctgaggctctcttgtgacctagaggacagcaggcatgcacgagatgcatgcacacatgcagatggaagcagatgtacacagaaaaaataagtaatcctaaaagcaaaagaatgtccttgataggccagtaaaagttgctgttgttatagcttgacacttagatctcgattttaaaaacaacatcctgtgggcaaagtgggaagtgtgcattttgaacctttctgctatagaatgaggtggtggtcttgcagacgcgctgatgcctggttgcaagctgatcacaagacaggtaaacttggttattctggaaaatgaataagacgcttgtcaatttaagagcaactggcctcattagtggctaacgatacaactcaagttctcaaggaaaaaaaatcatagctttgagaaacttctgtcacagaaatgtactttcccaaacactaaagattctcatgattaaataaaaaaagtggcatagatgatttagactcttgctattgagacataccatgtgtcagcactggacgctctgtggaacccaatcaatactttccaaatgaccaatgaatgccttgtgttggcatcggttcaagtgtccctggataagagattcgctaaaagaatacgaggaaccatggatctcattgtagcacagtgagaaaacaccacgatctcaaagacaggtcaccagtgatacatggcccctgtggaagtgtctgttagagaactaggctgagacaaatgcccaacaaaagtactacttaaaaaggttagaaacacccaaggtttataggtgttctaagggacagcacctcacctttgaaaacatatcagatactttgaacatgtatactgtgaacttgtatcaaaatttgtaagagctaatatttgtcacctaaaggcacaattctgattcaagacatttttttaaaaaacttttaaaacatattttttaaaacatacatttattctagttgtgtggtacatacctttaatcccagcattgaggaggcagagaggcagagacagagagaggcagagaaaggaggcgagggcaggtgcagaagccgacgaggcagaggcaggggcaggggcaggggcaggggcaggggcaggggcaggggcaggggcacgggcacgggcacgggcagggggcacgggcacgagcacaggcacaggcagaggaggcagagatggcagagaggcacaggcagaggcgagtggatctctgagtttgaggtcagcctggttcatatagcaagctccaggccagcctagtttacatacagagaacttgtctcaaacaaataaaccaaaacgacaacaaaacaataacaaaaatatttgtgcgcgcgcgcgtgtgcgtgcttgcgcacatgccggaggaaaaggatgaggattcttctggtcaaattcaggtcctcaagataagttgcaagtgccttcaccagctgagccgtcttattggccctcagcataaggatttcttaagcagtgaggcttaactctgacattagctctgctaacagctctttcctgactgttccatcatccccacgctgggaagcctgcatgcagttttgtaccctctacccatccctttgtctagttcttcctggctcacccaccccattcttttcctacttcattcctctcttacgggagtctataggctcattggagcatctgccccatttgaagtcacttttgagatgaagataaaggcacttgggagggagttctagaatttccccaagtcttcccaatagcccgtgaggctatatttggagggataactgaggctaaacctcacgattcttgatggtggtctcctctaagattttgagagtggtgtacaggaaagggcttcggacggagttcactagagctgactttttaaatcttacagaggaaactgaggcccagagatgcaaaggataggggccagcctagagagccagaaaccaaccactggacccaacccacagcctccacctcagagggccctgatggggagggaggaggcgggtccctgagagcgaagaagagtgggagggcgaaggaaaggaaggagggcagatgtgggagtgaaagaggcaccctcctggaggctgattggctctggaggccagctctctccacgaggtttataagagttagggctgcctggggtaccctgccatctctcccacgtcccggggagccactgccaggacctctgtgaaccggtcggggcgggggccgcctggccgggagtctgctcggcggtgggtggccgaggaagggagagaacgatcgcggagcagggcgcccgaactccgggcgccgcgccatgcgccgggccagccgagactacggcaagtacctgcgcagctcggaggagatgggcagcggccccggcgtcccacacgagggtccgctgcaccccgcgccttctgcaccggctccggcgccgccacccgccgcctcccgctccatgttcctggccctcctggggctgggactgggccaggtggtctgcagcatcgctctgttcctgtactttcgagcgcaggtgagtgattgacatccctgtccgagtctctgcggtgagttggggggtggggtgggggctgagtctggttctaggacttattctggaagggaaagagacccaaccccccacaaggaagggaagttgggggcctccagccaagctcatctcctaccagcgcagcgtgcagaagctgaactctgattctggctgaggatgggtttgaatttccccccattggccgctcccctcgtgtgcctcaagtgatcgcacgctttctccccaccgtgaatttttcacttggagttaagaaccaacttcaactcgtttagggaaagtggggaaagtgagaacttttacttgggcatctaagcttcccaatgccactaaccgacctgttccctgacactttgggaccacaacgtgtcagtagtctttggaagagctagggatgacactcacaattcatacagtgacagcgctatcagatgtgcccggtctcaggtctggggctctggggctcctctggagctcaggttctgaaaggtgaagggacagccccactgcgcctgcctaggaggtgggtggaggaaggaaggtgcctctctgtgtgtgtgtgtgtgtgtgtgtgtgtgtgtgtgtgtgtgtgtgtgtatgcgcgcgcgtgtgcctgtgtgatagtttagcctgaatacaatctagccagtaaccaacctttgaagagaggaggaagctccgtgctaaagattcagaacctcggggagatggcagagggaggaaggggtaaatttgtaatattatgctttctggtggtttgtgctcttgtgttttcttggaaattgcagcgcagttggtcgtattcattcaaatactcttgtctggtgctatgaattctttctcagaggaagtggggggctgactgtgcatatttttatgggaaaagaaagttgggtttggacttcgtttgtttccagaatccgaggtgattactaaaccgaactggatgcattacaatgtgtcattgcttggactgcataggtttttgacatgtgccaaagccttgagccgtactttggatcacgggctttgttaagtcttcagacctactggtttgcattttatcccatgctgtggttacccactaatgcaaaaacagacagaccataagccagtccttctgaaaaccagggtctccatgctcataatcacatgcagtacctgtagagattttcttcctcagacaaggtctgagtggtttgcttgcgatatgaatcacagaaatctgtatgaaagtgagtaaacatccacccccctttcattgggatacataggaatcaatgaagaatggcttatctgttgttttctgccgtctgccattttaatggatgtgtccagagaccctgcatagttcatgccagtatcaaatgcgatgggattggcttagaaacaactctatatgcagtccccgtgtctttctgtgtgtggtaccagaggatagcgtgtgcttccaaggaaaggctattgtaattctttgcaaagagactttaggccagaagatatgcagtagttctcagtgtcttctatttttttaagcctgttggggtcacagcatcttttcccagcagtaaaagtgatgtgagcactgaacttggaaagaagtgtggggtgagcacgttctcggggttcttagcttaccaggaaccctgggacttggcatggctgtggaggaatgagtcaccagctgtgttcttgtccagttttcctgaaggaattctatggtggtagggtgacatgagatgcctgtcactctaagggtatggtcaccttttaccttgatggcataaaaattgtacaaaacaactttttcccaatgtaaacacttgagatagcactcggagccaggtgattttcctctggaggatttaatgtcatcagaattctggatccaagcgtttgtcttctcttttccttcccccgccctcccctgcccccgtcccttcttctcttcctccatctcttccttcctagctagggtctcatgtagcccaggctgacctcaaatttgtcatatagccaaggatattatacctccaagatagtgtttcagatatgcatcacggtgccccatttatgtggtgtgatgcttgggactgaatgcacatacatagctttgtgtgtatgttaggcaaacactgtaccaagtacactgactgtacctctagtgcccggttgctgcaaggattgagtctctcagagacttacttaaaataactttagtcattattctgaacccaggtctgtcactacattgttaaaaggtcgtctccgtcaccagggtagttttaggaaaatgtttgaatattctgactgcatctcactgagtgtcgtatggcatccgcatttgacacctcaggggaccctagtcacttagagatacatccagaatcccttgcccatgacatgctatgtctggaaaatgctccaaaatgactgagtacgtgcaggcgttgggagatcttagcttatgcgggaagcgaggtctcttgctgttggcgaatggttgttgaggataggttttgggtacacaagggttcgatctacaactcttttcctttttatatattatggaaaccttcttttgtactttaggtattggtgttgactaggattctgttttctttttttaaagttcttttaagtttttaagttctggatgaaatacttggaattgaaatcatctcctatcagggaacacatttatactttaagataaagcaagccagatttattacagtttaaagacattgaaaagagacaatatgaattctctgaagcaaaaggattggaagttccaggccagcctggatcaaaacaaacaaacaaacaaacaaacaacaaacagaaccaaagttaaaaccaaagctaatgcaaaatcaacctgggtgttttagatnnnnnnnnnnnnnnnnnnnnnnnnnnnnnnnnnnnnnnnnnnnnnnnnnnnnnnnnnnnnnnnnnnnnnnnnnnnnnnnnnnnnnnnnnnnnnnnnnnnnnnnnnnnnnnnnnnnnnnnnnnnnnnnnnnnnnnnnnnnnnnnnnnnnnnnnnnnnnnnnnnnnnnnnnnnnnnnnnnnnnnnnnnnnnnnnnnnnnnnnnnnnnnnnnnnnnnnnnnnnnnnnnnnnnnnnnnnnnnnnnnnnnnnnnnnnnnnnnnnnnnnnnnnnnnnnnnnnnnnnnnnnnnnnnnnnnnnnnnnnnnnnnnnnnnnnnnnnnnnnnnnnnnnnnnnnnnnnnnnnnnnnnnnnnnnnnnnnnnnnnnnnnnnnnnnnnnnnnnnnnnnnnnnnnnnnnnnnnnnnnnnnnnnnnnnnnnnnnnnnnnnnnnnnnnnnnnnnnnnnnnnnnnnnnnnnnnnnnnnnnnnnnnnnnnnnnnnnnnnnnnnnnnnnnnnnnnnnnnnnnnnnnnnnnnnnnnnnnnnnnnnnnnnnnnnnnnnnnnnnnnnnnnnnnnnnnnnnnnnnnnnnnnnnnnnnnnnnnnnnnnnnnnnnnnnnnnnnnnnnnnnnnnnnnnnnnnnnnnnnnnnnnnnnnnnnnnnnnnnnnnnnnnnnnnnnnnnnnnnnnnnnnnnnnnnnnnnnnnnnnnnnnnnnnnnnnnnnnnnnnnnnnnnnnnnnnnnnnnnnnnnnnnnnnnnnnnnnnnnnnnnnnnnnnnnnnnnnnnnnnnnnnnnnnnnnnnnnnnnnnnnnnnnnnnnnnnnnnnnnnnnnnnnnnnnnnnnnnnnnnnnnnnnnnnnnnnnnnnnnnnnnnnnnnnnnnnnnnnnnnnnnnnnnnnnnnnnnnnnnnnnnnnnnnnnnnnnnnnnnnnnnnnnnnnnnnnnnnnnnnnnnnnnnnnnnnnnnnnnnnnnnnnnnnnnnnnnnnnnnnnnnnnnnnnnnnnnnnnnnnnnnnnnnnnnnnnnnnnnnnnnnnnnnnnnnnnnnnnnnnnnnnnnnnnnnnnnnnnnnnnnnnnnnnnnnnnnnnnnnnnnnnnnnnnnnnnnnnnnnnnnnnnnnnnnnnnnnnnnnnnnnnnnnnnnnnnnnnnnnnnnnnnnnnnnnnnnnnnnnnnnnnnnnnnnnnnnnnnnnnnnnnnnnnnnnnnnnnnnnnnnnnnnnnnnnnnnnnnnnnnnnnnnnnnnnnnnnnnnnnnnnnnnnnnnnnnnnnnnnnnnnnnnnnnnnnnnnnnnnnnnnnnnnnnnnnnnnnnnnnnnnnnnnnnnnnnnnnnnnnnnnnnnnnnnnnnnnnnnnnnnnnnnnnnnnnnnnnnnnnnnnnnnnnnnnnnnnnnnnnnnnnnnnnnnnnnnnnnnnnnnnnnnnnnnnnnnnnnnnnnnnnnnnnnnnnnnnnnnnnnnnnnnnnnnnnnnnnnnnnnnnnnnnnnnnnnnnnnnnnnnnnnnnnnnnnnnnnnnnnnnnnnnnnnnnnnnnnnnnnnnnnnnnnnnnnnnnnnnnnnnnnnnnnnnnnnnnnnnnnnnnnnnnnnnnnnnnnnnnnnnnnnnnnnnnnnnnnnnnnnnnnnnnnnnnnnnnnnnnnnnnnnnnnnnnnnnnnnnnnnnnnnnnnnnnnnnnnnnnnnnnnnnnnnnnnnnnnnnnnnnnnnnnnnnnnnnnnnnnnnnnnnnnnnnnnnnnnnnnnnnnnnnnnnnnnnnnnnnnnnnnnnnnnnnnnnnnnnnnnnnnnnnnnnnnnnnnnnnnnnnnnnnnnnnnnnnnnnnnnnnnnnnnnnnnnnnnnnnnnnnnnnnnnnnnnnnnnnnnnnnnnnnnnnnnnnnnnnnnnnnnnnnnnnnnnnnnnnnnnnnnnnnnnnnnnnnnnnnnnnnnnnnnnnnnnnnnnnnnnnnnnnnnnnnnnnnnnnnnnnnnnnnnnnnnnnnnnnnnnnnnnnnnnnnnnnnnnnnnnnnnnnnnnnnnnnnnnnnnnnnnnnnnnnnnnnnnnnnnnnnnnnnnnnnnnnnnnnnnnnnnnnnnnnnnnnnnnnnnnnnnnnnnnnnnnnnnnnnnnnnnnnnnnnnnnnnnnnnnnnnnnnnnnnnnnnnnnnnnnnnnnnnnnnnnnnnnnnnnnnnnnnnnnnnnnnnnnnnnnnnnnnnnnnnnnnnnnnnnnnnnnnnnnnnnnnnnnnnnnnnnnnnnnnnnnnnnnnnnnnnnnnnnnnnnnnnnnnnnnnnnnnnnnnnnnnnnnnnnnnnnnnnnnnnnnnnnnnnnnnnnnnnnnnnnnnnnnnnnnnnnnnnnnnnnnnnnnnnnnnnnnnnnnnnnnnnnnnnnnnnnnnnnnnnnnnnnnnnnnnnnnnnnnnnnnnnnnnnnnnnnnnnnnnnnnnnnnnnnnnnnnnnnnnnnnnnnnnnnnnnnnnnnnnnnnnnnnnnnnnnnnnnnnnnnnnnnnnnnnnnnnnnnnnnnnnnnnnnnnnnnnnnnnnnnnnnnnnnnnnnnnnnnnnnnnnnnnnnnnnnnnnnnnnnnnnnnnnnnnnnnnnnnnnnnnnnnnnnnnnnnnnnnnnnnnnnnnnnnnnnnnnnnnnnnnnnnnnnnnnnnnnnnnnnnnnnnnnnnnnnnnnnnnnnnnnnnnnnnnnnnnnnnnnnnnnnnnnnnnnnnnnnnnnnnnnnnnnnnnnnnnnnnnnnnnnnnnnnnnnnnnnatacacacacacacacacacatatacacacacatacacacacacacacacacatacacacacacacacatacacacacacacatacgcacacacatacacacacatacacacacacacacacacacacacacacacacacacacacgtttatttcatcgtcacaacatcatccgttagggatagttgcattttccaagtcccctgtttatcccctgtttgtctgtgtgtgtggtgctggggatggaacccagggcctccagtatggcagacaaatgctttcccagccccaaccttccttttacaatcagataactcaagatttagtgttggcaggtatacctgtaggtgtgactcactgtaactcagtttgctatgctcttttgtggaatgtgatttgatatgccttccagggaaagacaaggacagcttgtttgttctgttcccctgccccaccaacccccagtatctaacacaggacctgaagtactgaaagggcctttcaaatgatttgccaccccacacatctttccatttctactttactattatgcaaagtaagtgtctagtagctgacatggtacaggtcttcaaccgtgaaagtgctctatctagactgcccagtaccccagaacatgctgctgggtgggagctacatgcatttggtcactcaacactctgttagtcttgcccaccaaccttattccttgccccgccttccttccgcagactgtccttggttacctgtgcatttgcccctgcgcctctcaaacctccttccttccagggcaccggaaggagaaaacacatcgggttagagacacaaagcggctttctgacttgggatgcttaagaaagaaaatgagggaacaaagttaatggttgccgagtaatcattctttcttcattcacagtaaatgatgaggtcttaaacatcatggagatgtgacgagtggctcttaagtatattttgaatgaaagattcgacaactgaatctaacttaggcacgcgataaaattgtccaagggctccaaatgagccatgtttatttttatgtttttatttaagagagaaaagacaaaatctttgcattctactttttaatttgctccaaatcgtgtaccgttattaggtgatgcaacattgtgctaattagtgaaccttgctgtggggtggaggggatttacattcatgttcataccagaatagctataagagctatatgtatttgtttatttgacacttcgaagcattatttctcagagaaataatattttaatacagagaacatgaccttggatctagttaatatgcagctccccataagcccatgtaggtgattagctacatcctaaatactgacagtgttggaactgctgcttctgttagatagcttcaatttgtttgtgggatgcaagtctaaggaactttgtttagagtctccgggcatttcttaatgccacatggtctcttcagctcaggtcttatctggtaggaagctattgcagaattctgctttcctaaggtctgaacccagctatgattgacagctgcccttcagtgaaaactcacactctctgatctgtacttcttattgtaaagaaaatacatgaaatacgtacgcattgcaagtaattttgtttcgtggtatgacctcacctgtgctttcagagcatccttatgtattttagagctttaatgcttatttttttatttagttgtgtgtatgtgtctgtgtgtgtatgtgcatgtgtgcagacaccttcagagagaccacaactaggggtcagatctcttgaagctggagttataggcaacaaatactcctgtgtgtgtgtgtgtgtgtgtgtgcgcttgtgtgtctgaaaatatacaaaattttaaaaattatttttatttatgtgcattgttgttttgcctgcacatatgtctgtgtgatggtgtcaggttccctggaaccggagttacacagtttgcactgctatgtgggtaccaggaactgaaagagcagtcagtgctcttaactgctgagccatctctccaggcttagatgatccttctattggcatgactagaataataaaacatgtctctgtgtgcatagagaggggaccttttagattgtttctgaggattggttaataacggcatacatctttctgtgtattttaattaaatcaggaaaggagatagtttatttctgactgagctttagttattataaactttgcctttggtctagtttttatttactgacttctgaaaggaagaggacatgttaagctgttaaaacaatcaagttcagctgagtggtagtggcacaggcctttagtctcagcaatctggaggcagaagcaggcagatctctgagttcaaggccagcctggtttaaaaaaagccagttccaggacatcaagggccacacagagaaaccctatctctaaaaacaaagcaaaacaaaaacccaacaagaacaaactcccttttctatggtgatcgaagccaccgaaaaaccttgagggggcttgggaaatagaagacaagattctagaacagcactcgcagagaggctgggctgggtgggacaccttttttaaacccagtgtccagctagtaactccacggggatgtgttgggcaagacaatgcttatattttagtatttgctagcacttgcccagatagcctgcaggagtgtcctctccaccttagagtgatgagggatgtcactttaacatatttgtaggatccaggcctggagtactagctacatagtattcatcagaaagggaagttacataatattcatcagaaagagacgttacactcctggcttccggttttgattgaggtgcagatgggtttctcattcttttctttcactcatcaaaatactcatagattagggaagaagaccaatggcaacagtagctaaagattatgctaattttgcctgatttatgcaggcttcaagctttggttcttaaagtgggcttcatctccatgtggtttcatctagcattttggcttgtgtcttattcgtgtttatgagacagggtcttacacggtagccaaggcttgcctggaaaccactgtgtagcccaggttgtcttcatactcagtgttccttctgcgttagagtctcaaatagattataactatgagccaccaatctagtgtcatgagtcttcccctgcctgccgggatcacgtgtgatatctgcgatacctcttctagccacgaagaagttcaattcctgaaaattatacacgtacattttttgttgttgttaagaatctatggcctcatgtatctggggtgattgtcagctactcatcaaagtgaattagaagtcagtgtgtccagggcaggggaaatggatccatcaataatccttgtgatgggacatagagacaggagatcctgaggtcttgctggccagccagtctggtgagccagacagtgagctctatgttcaatgaacatcctcatgtcaaaaaattaaagtggagtgtggaacacactcctgtgtaccacatgtgcatgcacaggtgttcatacccattcacacatgtgtgcatacatacttacacactccaaaaagatgttttaatatgtattaaaataaaattatatatatataatatatatatattttataccacacttttttcaagacaatgtttctctgtgtaagcattctggctgccctagaactcactttgtagagcaggctggcgtctcactcacagagaccgacctgcttctgccttccatatgctgggattaaaggtgtatacgaacatgcctggcttgaggataattttattatcaaccactggaggatagaaaagtctaagcatgacccttctcttatcaagtcacagttcattaactataacccctttcatatcctttcccctcgtagatggatcctaacagaatatcagaagacagcactcactgcttttatagaatcctgagactccatgaaaacgcaggtttgcaggactcgactctggagagtgaagacacactacctgactcctgcaggaggatgaaacaagcctttcagggggccgtgcagaaggtaagtcctccctgacgtcgtaaagtcaagggtcttgatgatgctacagtaactgaatgttaaggcttgtgaagggctaactaaaaaatctatatttcatctctgctaccccagacccaattggcgaagtgacccactaggtccactttcctggattcttacatgctggcgggcctttaggtttcatctttctgcttctcagtcatggccattctccgtctctcccgctccctctcggtcccttgcccagaccatctaaaagtcctgcccagccttcctgcccagccattggctgtactgtggcaattctttattatcgattgaagctagctgagggcagggaccctcaggtctggaagctcagcttttgggagtgaaataagacaaagcattagaatcagttcccaaccatgtggtgagagggaggggtccggagcaggagatatagtgatgtgcgacacgggtattctgtgcttctgtctcatgttctgggagagctgggccacaggagagatgggaatggagaagactggtgtcagcagctgccaccgagagaaacatacctgcctgtcagggtttcctgagcctcctgggaattctgctgccccagaactagagtacttactgactccaccaaaaactcggtaggagtccagtgctcagtgctgtgtgtctgggtgtgaacccatgcgctggccctcccagcttccagatggctactccttgctttgcctcatcatctcagagtaaaccctgaccgtctcaaagccattggaccttggatttgttcagacttactaattagctagtacaacccgttctagcttagctcttcagaggcatagtgtaggtctgacagtgtcagctaaaagtacaggcaaggtataatacttttaaggtaagtataacattttgaaggtgaggtttgcattttattagacttacttcgttgtgtcacatcgcccagacaatatgctaactaaaaaaattcaacgtgatcatcacagagtctacttgcatcttaatttcagagatgactaaaactgagtgtcgtagagttgatgaaatagatgttattgtagcaagcacaggaaggcgtgttgcttatggcagccttatctgcctgtgtgaatatatgcatgtataatttaatacagtatacaattattttaaataagtgaacacaactcggattaggggaaaaaactttaccagtttttaaaaagttatggctttccttggtctgggatgaacctcagtagtggaatgtgtgtttattgtgagtgaggctctgcattcagagtcagagcctggcaaactaggactaaggctagcgtcaacaatagagtcaacggcttctattaaaggcacatggttaccaggtgtagcccatgtctgtaatcccaaactgcggcagggggattgtgaggttgagattagcatgagttacataatgaaacactacctctgaggaagagaggaggggagggatggaggagggacagggggacagaggggggcttttctattaacagataataatggctcgctctcaagaggaattggactgtatttaattaattttgtacttgtttttgctatgctgtaggagtttacatgtaaaaaaatgagcaatttataaaatctttttaaaagctcaatgaataattacaataagccagtacatattggaatagcatgcacattattgcaatgcgccagcatgtgctggaggagatggctctgtctctttggaggcctgatctttaggagggagatgaatgtttcccaaaccttatcattacagttaaccgacatccatagggtgcaactgtggatggaggcactttgccagacctttttcttatgccccagaatgtactcttttatcctagtcaaatgaacggggtttttaccaaatgtattatcctttgatgaaaaccactggttaatgtgacgtccgagtaatttgccacagtaatcagatttctcatttgtcttggcaaatgctaaaaataggaagggtgtggtaagcactctggaagtagtgtgcacatcttagctttagctctaggagatactgagcgaacccaaagaacaattcaggtgtagctgccatcggctttgagagatcagcccatgcagcggtggcccaggccagacatgggtgcaatatcacgttataggcgggcagaacgtggtatttacccagctcgttgtggtcagacaagtaatcttgtttttccctcctttttttttttttttgtttgtggctgtgttttcttggctttatttcccctttagcacagaactctgaaaaccctcttactgggccagctctaccaaccacaatttataaagtctatcaaaacagtctatgacaataaaacaaacactagtatgaatgtggtgtctgatttgtaaagcgatgcctggtttcaattttggcagccttcctgggctcttcccagccagtcgggctggggcagagcggtgagttcaggcggtgaccaggactgccatgcgtggcaggggaggatgctcaccctagtccgccgtccgttttcactcagtggagagacatcttttatttgccaagtagagattctgggccctgggggatgtgactctacctgccttcagtgtgccaggttgttgatctccactccaggaccccgcctgtagaagtatttacaggtttgatatcgagtgctttaaaggataggaagaagcaaagcgtgggctgctgagggggtaggagaaagaggggggagggaaagagcccaagtccggccagagctcctgtgctctggacaggcggatgcgggagggctgccggacgctttccactcggcccctggtgggcatctaagccactgaccccactctacgaggggtggacaaggggcagccccccgataccagggtcccggggatacgggagagagggatgagggagagaggttcccacacaggcgagagtccttagtccggtctgtggctggagcacaggaagaccttctgatgggaggttagacatggctcattaggagaaagcctatcccatcatccaagcacagtgggccttgatgaacagagacagtctatgattttagagctttattgtagaaaggcagggagaaaggagagaaggcagaaagagagagagggactggccatggccaagaatgagagaagggggaaaggagagagagagaagaagggctagagagtaagaaagtttagagagagcgaggtgaaagcttagagagtaagtgagggagagagtaagagggagagtagagtaagagagtgagaggagagagaataagagagaacgaggaaaggatgaggagagtgagaggagagagagagagaggtggggccaagcagcccctcttatagtgggctgttttatcttgttgttgctaggtgactgggaggagtttagcctgaaggtcagaagcttgggacattgcctacgtgactactagccacgattctcctgtgggggctgtgggggcagtaacttcgacaggagccagggttccaggagacgtgaggaaacgcctaccttcccatgtaggtgaattatcccccgggttcagacctcagctcgactggagaccagcctgtctatgcatagcccattgctccacagcaaagggctattggctgctttgtctgtccgtttatttatttaatctatatgggtgttttgtcttcatgtatgtctatgtgtgtctggtggcctcaaaggccggaagaaggagcaagagcccctagaactggagttctgagcagccctgtgagtgctaggagttgaaccggggacctctggaaggacagccagtgttttgaactgctgagccatctctccagcccctgtgcttgtttttcaaagctagactttaaactgtgaactgtgtgtatgtgtgtgcctgtgtgcacacacatgtgcgcacgaattgtgtctatgtatgcttgccctgcttgtatatacagaggctggtagattcctcactcgctttttttaattaatcattttattcatttacatttcaaatgatatcccgttggctaacaggcaggacttagaagaccacgccttgcagcaagggaggctagacctctgtcttctacctgaactgccatttgcttgtgattcttgatatacaacacctatctacctccccacgcccacatagatacacacatagatacacacatatatggatcaaggattaacacaagcctgaaaggtttaggtggtcaggattttattttcttaagttcacatgtagggaactagagacagcatggcagggagattgaaaagtggatttaagaggaagtgtcaggaatgttgatggctgcctgctgttttcagctagatttcatagattgagaacatttactcaaagccagaatgttcctcattttgagtggttgttttcttttttttgttcctcatggaactctgatcctttaggattctaatgttgattattagaaagaagcctagtttaagaaaagaaagaaggaaagaaagaaagaaagaaagaaagaaagaaggaaggaaggaaggaaaggaaggaaggaaagaaggaaggaaggaagaaagaaggaaagaaagaaagaaaggaagaaagaaagaaaggaaggaaggaggaagcctagagacaggcttgtatatacatctttaatcctagcactcaggagaagcctggtctatatagtgagttccaggacagtcagagctaagtctcaagtaaatagatagaaagataagtgaatagatagatagatagatagatagatagatagatagatagatagatagatgatagaataaaatttttaaaaaaagcctttcccctaaatttcaactgaagtgaaatagaaatcactggaaatcttagacaggttatagctgcctggagactttggagttgttatgtggatgaaatttctcctaggcttcctagttacaaaagaaggatcaagggggaagtttaaattccatttactgcctctttgcttttgtgttcaagaatatgtgtcctatgagagtttctcacaagcccagaaggtttgagtttgggtcactggcattctcaaatcgagatgttagtcatgtagtggttttccagtagaatcccgtcccccctttgccaccgtggttttgagaattgcaaccaacctcagtcatatttagtgtgtataaaagctgtcttcatgggaaatctggagtgagatccacagagatttcctacagagccaaagctttgtacttacttttctcttgctgtgataaaacatcatgaccaaggcaacttacagaagagagggtttgcttgggcttccagatcctgagaagcaggcattcatgatgggctgatttacagccgggaagcttggcagcatgctgcagacatggtagtgtgtaccagatgctgagagctcacagtgtgagtcataagtaacacacacacacacacacacacacacacacacacacacacggaggggtgagcatgcatgatgagaatggcaggaggctttgaagcccatctccagtgaaatacttcctctagcaaggttgtcccttccagaccaccacaaatagtgccaccaagtgttcaaatgcaggagactgtgggggacattcttatttaaaccacagaaccatcactgtcattcactcaacaaaggctgatggtggtgtgtgctcaatctcagggaagaaggcagagccaggagggttgcaattcagaactaaccagtaagtgatgccaggggtgagctttgatctgtgctgtgggtgtcccaggatggaagagaaaattctgagtgggcatcttggaagaaacagagttagaagcattcacccgagaggagggtattcatgacgggctaacttcagaggtttaatggagcttgtgttgctaaggggtgggttggctcgtgaattcgaggagagtggcaacctgtggaatggatgggaatatgtgtctgggggctgtgttttacaatagctgcatcttcagtgaccttggggcccttgcttaagacctcccagtgccttggctagaggttctgccttgatagccagaaggatggaccccaggatgtcttcaaaccagcctaagtgctaagagccacggatggacagaacagcctttttttgtttaataaattaaatatgataaagaaaatggagttggttggtggaagggtggtattagaagctggagagaatcatctatatcagagatgatctgatatggagtgcctgttgagcttgaagttcaaggtctagaggaagcccattctaggaagcatcctggttattaagaggctactccagttcttggtcttggccttttgggaataccaagtggtgatcacagcaatggctgtggtaaacaaaacaaaacaaaacaaaacaaaacaccaatttaaaatgccaagggtaagactcttccagaacacgaactcctctccatatgcccattcagccacacctctggtccaccctctcgagtggacagcttagtcattacgtcaccaagctaggagcctgaggatggtttaactcttgcccaccaactcttccctgactggcggccagctgtggattctgcctcctcacaaaacatccaagcaggatgttacccgatgaataaatggatggattagggttcttgtgtgtgctcttttatcatttccggcccattttgtttagttgttcttccaattgtctctcaaaatgaagtgcaggcatttctcaaaacaggctcccactaacgcttgcccacctgcctgtgtaatcaggaggccgtcttggatacacatggagtttatctgtacaccaggtatatgcacccagattgggcctggctcaccataggtgagcttttcaaggacccgtgacttttatttatgcccccagtggcaggcatgtggtaatacaacttgaagcacaaagttaatgagtgactaacccatatctatcctgaattatgtgtcacgttgtgtatgggcagggttttcatcgctatgatgaaacaccatgatcaaaagcaagttggagaggaaaaggtttctttggcttacatatgagtgttcgtcatggaagggagtcagggcaggaaattagaagtggctagaacctcgaggcaggagctgataggaaaaacacagcagagtgcttcttactccctatgttggcttgctccctatggcttgcttcacttgccttctatagaaaccaagaccacctgcccagggatggtcccacccacacggggctgggcctttgatcactaattaagaaaatgccctacaggtttgcctgtaggtccatcttagggaggcgtttttttctcaattgaggttcccatctcccagatgactctgccttgtgtcaagttgacataaaacaagtcagcacatgcggctagtcacttatcagaagcaagtcatgttgtacactcataagatttgttagggttgtgggtctccagtatagtctgtttccagagggcagctttctctctgtagccgtgagcctgttaggggcttttctctggtggcctctttccattgtcctcctcagtgtctgcagcggctggtctgacatcttggctgccctgggactcctactcatagagtatcacgaacagggctgggagactgtgaaagccatccttttgtgaggaggcggtgtttggtgatgtagaaagctctgctagttagtgtatggctggcattcttgttgctgtggacacagcaaagcaaaggcacgccacactcctccgttgagcccctgcatacccctcctcccctttaaaaatgcgtagcataatagaagacactttaaagttgggcttttacgaagactaataccgctgtcataaggcatttgctaaatcaaagcccaaggagacctttaaccactgcagaagcttcctcatttaaaccatgaaggttaaacaataaaaactaattttctattcccagagtacccattgcccttccaggaaaagcatcactcttctttatgaaaacaagggacgcgtagctcctcgggcgggctctcggtgtagaaagtacatcagcagttgtagaacgtctcttctgctcactcctggaagaaatggtacccatgtggccgtcacggccaagttcttcaccaggagctttcaaagacgtccatggcattggctcagagagcaggaggaggtccgaccctcaggttcagtgggttagaaaccccttctgcctttgccctctccttcttttcctgagctgctggacttcatccctccctcatggggatggtgaggagttgtgttcattctgagagctctcccggggctaaggtgaggggcatctctggtgacagaagagggctctacagtcttagctttggggactcaaggactccacctaaggacctgcgccatcttaactaaggacaaataaccatctctctctgggtatgagctttagggtcagggagagccgagataaggattctaagtcctgctctggcaggggttgtacagcgacacggtagttgctcttccagttcttggaggtgaaaaagctttgtgcctaaagatgactcactgcaggtaccactagggcattctggctaggtacaagaccaaaccaggaacgatacaccttgcaagtcaatggggaaccaaaacagaaacaatattccttgcatgttaagggttctttttgcatttaaggcagttaaaaataagttcctgtttgtcctatgttaagcccttgcaaattaaggtttctatttgtaattaagaataggtttctgttgataagttatttctccgctggtcaaatgagccaattccagccagattagattatattaaagaaaggtttgttgggaagctactcttgggcgagttctctggcccctgggaaggaggccagggaagtcgccattggaagagagagaggagaggggggaactaaagagagaaagtgtgcatgaacagagagaaggggagagagagagagagagagagagagagagagagagagagagagagagagagagaagagagggaggagaacaaaatgtgtggattatatagagaagagcccctaagggaagggcagcccagcccctgggctggaaagttcacggttgggggcagagtatgccagctagggactgagggatgctgggagaacctggaggccaggtctgctttggtgtgtaagataagcatctcagtcccttgacccaggatctggaaccaagcacccatttcttaaatctgatgtaaactgcaaccccgtgtacgtgatgtatactgtaccctcgttccatccctatcattctttctaacaatgtatataatagccaactctcacccctgtgaacaccttacctcttcttaaaaaaaaaaaaaaaggaatttcatgaggccagcaggggctgctctcttgaatcctgagacttagggtgagtcatctggctgacgagttcgtggtgcatcccaaactacagcttgcttgctttaattggacaatcgtggatttggtcttttctcctcaagattctcaggtttagcaaaaggagcagcaggtatcaatggtgcccatgaatgggaagccaggttctggcacccggcaccatcagaagcagctccacacagtactgccggcatctacccacagtgctgccagcatccttgagggaggaggtggcccacaggggaggaagagctatgaagccaggcagtcagctcagttaacagcttattgctttctctacacccaaagacttcagatagcaagtgttccagttttccccttgaccaaaacagtttctaagtcttaagatgtggaaggacagtgggatacgccttgcaaaattcctatctcctaatcgtgtacttggttgctttggcaaccagctcccatcccttgagttatctcattggcatgaataggtctggttgaaaaaggtttatgaataacagaagatgctcctatcccccctctccctccctcccttcctccctccttctctctctctctccctctccctcttcctcctcgtcctcgtcctcctcgtcctcctcgtcctcgtcgtcctcctcctcctcctcctctttcttcttcttctctctgtctctctgtgtctctctgtctctctctctctccctcctcctcctccttctctctctctctctgtctctctctctgtctctctgtctctgtctgtctgtctgtctgtctgtctgtctctccctctatctatcttgcaatatcacagaggcccagtcgtgagggggccttataaaccttaggactgtacttgttcctgaagtcaccaagtgatttcaagaagaggagggacaagttccccttgtacttaagatgctttttcctgccaccatccatgcatctgtctgtggcacaaagactgtgagattaggtaggaagaggcaattgtcttcctgaggagtgatgggatcttgatgctgcagcctgggccgggaggaggagataggatttctgagctatttaccaagtagaagtccacaggacttcccagcaggagtgggaaatggactattcatttccagaaagagccgggagtgtggcattcaagtgctaactggctgatgaatgcactattcttgtaactaggttggagaagaattacatgaagggtatcattaagatgttaaaatgaatgcattacatatgttaacaagtgtatgaaccctgtattatatctggcaagcggggtgttaaatccttgttcaaccagccagatgtccctgcagctgctgtggtattgcagagggaggcagccacctgagacccttgctactgactgctgcgatagtgtctagtgtcgggagcatctggctgtacaaattgcttctcccgtgatttgattgacaggtaccaatggatcacgtgattcctatcacagtccaaatgggatttcagactgataaacccagactccaataacttgaccttttacatggaacctaggcagctgggacatatatttttattatttagaaggatggtatccagattgcagtcaaacaaacataaaaccaatttaatcttatatactcggggtcttgttcctagtagttagttatttggcagtttgtaaaggcggtttagaaattggttggaagtgttgaaatccctagagccagccaaggactttcaagtacaactcagagtttggtatttattcttaccagtgtggcctcccataagtgggcccaacttctcaagatgagcagctatttcctgggtttggaaaaaaaaaaccaacaaaaaaccaaccctcctaaatcatttaaaaggccatgcaggggtctgaagggagctaggtcctaggagactggatgctttcgctatcacactcctgggaaccacactcttttggatgtcctgtttaagaaaagtcgcacaaagtcaagaccacagttacacaattgatcttttgtatgccgtgctccctggaggagagattgtgaaatcccagcattttttcctatgagttaaactacagttgaaattaagaaaaaaaatcaaatcagttgttttcatgtctctgcagatgtactctgacagaaaagatgaaaaaaattaatgtaatctactttgacagagcactcagtgttgaaacttccccattggaaaacctgggactgtcaattgggacaatgtccactaggtggcactgtgtccgaacatttatccttgacttggctgcaattttggggggggatgcccactttattcactttcctcttttccttctgtcttgttccctttccttgttctgttaaaggaagctgttatagttttggcctaaattatgcttatctaaaaatgaatacatctttttgaaaagactacttgttacagtttgaccataaattcgttcattaattcatggtatttcttattagctctcacaaggttaaagattcttgttgtcctggatagtttatacaaatcaagataggtgtgtgtgtgtgtgtgtgtgtgtgtgtgtgtgtgtgtgcgcgcgcgagtgtgtgtgtttcgcaggtagctgtgttctgggaaggcagattgttgatcttctaagatagggaagtcaggtagaaaactgggttttctagagcaaaacttgatagtgggatctaggcaaggggggtggtagggagggaagaggactctgctctgttccacactctaagatctgtccaggcttctgggatgtttattctatgcgtttcatataattctaaaggatactacaagggaaaacttggttggctgaaaacataaggcgttactatgtttcaatgtgtgggatagaaatgtaactctttgagtggacctgactcatgaaaacactcatttagcaatcccgtttctcaaagcatgctgtgggttagagtccaccttacagcatctttggaaaatatcagtgcgatttgagaccaatggctgtgagttggaccagggcgactccaaagtttccactgaattgcagctgtgtcccccagccggaaagcatcaagttctacttagaagacatttatgtgtgcatgtgaaggggtgcacttgtgtatgggtgcgtgtgcgtatgtgtgtggaagccagaggccactttggggtattgttcttcagaagccacacacattggtttactaggacccgtccctcactggcttgaagagtgacgattagcctaggttggctgtccagagaattccaaatatgagcttgtcagtgctggggttatgcactgagcgctgagatgacctactgagtgctggacctacctaccaagtgttggtatgacccactgagggctgggatggcctactgagtgcataggttaactactgtgtgctgggatgacccactgagagtgaggattacgagagtgcaccaatgtctagtattccaggttctcttatttttaaaatccatcaaacaaacccccactggttccggggatctaactcgggtcttcttggttgcactacgccaactgagctatccttcagctaagattacgttttattcgtctcaaaacccaaagacagtttaaaatgatagatttactagaatggattgccctcaaatagccatttctttggggttcggaagattggggtagagacatacatgctgagtattgtgtctgtgtgaccagagctcacagagtcatcataagatccctttttggtattgaaacttcctttctgaatgtctgagaagaattacagttcttgggttctctagagatataacacaaaggcatcacctccctgggtctctaacgagcgctctaattcatcctgggacatgaaccctttcttcccctgacagcaggcattgaaagtgcttctgagaggtgctatttattgaattttcttgtaactaaatgggtctgtggcagctctgacctagaagccactgattaaatgggcaaggaaagtgcgttcacagtggagagggagaaaaagacccctgcccattaatctggggcttcagcctgctgcttggtctgggtctcaagctttaagatcatttcctcatttgcccatgtagaaatcctttcaaaggggatttgtcgatctcagtagagactgcagcagcagctgctagtgtgttagaaattcaagtcagagactccagcccaggcttcctggatctcagacgacctgatcctgcagctggcacctgcctgccctcctttaggtcagcatgcaccaccctcagttttgagtgtcactgccctggccacagtgacatttttcttgatttttttttctatgatgaggtgtgtgtgtctgtgtgcgtgcgtgcgtgcgtgcgtgcgtgcgtgcgtgcgtgcgtgcgtgcgtgcgtgcgtgcgtgcgtgtgtgtgtgtgtgtgtgtgtgtgaatcaagcaaaatcagaaaattccagaaattgggataccattgggaatcccaagaagagaactgtggactagaggtcagcaggggtggggaggaaaaggaaaccaactaagagccattgctttgtctaacgcaagaagccaccatctgcttaacattccctacagtgggcttcaggctgcacagggacccaggggtaggccaggacagaggctgaccttatgtgacctcagtggtatctctaagagttatgaaaaacagaatagattcttatcttctttggggttgtctgaaggcagagagaacaataaagaagaataaaatcttatctctcattgccaagaattgaattcatgtcattttacctacccatttattggtctgactataaggagtataaggctgaaagcctttctgtctacatagggaaagctcttgctacgtgatctattctttagaccttgtggggtagtaacagtcggcaggagtatttatcccattaagtgtgaactgggactccatcttgtgttggtagttccaggtatctgggtttactgggcactcgggctgggtgttcacctatattacctcatctaaccatcctgactggtctgctcttgaagccatgatctgaaccaaggcaagactagagcttcaacaggctctgccttatgggatattttgttagctaacgtctgaattgggtgggcacatggtcacttggtagaggcttcattctgggagcgcaggttaaatatgcagttatctactcctatgttcttatactcaatcgtcatctggcttatgcatctagacttgtttcctgcagtattttaattattggcattctaaaagcttttagactttcatatagtactttaaacacactgacttaaaaaaaaaaaaaaaactactgggagccaggtatcattctcttacttgtgggctgagcctctgcatcataatagaaactcactactgaattccatagaaagaggcccactggagtctgaagagaacaatatattttatatacacttcatttccatttatgtacctgttatatattaattatgctcagttgttttgttttataatttaactttgtttccttttattgcctcaaaggatttgtttggtggtggtggtggtggtggtgatgtgtgtgtgtgtgtgtgtgtgtgtgtgtgtgtgtgtgtgtgtgtgtcggactttttaagcattttgggagctcagatgctaggaatgtgcgatccaggaattctgttgcctctcagcttctggcttcattttaaagcatcctaactgattttgcatctggtagtcctgcgtaaatatatatatatatatatatttttttttttcccgctgctttacacaaagaatgagtttatgaatacagttctcctttatttcaggaactgcaacacattgtggggccacagcgcttctcaggagctccaggtaactatgagtaatttgaatgagtgtttgaagtcctgtatgggtggtagtctttaagctcatgaacttctgtcatccccagctatgatggaaggctcatggttggatgtggcccagcgaggcaagcctgaggcccagccatttgcacacctcaccatcaatgctgccagcatcccatcgggtaagttacatttccacccagcctgagaacattgtttcaatctttcattcttcggccagtggacttactcaaaccttctaaaccatgaggaggaggtaaacccttcagttgaaccctaccttgccaatcctgtcacatcatccctgtattcactctcagggacggaagtgggtgtttgagctcctgccggttggtgggtgtaattgctcacagttcccatccagtttccctctgaagtagacgaatttgatatcaaatggatcccccacttcctactttcttggtggatggctgcagtcaggaagccagagacatccccatttaggaaggctgtgtgggggctagcaggtgacagcagtcctctggaagctgagacattctgtcccctttccttatgcttatcttcccagaataagtatttactttattagaccagagacctagttacttttgaagatgaggacccagagctgtgtgcccgtagctacctcagtgtgctaggtagtcatcacagagccccactgactgctcactccgagctaggcaaagatgataaagattacagagagcatcatgggagagtgatcactgagcctcagtgttagcaccactgtggcctgcatgccacgcacctccagtggctgaggtgtttcagtgtgtgttcattccctctcagcctcactgcaaggtagcagttaccgttcagattgttcagctagtaccacagtgcttcacacagtttgccctttgtttgaggtccctgtggttacaggaggagaagctgacattcctctctacttaattcccagatcggtgccgtgcattatcctagacgcaggcacgtgtgctaggatggctttgtcagaaggcagttctccaagggtcacattacttttgctcgaagtagattagtttggaaaccagtgaccgggctctaatgtctccttgggcctgtgacctgcctgtgaccttgtatgaagtactgcaatctgcgcctcagtcttcataaccagggaggctctgtcctttttgtagggcggctatacatactatgtttcggggtggggagggaccatattacattcagtagatgtgatctaaaaattactatttgaacttaattaagtcattatgtaaattccactttgtttcataaatggcttaaggcagaattttctcctttttttctgagtttaaactttctgagtcttttaaataatacaaatctatcttttaataaatagttttgagccattattatagcataggccatagcgatatttttttcctgatgggagatgccgacggtgagaaatcacctcttgagctgtcaggagattctctaggctgcctgctctgatcctctggatagttacttccatagacagggtttctgtctgcgtgggcctggtggtgcttcactaattttctccgagtggggaaactagtttgcatgttcacaacggcaatcaaattaataccagtgtgcgggctgcgtgtgctgtgactgtaccctgcatttatcttttcagttcactttaaatggcataggataaatattgcctaagagcgtgtgccaaagtcggcttggcaaccgcaagcatgttttagttataaagctccctctgcaggcacctagaatctactcagcgccaaaacccaggcaaaactcctggttctgttccgatagctctttggtttaggatgcagggaaacgagccactctatgcttctgtttaagagaatagagttagttgttctgtttgggccaacagcccctctaaccccttgttctctcaatgctggccagtactgaatgattcagaggaagctggctctcacttgctatttttattttggagcactgttatatatttatttacacaggaggagacagaacctactgtacgtggactgttaccttaggaggttttaacgtttttagagtaaaatgcactcggaagttcttgggggtagggtcagaatatataatttttcttaggaagctgttgcaggctaaatgtttgctgaggtccctttccaacctctagcagctgggagcccagcagagagctgaggaggtcagccagactgggcgaagaggtcctcagcgtgcctcattagcaatagaagtcctggaaggcagggcagccctccgccctccgcacttccgtgttctcgactgttatctttggtgagtgcttttatccactctgtctagctttccagcctttcttctgcgggcttcgtgaactccccaatgcccagtagagtttctctcaccaagatgccccctctcttcgacattttggacgcaaagcttccggttttctagctcacctgtctgtcttctcaccaagctcagctctgctgagcatcaggagtctcttcagtttcgtttgggcagctccttgtcactgaagtcaaccctgttgttgacagcacgcagcaccggacaggccatctttatatgctcgctttccttacggtcagcggtaagcatcccgaggggctgctacttggggaaagtcttcattatggacgaagtgaattcttctgcactatgggaaaagtgggtgtccagaggaagcgccacatcaggtgtcccctgtcagatctccaggacgaaagaaggcttgagaacggggatggagaaaagcagagaggcatattatagcatagaggcttccactggactcgaagtggcacacgatcagggttcctgcctttcctcaccacgactgtgtattgcttttttgtcttccttggcagctcactccaatgtgagttagccaatcccatagaaagaagggacttcacactagtgatttaacttgtctctattaagagacacataaatagcaattgaatgaaatacaggacagagagaagctggggcaactatgggataatgtgagatggcaatatcttgaatttcatgagccttgcccatgggttaggtggctatctaccaggttggaggagttacaatgtcagcgcttatgtagtgagcaagcttttctattctcatcttgactcacttgggaccctagggtcatgtttgtatttggaacatttgactccagggagagctgggataggatctaccatggcaaaggagaacaattgctgcccagagcctgaaggctggtgactgtagcagccctgctgtgaagtctgagaacacacctgtcctctttggaagctggaactattgtttccttggtcatgtaatgatgggttgtcccactgtagaatgaaaactgcctcatctcctccctcccactttttctgttacctgttgttcagtctgctgtagcttgatttggaggtcctcagatcaccagatccaagagaccatagaccatctctggttcatcctctgactctctagagaaagatataggtgttcaagtcttcccaggaccaggccatagtattccttcccataaaccgtagcataggtggtattattgctgctgctgttgttgttgttaataaaaggatctccttggatccaccaaaccaaagagttgtcctttcatgagttggaatctagttcatggggtggtggcttcaatgtcagtctcagggctaaattatattatttaaaaataaactatatttattttaaaataaattatatttatttttaaataaattatatttattttaaaataaattatatttatttttaaataaattataaaattatttatgtattgttgtataaagcaataggtttcataatggcatgattgttcaaatatgtcatgtattttgatcttatttactttccatcgcactcagtcaccaatactgccctttctttttgcatgattgtggtgtgtaagtgtctcctagtttccatacatgagcaagaacttgtagttcttgtcttctttggtctccctgactgacttctgtcatttactatctcaagactaacaagttgaagacaacatggcacccaacatttttttttatgctactgaaacaaattatcctctgctctcattgtctgagacctgtctgtgttttgacttgctgacatcagagaggtggcagtgttagtttggtaaaaactcttcataaaatccctagggaaaagatgtggtttggacctttccagagtcctgtaaactctcacctatcagttatcatgtttgccagtagaataataaatatctgcattggtacacatatggaatagtttgatttattacagaggaatcaccaatttttttttaaaaaattattagatattttcttcatttacatttcaaaaacccagttatacacatcaaggacctgggctatgaacaccattgggcgcacagctgatttagaaggctctgtagaactttgacttctccaaaaacagtagcaaggaagccctttgtcatttcattttgtggaccagaaggggttgtaggagaacatggaacttgggagtgactttacaatgtgtgaatgcaattgcgtgatgctgaggagctgggaagcttggagcttggtggcttctggggatagtcaccgagtcatgtgacccaggctaaggtggggttaccagatagtgacacaattggaggttggtctccgcagagcttctgcaacccagattctcacatccctttacacaccccccaccacaaactaaataaaggttagctatacgaaggatggaaggaaggattctcttcctatacaagttggtttctttccaaggtgaagcgactctggtcattaccctctttcaactaggaatgaattgctcctgtccacggggcttaactttcttctttttatgctcggtagcacctacatggagtcagttttgatccttttctgtgggaataatttgcattctctccctctctccctctctctctgtatctctgtctctgtctcccccccccccataatcatagcaattctctgtattttccccaagctttgctgctttcctggaccatgttgctccatcactagtatcctatagcttaagggcaggatagaggatttttagttttgtgcctttacagtgcctgacagaatgcactaagtacatctgcatgcacccaggcccatatagaaaatgagtatcaaagtaagttattgtgttggaataaggattgttatgttagtgtatgatgctaccccaccagcctgtggaaataatgaggaacttttctcatccaagtagtggattctaaatcctgtgcctttgtttctctctaggttcccataaagtcactctgtcctcttggtaccacgatcgaggctgggccaagatctctaacatgacgttaagcaacggaaaactaagggttaaccaagatggcttctattacctgtacgccaacatttgctttcggcatcatgaaacatcgggaagcgtacctacagactatcttcagctgatggtgtatgtcgttaaaaccagcatcaaaatcccaagttctcataacctgatgaaaggagggagcacgaaaaactggtcgggcaattctgaattccacttttattccataaatgttgggggatttttcaagctccgagctggtgaagaaattagcattcaggtgtccaacccttccctgctggatccggatcaagatgcgacgtactttggggctttcaaagttcaggacatagactgagactcatttcgtggaacattagcatggatgtcctagatgtttggaaacttcttaaaaaatggatgatgtctatacatgtgtaagactactaagagacatggcccacggtgtatgaaactcacagccctctctcttgagcctgtacaggttgtgtatatgtaaagtccataggtgatgttagattcatggtgattacacaacggttttacaattttgtaatgatttcctagaattgaaccagattgggagaggtattccgatgcttatgaaaaacttacacgtgagctatggaagggggtcacagtctctgggtctaacccctggacatgtgccactgagaaccttgaaattaagaggatgccatgtcattgcaaagaaatgatagtgtgaagggttaagttcttttgaattgttacattgcgctgggacctgcaaataagttctttttttctaatgaggagagaaaaatatatgtatttttatataatgtctaaagttatatttcaggtgtaatgttttctgtgcaaagttttgtaaattatatttgtgctatagtatttgattcaaaatatttaaaaatgtctcactgttgacatatttaatgttttaaatgtacagatgtatttaactggtgcactttgtaattcccctgaaggtactcgtagctaagggggcagaatactgtttctggtgaccacatgtagtttatttctttattctttttaacttaatagagtcttcagacttgtcaaaactatgcaagcaaaataaataaataaaaataaaatgaataccttgaataataagtaggatgttggtcaccaggtgcctttcaaatttagaagctaattgactttaggagctgacatagccaaaaaggatacataataggctactgaaatctgtcaggagtatttatgcaattattgaacaggtgtctttttttacaagagctacaaattgtaaattttgtttcttttttttcccatagaaaatgtactatagtttatcagccaaaaaacaatccactttttaatttagtgaaagttattttattatactgtacaataaaagcattgtctctgaatgttaattttttggtacaaaaaataaatttgtacgaaaacctgcctggtgctttttgttcttgttcgctttcgtgtgggtcttgctctgcgatcctgttctttccaatatgataatgtggcttctatctttctccaaaggttactgggagaagtgcagatttaattaaaaactaggaacagattcaattaaattaatgaaccttggaatttgaaaaataatttgcaggggatttgtatgcaaggatgtagccagagagaaaacagacttttcactcaaaaaaggaaaagttttctctcctcaaatcatgagaaaaatatggtgctttgagctggggggaaattggggcttgctttcccttaccgtagtaaaggggggctcactttggcctggacatgtttcctcttggaaatcagtgtggatgagctgtctaaaccacgtcgattactcatgaagggcagagaccagaaaacagtcagcttgggaaggcacagcaagccattctctgagatactcgtcactggaagataaatgttttaggatgataacaacagcctagaatagagggagggatagcagatgttacagagaagaaaccgtaaattttaaacagcggagctatcacggtgggactcgatggtgttggccacatacacggactattttacatctgtcagtaaatctgagtctgaacagtgcaaaacgtgacttgggcactgtgtatcccgacagctgctgcttgtttcaaggaagaatttcgaggagcagccgagtttctgcagcttccgcagacatagaattttgttgcggcctcatgagctacccagcttagagcctgctccagcagtttcggctcgctcatttcatattactttgtgcagcgtcagtgatgtgctagttacagtcccaggcaccatggctacgaaggcaggtctcccagccccaggctcctgttctagcgctggttctgcttatgttagatgtggcaaggagcatgcgctgcttgatccaaatcttgggaatctcagagtctaaaatgaaaccgcaggaaatggaaagaaagtacaatgtgggcacagaatattcactattaatttttactgaggggtagcatgttagttatttttgaactgctgtgattaaaaatctaaagtgaacaccttaggggaagagaggtttattcaggctcaagattttagaggtttcgatcctccatgttggggagatggcggtgacagcggggcggtcaaggagcagaaagcatgcccatactgcaagtggctctgtccctcggtcctctcaggaaacgtccatgctgacatgctgtgccttcctgatcagtccagactagcagaccctcaacatcggctatccatcaagaataaccaacttgcactctcccaaagatgcaggggcaaagtgtcaggatcgcctgcggtgattcgtgggggctgtccaacatgtgaaagcaacatggcttcacatgatgccaagaagaacctccttggcagccctgggggattcagccacagtgtgatgtggaggataatgaacgctacgctatggcacctcaggtcggttgggggaggggagacaatgacttagtgacttatttagaaatcaaccagtgttttaaagtgggtaacggcagggatgggatatagtgagaggcaagaagccacctcgcttccggtcatgcctcagtttgccaggctcggagcagcatcttctaagtgggtttaaaatgcaggcgggaacacacagcacgtccctgcttccttctcttccttctgctttgctttcctgtgcatctctttcttgtgtctgccccctacgactgaaccctcccatcctccgcctgcccagactcccgtgtctcccatcgtcctactttgctttctgttgctatgacggaagccgcaacaaaagcagctagggaggaaagggtttatatggcctacatgtttcaattgcagtccatcggagagggaagtcggggcaggagcagaggcagaatctggaggcagacactgaggcagagtccacagtggagcactgcttactggctagcctgttttctgataccaccctggacctccatcccaggggtggcaccacccacagtgacctggaccttcctgcactaatcattaatcaagagaatgtcccacagacctacccagaggatgatccgatggaggtaaccctccagtggacgttccctcttcccacatatgtctaagtctgtgtcaggttgatacaatctggtcagcatactcatggtccttaggctgttgggtctccttgagatgaacgtatgtccctagagtatgtccctgccccgtcacagctgactcggtgggaggcatgacaaaacagtgtaggaaacctgtgtctagtggaagtaatggatctgagctgctggctccttttacctgcagcatgtcagccctcttaacctgccaagtctggggaaggagagcatgccaagtcccaggttatctgtcttcctgaatcaatttttacaaccacaccaggcccatgcatccaaaaactgacatgaagcgattcttactttagtgtgttagctttctccaaactgtctcgctttttgccattcatttgaaaaggaaaaaaaaaattgcaatggtattttgtctacagctataaaacaagcatccttttttactaataacgcacttatgggaattcttttgttcttttttaactttaaagatttactgtgtgtgagagggaatgagagagagagagagagagagagagagagagagagagagagagagaagacgaatgctctggaaccaaagggggccttctgatcccctggaactagagtcacaggccattgtgagcatctttacatgggtgctgggaagtaaattcagatctctgctaagtcacctctccagccctgtttttattttggtaacttgaaattctattcggggctcggtactacggcatcttaaacaacattccagttcttttgttttaattagagatggcctgagccaggagcgttggcatctgagcacagatgatgggcatcccagatcaagcaaagagcacaaatggcttctcttccagctttactcagaccgtcagtgtatcagatgctgcccgcccacactggggaagacagtcgtgactcagctgatcaattccagaaataccctcacagacacacccagaaatagtgttttcctgtctgtctgggagtcctatagttgttcagtggatctgcctcataaaactaactatcatgcgacattaaggactccgagtcacctgtaacataacttagaagaagtttgctattttagaaacccaaacgcgcttggacaatggcaattttacttctcaacttgatgggggttaccatggaaacaaatctctgatcatgcccctgagagagtatctagattaggtttgttgaagtcagactagacttgaatgtgggcagtacgattccctgggctgagttcatgcccaggtcggcagtacaggagtcattaggagcgtctggtccgtggggatgagatagaacagtgagattccatattaacccaggtttcacggctattagtaccagcatctgtttagctcagagcatgtaactcaggaggaagactggcagaatcatcaaaaatcatccagtcgctgaatgtctacccagacaacagagggcgccatgtgcctgtgagtcctgggctacccagacaccagggggcgccatgtgcctgtgagccttagacagagagataaagaagagcctttgcagggtgaattctcaaagtatccacgaagtcctgccttgaaactatgatgagctctgttgacctctgaatgggtatggctgctataacataacagacaaacttggtgggttagaactgcagaaatgcattcgctttacttctggattaagaggttgaaacaaaggcgtcggcggggccataacttggaaattctgagagccaattcttcacctctctggtttccaaggatccaaggagtttccagtaccagtcttgtttcaaattctgcctctgccccgtcttcacactttccatacctttgatttccagtcctccatctgagctctttattttattttatgtgtgggcaccagcatatcacaggtggagtacagaggtcagaggacaagttcttcggggagctgattttcaactcggtcctcgggcttcacacccgaggcctccacctagtgagccatcttaccagcctcatcttttctttcttataaaggaacagggcgtgacgtttagggcccaccctgacctcatcttcacatacagacttatgcctgcagtggctctttgactgaggaaagtcacattcacgagtcccagaattcataggctgtcgacatgtcttttactgggggcccttccacctactagactctccgaagcatcatgtctaaagtctcagcggctctgttgccagccactctcctctcctcccttttggggccttggcttgagggagggattgggaacgaagagactgtgattatgaaaataacaagcaaaatacagagcgatgcacatttctgtgtctgcaaatttctaaaaatgtggaggcaaaccccaggggaggttcacaaataccagcgtgtatctgtgttggagaggtgggattatgggtgttttcatcctgttgccacgctgttgttacaccgctattgaagtcggcagtaaggggcattaaacatcttttcaacataggaaagagactctggcttttggaacaatctaggttctgagcggtggccctgtgtgcttttgaagtggaatgcccaggggcttgggccgagcactggggagctggaatgtgaaggagccagctttttgagctggaagaagctctgattttgtttacagcctttgacttggattacattcctgattacaggctaaatatacctgtgggagtcgggctcagtcaccactgctgactgcatcactttctcccaagatttgccttccctctgtcttcctgattctaatgaagagattaggaagcaggatgcggttgaagaagggagagcagggccctgcatgcctcaagtgtctgtttaaggggctcagagttaatttttcaaagattactttgacagcttgttttctgccgtcaacagggagtaagcaagacagggacgaagataaattaattgaaatgttttcttagcatgtaactgtggcatggtgatttaatcaggtatgcatctttgtaagggattgttacaagaagctcagagttaaattgtatctttttggatgatacaagagagcttatggagaaagaattctttttttatagtagaaattattttgttgtacccaagttcctatcaacccaaagaagtctaacttggaagattatggtacttacagagcatctactggccttggaacagaggtaagcttatggcccgttagcactgtgagaattcagatgttctatcagtaaagtctgatgaaaggaagtaaactcctcagaattcactaaaggagcatgtagggacatactgatcaattggtggtagatctaagtggggattaatttaggggaattgccttatgtcaatatgggaggctgagaaattccactttcaaactttaaaattttttaaatttaaatgcaccatttatttatttataccccaaagactgcctctgattcctggtccctccctcacagagagcttctcgccataccccctccccttctccgctgagaggatagatttcctcctgggtataccccaaccctggcacattgtctctgccagattagcacatcctctcccactgaagccaaacaagacagccctgttgggttaggataccacagtcaggcttcagctttagggagagcctccactccagttgctgggagtagggggtgggcacatggaaacttagctacatgtgtgctgcatatgagccaggagttttgttccagcccatgtgtatgttctttggttgatggctcagtctctcccaggagtcccaggagagtcccaggagagtcccaggagaactcccaggagtccaggttagttgactttgatggtcttccagtagggttcctatcctcttcaggaccttcagcacttccctcaactcttttataagagtccctaacctctgtccaatgtttggctgtgggtatcttcatctgaagctgctgggcaaagcctctcagaagacagttatgctaggctcctgtctacaagcaacacagagtatcattaataatgtcagggattagcatatgcccgtaggatgggtttcaagttgggccggttattggttggccattccttcattctctactccatctttgtccctgcatttcttttagacagggcaaattttggcttggtgtccttatccttccactgagggtcttgactggctgtgttaggtggccacttcagattcatgtccccactgttaggcatctccactaaggtcacccacattttaaagctggggatgctgatagtactatttagttgaactcacaaggcctcaggattggggtggagggcatagataagagtcctacactctaaagaccaggtaaggtccagagttctgatatcagagggcaggggaggaagcggataccctagctgcaaaatggagagacttttggctctgtgtttgttctgttcagctttcagctgtttggatggtttccccattgtgagaggggaccctcctttcagtctcctttgaaaacactctcccagacatactcaaaataattcctcatcagcggcccacatgtgggcttcactctagtgcacatctaaaaaggaaccattgtaggcttaggctttcctctaaacctactttatttaggtttcttaaacatttcagcctcccttctagcccactgaccagaggtagaggtggggaaaaaatgaaggtttttaggaaaataaggatgtgaacctgtttagaagtagttctttgggggtgattccattctttgttgtcaggacacacaaatcattagcagcagctctgtccagcagaaactgcagggctccactaaatctgcatgagtcagcagaagatgcaagaattagccggaataccacaagacgctgtttggcatgtttttctctatgaactgaagaccagcaaagagttgtctggctagcaagcaaggaccagtgaagcattacgtggtgtagcaatgcaagaaagacctctccaatgtttgcagggttccatttatactcgttccgtacatcacacaccctctcacaagtctgcttcagccacatcctctcatgtgcctgtgcaatgaaagcagaggaactcattgtgtcttgttatttatttgtttgtttgtttatttatttatttatatttactttacaccctgagcccagtcccctccctcctctcttgtcagtcccacccttatatatcgctctccccattgcccctccctttctcgggaagccactcttgggtcccaccccaccctgtgactaggcacatcttcttccactgaggcccaaccaggcagtccagataggggaagaggaaccaatgggaagaaacagagactgaagactaaactacacatttgttacaagtgagtagggagtctagcatactccctggctggcaactcaggctctgtgtgcccccagggtcccaggtcattgtgtcttgtcaatgtttatagtcattgttcttattgttgttgttgttgttgttattattttagacaagatctcactatgtagctctggctgacctagaactctcaatatagatcaggctgacctcaaactttagacctgccagccccagcctcctgcatttaagtcacatatctttgcattcatcctattcatcgtctatagattattaaaatgagccatcttatgactgatatgccttggttttgtagggggctcagggaaagttttgtggtcataggagtccttagaaaatggactcactcagtgtcctggctctactgtatacagatcccgagttaatctagggctgacacatattttaaagtatccatttagtatctttttctgtgagcaaaggagagtgtagggggcactggtggcatcatttttgacaactccatttggctgacgggaacagtctaggtttggctcacacaggtgttcactgggatccacccagagagattaacagccacttttcattaggggaaaacactgcagagaactgtcatctgcctccctcaaatgtggaggactgctgggctgagagtgattgaggagaagcagacgttttactgattcactacatgcaggtcatagatgtgcttaaaatcaccgaagctgctccggccttgttcccatggggtacaaaggctgatcagcaaatacaactgcaggctctcgatggccaggaactggtaagagcagagnnnnnnnnnnnnnnnnnnnntagtctacgaaatcatgagcagctgaagagaggaaagaggctccaacagcaggtggggcctagatggacaggtgcatgtatgacagccaacagccaatctacaaggcttcctgacccggtcacatcaaagaccacagctccatcattctcaaagtcagaagtagagtccatagaaatatttccacagaaaacttctttgcactcaagtagagcaacttgactcattgctttggtgaagggagggactgtgagatctagggaggctaggtcactaagtggacctgccatactgaagggctttgaaactagccctttctggcctattttgtcatccaaggcaccgtgagatgtttcaggggctctgcctagcagatgttagcatctgctttaatagttctggtatctgctgtcgaatttcacgcatgttcatttctgttctcctttcccatagtgggaagatcacgtgacccccgtcttcttctaactggatgtccatatgtggtgacatgtggacaggagaactgagttcatagtcgaagagtctttgtggtccccttactttggtatcactatgagtagattccataaacatagcttcccgtaccttgggagcctgcagtaaatgggaccagggaagcttgggcagcttccctgtttagcttgttgttggtgacttgcattttatcttgagtgctgagagccgtgcctcttggctgtatactcccattagctgtgctatctgtaacacctctgatgtgtggtaaccatggtgacagctgttaagcagtgtttcagaagcttggaggctgctgcagcctacttcaaactggttggagccactgatcttcccgttcgacttgcacagttgtctgccttcaatagtacatccgattgccatatgtcaccaggttttgaacatgtgtcctgtgaagcgccgtggcttgcttatgtacacacagaccattggctacctacattttcccacactccggaaaatcttgttttctagtttccaaaacttctctaaactgtatctccaggaagatttggggtgttccctccttgtcataagtaaaactcttcactgccaaactggtcaccttagagattgagttgtagtgggtaaaacgaacatggtttgtcgggctttgtatcatgggtatgtgatgaggcaaatactgctgatgctcaatagacaggtaggttaagtaggaataaactgcatttgaatttggagtggctacttgtgtgactaaatgtttcctagggagatgcaacattcctatctactaattccagatagggagcccacgtacacgttcagtttggtgagccaaaaagtttatgggtgaggggttacttataggagcagaaacaactcagtgacagctgcgccaccaaagctcgtggtgatcacaaagcctggaaactggagcccacaggcatccgcaggctggagagtgtcctttccaggtgtttaaattgttcaaaacctctttcaggcagcttaactagtttctgctttctccag

SEQ ID NO: 1343 - DNA, 2237 bp, Mus musculus
cccacgtcccggggagccactgccaggacctttgtgaaccggtcggggcgggggccgtggcggagtctgctcggcggtgggtggcccgagaagggagagaacgatcgcggagcagggcgcccgaactccgggcgccgcgccatgcgccgggccagccgagactacggcaagtacctgcgcagctcggaagagatgggcagcggccccggcgtcccacacgaaggtccgctgcaccccgcgccttctgcaccggctccggcgccgccacccgccgcctcccgctccatgttcctggccctcctggggctgggactgggccaggtggtctgcagcatcgctctgttcctgtactttcgagcgcagatggatcctaacagaatatcagaagacagcactcactgcttttatagaatcctgagactccatgaaaacgcaggtttgcaggactcgactctggagagtgaagacacactacctgactcctgcaggaggatgaaacaagcctttcagggggccgtgcagaaggaactgcaacacattgtggggccacagcgcttctcaggagctccagctatgatggaaggctcatggttggatgtggcccagcgaggcaagcctgaggcccagccatttgcacacctcaccatcaatgctgccagcatcccatcgggttcccataaagtcactctgtcctcttggtaccacgatcgaggctgggccaagatctctaacatgacgttaagcaacggaaaactaagggttaaccaagatggcttctattacctgtacgccaacatttgctttcggcatcatgaaacatcgggaagcgtacctacagactatcttcagctgatggtgtatgtcgttaaaaccagcatcaaaatcccaagttctcataacctgatgaaaggagggagcacgaaaaactggtcgggcaattctgaattccacttttattccataaatgttgggggatttttcaagctccgagctggtgaagaaattagcattcaggtgtccaacccttccctgctggatccggatcaagatgcgacgtactttggggctttcaaagttcaggacatagactgagactcatttcgtggaacattagcatggatgtcctagatgtttggaaacttcttaaaaaatggatgatgtctatacatgtgtaagactactaagagacatggcccacggtgtatgaaactcacagccctctctcttgagccctgtacaggttgtgtatatgtaaagtccataggtgatgttagattcatggtgattacacaacggttttacaattttgtaatgatttcctagaattgaaccagattgggagaggtattccgatgcttatgaaaaacttacacgtgagctatggaagggggtcacagtctctggtctaacccctggacatgtgccactgagaaccttgaaattaagaggatgccatgtcattgcatagaaatgatagtgtgaagggttaagttcttttgaattgttacattgcgctgggacctgcaaataagttctttttttctaatgaggagaaaaatatatgtatttttatataatgtctaaagttatatttcaggtgtaatgttttctgtgcaaagttttgtaaattatatttgtgctatagtatttgattcaaaatatttaaaaatgtctcactgttgacatatttaatgttttaaatgtacagatgtatttaactggtgcactttgtaattcccctgaaggtactcgtagctaagggggcagaatactgtttctggtgaccacatgtagtttatttctttattctttttaacttaatagagtcttcagacttgtcaaaactatgcaagcaaaataaataaataaaaataaaatgaataccttgaataataagtaggatgttggtcaccaggtgcctttcaaatttagaagctaattgactttaggagctgacatagccaaaaaggaacataataggctactgaaatctgtcaggagtatttatgcaattattgaacaggtgtctttttttacaagagctacaaattgtaaattttggtttcttttttttcccatagaaaatgtactatagtttatcagccaaaaaacaatccactttttaatttagtgaaagttattttattatactgtacaataaaagcattgtctctgaatgttaattttttggtacaaaaaataaatttgtacgaaaaaaaaaaaaaaaaaaaaaaaaa

SEQ ID NO: 1344 - DNA, 951 bp, Mus musculus
atgcgccgggccagccgagactacggcaagtacctgcgcagctcggaagagatgggcagcggccccggcgtcccacacgaaggtccgctgcaccccgcgccttctgcaccggctccggcgccgccacccgccgcctcccgctccatgttcctggccctcctggggctgggactgggccaggtggtctgcagcatcgctctgttcctgtactttcgagcgcagatggatcctaacagaatatcagaagacagcactcactgcttttatagaatcctgagactccatgaaaacgcaggtttgcaggactcgactctggagagtgaagacacactacctgactcctgcaggaggatgaaacaagcctttcagggggccgtgcagaaggaactgcaacacattgtggggccacagcgcttctcaggagctccagctatgatggaaggctcatggttggatgtggcccagcgaggcaagcctgaggcccagccatttgcacacctcaccatcaatgctgccagcatcccatcgggttcccataaagtcactctgtcctcttggtaccacgatcgaggctgggccaagatctctaacatgacgttaagcaacggaaaactaagggttaaccaagatggcttctattacctgtacgccaacatttgctttcggcatcatgaaacatcgggaagcgtacctacagactatcttcagctgatggtgtatgtcgttaaaaccagcatcaaaatcccaagttctcataacctgatgaaaggagggagcacgaaaaactggtcgggcaattctgaattccacttttattccataaatgttgggggatttttcaagctccgagctggtgaagaaattagcattcaggtgtccaacccttccctgctggatccggatcaagatgcgacgtactttggggctttcaaagttcaggacatagactga

SEQ ID NO: 1345 - DNA, 52754 bp, Homo sapiens
cttatttttaaaaacattccacttctttgttgcagttctctatctcttcatccattttgtttacctttgcctctgttttctttactatatgtaaaagaattatttaaaaattattgtaggctgggcacggtggctcacacctgtaatcccagcactttgggaggccaaggcaggtggaccacctgaggtcaggagttcgagaccagcctgaccaatacggagaaacctcgtctctactaaaaacacaaaattagccgggcgtggtggcacatgactgcaatcccacctacttggtaggctgaggcaggagaattgcttgaatccagaaggtgaaggttgcggtgagccgagatcgcaccattgcacttcagcctgggcaacaagaatgaaactccatttcaaaaaaaaaaaaaaattcttgtctactatttccaatatttgggtcatctgttggtctgtttttaattggatattttttccctcttcattatgaaccatgcatttcagcttcttgtcatgtcatgtgattttgaaaattgtataccaagcattgtatataaaagaactaatgtagatattattttgcagctaaggtgaggacttcaatcagaaactgagctggattgcagctttaagtagtttcagtgcaactcttgtttcaaatatcttgaaggaaatattttttgtgttcttattttgttctctttctctgacaagtttctctcatacactagaagatctctctctaccttcccagcccagttcaccagccactttgccagtactcaacaaaatctgtgggggaagaagaccagtaattggagaaaatagttgggcatttgtagattttaatctgttacatcagctccagtaaaatatctctgcctacagcaaactcaacactacacctatctgtgtttatgcttgacaaatgttccaagggaggaaagggactgttaatctttcttatctagaaaagaatgttcatgtggaattccatccctttagatttttttcattatcagctcatcgataacttttaaaatatatatatatattttttttttctttagtttatctggtagctttgtctagttgttatggttatggtaatgccatggtctactgagatcttccatgtaataaataaagcagtttactgaatggttttaaactctcattgctgggaggaaataatatgctttttctctttgcatctattaggttctattttttcaatgttactacaacatttgccttagagtgtaagctttgtgggcacaacaattatctattttattcagcattatatctcttatgcctaccatagtaccagactcatggttggtatgcagtacatgtttgttgaatgactaaattatgagcatgaacaagggaatagaggtttgaaataaatagtatgatgtacaagaaaattacaagttattcttatgttctaaaactagaactttaagtgcaaggcagtgatggatgttgaggctaaagacagagatgggaaaaaattaagagtttgtaaagagcctggactttatcttaagtgttggtaggctgctgagtggtttcaagaggggaagttatacatccagttgttcgtgataaatggatcaatctggaagatgggtttaagtgagaggagactgctggaaggaggatgaaagggaagccattttagtacttaggcaggaaatgatgagaggctcatttacagacaagaaggaaggaaaaagcactctgggaatatggcagcacaggcttatttcttgacaccctcccactcccatctcaataacacagagagtatgtggggatgggaagtctacctgaggctttaggacctaaggagacagtataggaatagaagagcacgggccaacttctggacaaaattatttacagcaatgagcagacctaagtattagtagatttggggaagtctgaaaacagaattaatcccatagcttcttgggagactataatcacttggccaggtaatcccatgcatcctgacagacatatggaatctacttgaaatttccagccatgagagatccccagtccttcttatgctgccatcctggtgaggaagcatcttccctacccctcacttcatggatgtctaccattgcctaagacccttctaataatctgacatatccagaagcaatggggactgacaccaatggacattggtaggaaaagaagggtcaggtatcacccaaagggtctcaggagcttgaaagagggacttgaatcaaataaactcagcagcttgtttacagagaaagtttggtaaagaaacagaggtgaatttataaatgattgtaagaagaattattgaggaggtacaagaagctattgtgaaagatcaattgaagggaaaaaaggatttcttgaaataaaatttaattttggactttaaaatccaacagatcacctgaataatagaacagaaactgctgaaatattgaacacagatctagatcaaatgaaggaacatattcaggatgaagcataaataaaggccaggcgtggtggctcatgcctggaatctcagctctttgggaggccgaggtaagcagatacttgaggtaaggagttcaagaccagtctgggcaacataggaaaactccatctctagtaaaaatacaaaaattagccaggcatggtggtacatgcctgtaatcccagctactcaggtggctgaggcaggggaattgcttgaaccggggggcagaggttgcagtgagctgagattgcaccactgcactctagccttggtgacagagaaggactctgtctcaaaaaataaataaataaataaataaataaaatgaaactgcaagttaaacaatgtattatagaagacctaatatggcaaaaataagagtttcaaagaagaaacaataaaaaattattttctgaggaaaactgaagtggagacagattcaggaaacatttaggaaatgaatacaataagaccctttgatattatttaattatgttttcagaaacagctacaatctccctaattaatttttgtatttcccaaaagtttatttaaaagctctaatactttagattaattttattttaggaataagtctgagataatattaatgaattaaaaacctgtcaaacagagttgctttctagaaagtaagagataaaattactctaaatatttctagcattgtgcacagaagagataaacagttatggacaggtttacttccttcatacatgaccaagatgtttttcctcttccacctcccatccagttttccgtaatgtctgataatttgccattagaaatgcactcctttaggggtgagagctaaaccaaaccaaccaaataggccctgtttggccaggaggacctcagagaaaccttaaaataataataattaaaaaaacccacctgagttcccaaccatgatgggatggtaggtcagatgcctcattatatccctttctttttgctgtttagacacaacagctgacagcattaatgttaaaacagagatcataagactgacagaatagactgtttatggcaataagataccaaattgtaaacaagagctatggccatgccaggcaagggttaagtcacacactttacacttaacaaataaacgatgttctaattcccacagggtttcttctccctctttctccagcagctaaacaacactagctttgagataagtgatgttgaagcagttgcagctccccagctatcagacaccaaataactgagcccccacctgttacacaagccacagtgacagctttgattggacaagagagtgatttctgtaactttctcctgataagagaccaccaaccatggactacttctggctggttttacagcagatgcacatttgagtgacttcctgtcccttcttcacctaattgtgtacatttaaatgttaaatctccatcccaatggaactgtgggacgcacgtaacatgcatgtttgcttatcatgcatgcttacaccctttcatgaatattcatagctcttcctatgtcctgttgaatatgtatgctttgccaaccccttcagcttaaattcctgtgttactcttccctctgttgaagggcttgctttaggttttttccagtggcaggctgcccttcctgcctgcaggttgtaattccattcttaagaaataaaactcacctttctaaatttattaattgtgtgatttaagttaagggggtaaggcagtatatttccagaagactgccaacataaaattttaattcaattgtccattgacacagtgaatgttaatttgtcatcacatactagttaatttgttagctgaagggaatgtaataagaccaagttgcttgtaaagggtaatgggtaagctggattagattattagggaggccggtcctaggtgagaagtttcattaggttttcagtgagcagcatatgagcctggaccggagatcagaagacgcgggaacagacagaaaaagaagaagagtgatcaaaggagaggtggcaagtacaaaagacaaagcccaccagtttcataaagttgctcaggctgaccccatttccagggtgagatattttcacagacttattacctatgattatacacattttaaaaattgttattagcatgaggggctgcatatatattttataatagccacacttataaattagttgcaactggcttcagatttagcaagtatcttatacagggtcctggcaggaaataggtggcaaatccaaggggtttaactgaaaagactttaatttgaagagttgaggtcagggttaagcaaactaagaagggatggtaaggaacccaggggccagcaaaagtgggttcgctttcccacactgcagtaggttaacgccctccgccacgaaggaatccatatcctaagccccagactccgtgactatgttacctcacatggcaaaacttactttgcatatgtaatcaagttaaggatctggagatgcagagatgatcctggatagtctgggtgggcccaatgtaatcacaagggttcttatcataagagggagatattagctgggcacggtggctcacgcctgtaatcccagcactttgtgaggccgaggtgggtggatcatgaggtcgggagatcgagaccatcctggctaacacggtgaaaccccatctctactaaaaatacaaaaaattagccgggcatggtggcggtcacctgtagtcccagctacttgggaggctgaggcaggagaatggcgtgaacccaggaggaggagcttgcagtgagccgagattgcgccactgcactccagcctgggctacagagcaacactctgtctcaaaaaaaaaaaaaagaaaagaaaagaaaagaaaagagaaagagagagagagattagagttagagtcagagagaagctgtgaggacagaatcagaggtcagagactggagtgatgaggtttggagatgaaggaaccaaggaatttaggtgacttctagaagatggatcctctccggagttcagcaaagtgaaacgtctgtcataataataacgaatgacttcctttttcattttcattcatatagtgaagttttctaaaggctgcatcatgtgcaatattgtaacagagtaagtgcaggactgaatgtgactctatcaggccaattgtagagatgtgaaaaaatgtaaaacagtggcacttttctccctacttttttttgaaaatctgtttttttaaataaaataattttataaaagtattatgaattatttataaaattatattaacattatgttaacatgctaatatggtaaaattttctgcttggagtttgaatacaccaaatatttataaatataactcacacaaataaaacctctttggtgttctcaaaattttgaagaatgtaaaaggtttgaaaattgctgatctagcaaatgactgaacatgaacagctatagtatttgtacctgcccagcagtgcagcaattccttatccttctcatatctgcactttaattttcctttgacaaatatctctccctcctctcagcccatgacatgaggttcacatggggttaacttaattccctggctcaaaggaaaggtattaaattcagacttgtatccaaccattcctgaagctagacttagccctatttttcaataacatgaaccaatcaattttcacatgagtccaaaataattctatgttaatacactaaggtactaggaaatatagtttgagaaatgttgatccaaacattgtgttatttacagtggagtattgacataaactttgaatcttcaaatatgttctggtgtcttggcatctcttaatacctattagcttacaaggctttcactcaactattttataattttgataatgacttaattgattagttgatatattgttaaaataaatatattaatgaatttatgataaataaggcagataaataagacatgcaattaggaagacatgttaaacaaattgttataataatacaatcactctcagcttaggatagctcctggccactttctctctgggtggtttttactctgggagtagtttaaatcattatctagtagtagtttaaagcattatctttgcctaagagctttcgctgactccccacatttgcattgtactaagagttttctctgactccccacataggtctagaccctagtattataagattctcattgtacttgcactttgccttcaaagtactaatcacggttttgttagtgatttgtgtgatgatttgttgaatctttttttttttcccactagggtgtaagccccatgttccatcttgatcaccatgtttctagcccagtgctggcatatagtgggttctcactaatatatctgtagagtaaatgaagaaatgcatgagtgacatgacaggagaatttaaggatgccatgggagcataaaacagagggagccacctgggtgaggagagctgagaaagacttctggagaggcgacatttgagctgagaaaggaaagacaagtgggagagtcctccaggtgtagaagttggagagatgagcgctccagttaggtagtatttgaagctgatgtagaaaaggagtcttgagccagcttgtgaaggactattggagagttttatttttatttttatcttttttttaatttttgagacagaatcttgctttgtctcccaggctggagtgcagtggcatgattgtagcttactgcagcttcgacctcctgggctcaaacaatccacctatctcagccttctgagtaactgggaccagagatgtgcaccaaaatgcctggctaatttgttcattttttgtaaagatagggtctccctatgttccccaggctattctccatctcctgggctccagtgatcctcacgcctcggccacccaaagtgctgggattatagaagtgaaccactgcgcctggcctattgaaggtttttaatcttcagagtttcgactttatcaacaacacttagaagccaccaaagaattgcaggtatggaaatgacatatacttttgcttttagaagaaaatcctgatcagtgtgcacagaattcttcagggggcaagtgtgattcattctgataagatatagcatggcttagactgggagactggcagaggctttgaagatttctttgctcaaattttattcagcaagtatttaccatgcacctactatagcaggcaacatttttaggaaatggtgaatgttacagaggtgaataatacagcaagagtcgttgaacatatggagtttatctattagttggggagtgaatgttgacaaaggaataagtaaatacataggcaagaaagatacattacctgtgaaacagcagcaggtagactgacagtggagtatctaatacagcctatggaagccagaagatagtgggatgacatttttggagtactagtagaaatgtcatatgaagaactctgtaggaatgtaacatacggtcccatatatgaagctcctgggtcaagtatacctgaacataattcagggatttgagggactttcttgtaacctgaggatcaagatgtcaaggaattaaaaacatgtataaaacattgttgtataaaaacccattaaaaagaatggaagacactatagtaaaatcattgtgggtttagttgttataacacattttaaaaatctttgatcccaatcaatatttataagaaagaagaaatatggaattatttcctgagtcaaggagcagggagagaatgaggaagaagaggaggaggaggagggggaggaggagacaataaacctacttcccaaagttaacaaacaaaaagtgggaagaggtcaaagactacaaggagtagaattaacgtcaattgtttctatgtttgagtctgaaaattttttgtcccttctccaccaacctatatattgatacacatataaatgctaaaggcatttttgaatttgaacagatcattttctttgtatggctgcctttaaaaaaaattcaacctggtcactcttcctcaacatttactgaggtctaagtgttcaatttagaacacatgctttaataactcagagacctgtcatttgtcacaaatcttgcctagagaaatactcattagcgaattaggcagaaagaggatgcaaaataaaaaggcacagtagtcccctgatatccatggaagactggttccaggacaccaccaaacccctccccgcaaataccaaaatccatggatgttcaagtttcttaacatatcatggcatagtatttgcatttaacctacacacatcctcttgtacacttgaaattatctttagattatttataatacttaatagaatgtaaatgctatgtaactagttgtgtatcatttaggaaatgatcacaagaaaaaaagtctacagatgttagtccagacacagccatcctttttttttttttcaaatatttttgatctgtggttcattgcatccacagatgtggaacccatggatactgtgggctaactgtattaataaaaaagtggaaacatcctaagtttcatgggtgtttaaattggtcagcaacttccttctgaagaagtatcagaatttgtgagcaatgttaatatttttgttttctcactaagagccacagttctgaatagaggtttttaaaaagccctagcaaggtttctttagcaatgaaactaacatttaactgtatcatcagcttcgtgttacatctctttcctgactgttgggtgagccctcctcggatgcttgcttctggctacacgcccctttacccttttctctgcactgttttcatctttataaagtcagagttggtgtctataggctctctactgccacattcaagacctgcctcgctcaatgtcaccttcaagatgcagaaatagggatttgggaaggggattgtgaaattttcgaagtcttccaaaatactttgagaaactatatttggaagcactttggggggagaggttggacaggaagggtcttcagagatcatcaaatttaactttctaaatcctaaggaggaaaccgagactccaggatgtgaagtcccttctctaccaaactagaatggatgcaggaggaatgtctgaggtgcaatccttatcctttagcaaaggtgtcctctgcgtcttctttaacccatctcttggacctccagaaagacagctgaggatggcaaggggagtctggaaccactggagtagcccccagcctcctccttggagggcccccatgaaggaggcccttcagtgacagagattgagagagagggagggcgaaaggaaggaaggggagccagaggtgggagtggaagaggcagcctcgcctggggctgattggctcccgaggccagggctctccaagcggtttataagagttggggctgccgggcgccctgcccgctcgcccgcgcgccccaggagccaaagccgggctccaagtcggcgccccacgtcgaggctccgccgcagcctccggagttggccgcagacaagaaggggagggagcgggagagggaggagagctccgaagcgagagggccgagcgccatgcgccgcgccagcagagactacaccaagtacctgcgtggctcggaggagatgggcggcggccccggagccccgcacgagggccccctgcacgccccgccgccgcctgcgccgcaccagccccctgccgcctcccgctccatgttcgtggccctcctggggctggggctgggccaggttgtctgcagcgtcgccctgttcttctatttcagagcgcaggtgagtggccaccttcccaggggatcgcggctgagagcgcccatctccttcccccgcacttggaaactgagtctggcggcagggctgggccacccagagcttgcatattccggaagggaaagtgactccagaagggagagaggaagtgttgagtttggggacaacctggcgcagggctgtcgggcgcaccctgctctctctccgcccacgcaccccagcttctcggtgctctgggggcggactcccctggccggacgatgggtttgaatctcaccccgtcccttcgctgggaaacaacactggcctctcaccttttctggtagtgattgcatactttttctccctgtcatttctcacttgaagttaagaatcaacttctgttcacgtaggaaaaaagatgagcgccttcacttgggcatctacctttcccttcccgcccaccacccggcgggtttcggttcctgcgcctggctgctctgcaggtgtgctggggccacggtgctggagggctgcgcggagcgggaggtcgcggtgctcgtgcccaggtcgcccaatgggtgggcagaatgacacggcgcgaccagagaggcgcgggctcgggatgggggctctgcggctgtggcgctgtcctgtgggggtgaaggaagagggacagccccacgtgcctgctagggatgtgggcggaggaaggaagcgaggtgagtgtgatggcacagtgttactacagtctagcaaataaccaaccttcggaaagatgaagaggttttttgcacgacggctaggaactgcagagagatagtaggaaggaaggggtaaatttgtaatattatgctttctggtggtttatgctcttgtgttttcttggaaattgcagtgcagttggttggattcattcaaatattcttgtctggtgctgtgaactctttctcagaggaagtggggggctgactgtgcatttttttttatgggaaaagaaagttgggtttggactacattcgttttcagattcaaaggtgattactaaaccaaacgggatgcatcaaaacatggcattgcttggattgtatggttttttgacatgtgccaatgtctcgaactccattacttttaatcataggctttttgttaagtattcattatccgctagtttgcattttctagaactagtgtgattacctacttaaagtagaaatgcaatgagccacacttcagaaaatctgcattaaatataatctactcattgagagttttgttgtttctaaaaagacaacttttgagtggtttgcttgcaacacagataacaaatctatatgaaagtgactaaacgtctttctttcattggagtgtgttgcaataagaatggcttacccattttctcatccagcattttgttaataacccccatttagtgcttgtgcatggagtgccagcgttgtgcgtggcaccgtcacctgcgatggaatgagttaagaatcatttattcaacagacagtgtccacttactatgggcatggagccagatagcagagtggcctaataaaaccattaaaattcttagtcaaacaaaagagcaacaatcagaaaagggatcaaagatgcagtagttctccactgtttatcttttctaacaccttcgggatatggcattttcattgccataatagtgaagagagtgtccaatgttgaacgagcagtaggaaatgaaggagttctaggaaccatgaacagcttggcttggcaggagctgtggaaatcggtggcatggctgtgtaggaaagagtgacctgctgggctcttgttagagttgttcagcttttccctaggaattctcggtggtccccgtgggtgaggagtcagggctttcagtgatctcccatcatcctttagcagtcttgatgctgtatggatgatagtgaaacattcagaaccccttttcaaagtaaacgtgtgagttagtaagtctagccagaaaatattcctttgaagaagttaatgtcatcagacttctgggtacggttttcttaaataccatgaaaattcggttcctttgacttgtgcaaaataatttagctattattctgaacccaattttgtattgcattttaaaaaggctatctccttcagtaaagaaaaaatattaggaacaatgtgttcatatgaatataccactagatcgggatgcattttactggatattgtgtctacaattgttacccaaaggagtcctaatcattttgagatacattctgaaatatttacagataaaactgctttggtgtctggaatttgtttcaaaataatttctggttgcttacagatgaaaaaagatttgccatacattggtaatagctgaagcgctgatgcgtgcctaggggttcactctgtaattctttccccttttatgtgtgttagagatcttctttcaaagtcttagctaagagaatagtctccatttgacttgccgctgatttaacattttcacttatatcggctcttttggattggaacttggtaccaaataaatcagtagttttttgattcccactaaagttgtgaatcaactatctgaggtttctaaatgcatttgaatgagaacaaactatctagtaacatgtttgtagtttacagttaaaaatgacgaattagttttattgtttttgtttaaaggtggagaaaagaaggtatgcaagtcctcaaggaaaagcagtttgagtttttaaatgcatttaaaagaatgcccagaatagtgtaaaaattacggtgacggttaaaaagttttgttttcttaaatgtttgaatagataaaattgaatcagcctcctaaatgtttgcagattgcatgtgcctagatgtaaaaaatacatatctactagatccggtgtagcttggcttttcccccaccaccctgccaaagagaaaatagtgtgtggcttctgctatatatttaccacatagtattcatactttggtttacaaagaaaaaaaataaaaaccctttcaaaaagttgctctgtgtgtgtgtgtgcatgtgtatgtgtctttaacatccatataaccatattcaaagcttagggtttagctataaagataaacttttcagaaaactgaagatgttttgcccttttaacttcttccctcgatcccccaatatgcacaaaccaacctccctggttgtttgttacccaggacagcagtcactactgaaaatctgatgtagaggtgtgcactgcctgtttgaaaacacagataacgaagtagcacaaacgtcaagcatcctgcctcatttaaccctacaaatgattaagtttcaaggaagttaaaaaaaatgagacagtgtatttcgtaggcacattatctgacaaatgcattttaacagtccattttaagtcagatattcaagatttacttaatgttttcagacgtgtctaagtacaatgaattcattggttactcagtttactgtgacttttggttgaatttctgtgttcctcaatgaagtgtaagttccatgaagacagggactgcttgctttgcacaccaccttattcatagcatctagcccagtgcctggcatgtctaatttactgcaaagtcttttctaatgatttgcaacactacagatatgcccatttctgattgtaatatgcaaattatcagattagtggctaaaatagtatcatttttcaatcatgcaatcctccaaccagactaatgtgtgctagtaggtaggttgttgggtaggcgatacattcgttcagtcagttcgtgggcatttgctgagggtccagcatcagtctggctccctccctgctctgcagttccttcagcttagaggccctcatttacctgtgtgtgtggctggccttgcaccctgaacctctcctcctccgttttctcctagtctccattttcaggaaaggagagctgcaagggcattggaatgagaaagacatgtggttgtaggttaaaaataaatttctaatgtgtgatccttgagtaaacaaaataaatgagtatattaaaagcaattattccatgcattcttgatttcttttgggaaaaaacagtggatggggttttatacatattttagctataatgctgccttccaaaacagtggttctcaactgcacattgaaagtatttgggaagaggttcaatgattggacacttcccttagggatgttgatgaaattggccagtgaggggtggggtaggaatgagatggtatctgggtgtgggcatttttttaagagaaaggggacaaaatctttgcattgtacttatttgcatcaaatcagtaaccattattaactgtttcagtatctttgtactaattgatgttacttgtgaaacaattttaaaattggtgtcagggaactttggaatcgtttcaatagcagaaaatctatattttaaagcatgacttctcaaactttaatgtgtataagaatcacctgggatctagttaaaatgcatattctcaggcagtatgccaaggtaaagcctgaaattctacatttctagcaagccctcagggagcccacgatgctactcattggactaccctgagtatcaagaatatagggttcgggtgcagtggctcatgcctgtaatcccagcactttgggaggccaaggagggaggattgcttaagcccaagagttcaagacaagcctgggcaacacagcgagaccccatctctaccaagaaaaaaaaaggaagaaattagccaattagccaagcatggtggcctgcacctgtagtcccagctacatggaaggctaaggaaggaggattgcttgagcccagggatttcaaggctgaagtgagctatgattatgccactgcactccagcctgggtgggggtgacaaagcaagaccctgtcttcaaaaaaaaaaaaaaaaggaaaagaaaaagagaaagaaaaataataaaggggactgctgcttctcttagacagctcttagcttgtcagcaggactccagcttaacctagggtccccaggcatttccccactaaggccacattattcctttggctcagcagttttctggtggtgcgtcagttcaggcctttgcatgattcttctttcctgaggtctaaacccagtgacccttcatatcagttgcctggacttttctggtcttgtgggatacacaccggcataagtaagcccttttttttttttttttttttttgcaaagtgtctgattgaaaactttccttgtataaaaattcacatattatgacttgtattaattattctaaagaatataggaaaaatacagattgtacacagttttgcttcacggtggtatctcttccatgatgattataggtagtccttatatgtgcaagactggaataataaaatttgtattagtgagtgtacatttgttaaaaggctgtcatttcattttgagaatctcagatatggataggctctttttagtttatttctaatggttggttaataaactaacacatcattctgattaatttttaaaagagagaaagagacttgtcattaatttgactgagctttgtaatctcacgtagcttttctttttcgcttagtttgtacatgctaataagaaaatgcaggtgaagtaccttgaatatttaacaaacaaagaggacaagttaaattctcattattaaaacagatgatagctaattattgttaccctttacttcacagttgaaaccaccacaaaggcttggaaggagcaggcagacaattttaaagagtagtgattaaagatattctaatgctggacacctattcttaacaggcaatcagctaattactcaatgggtatattttgggtgggacaattccttacattacaggaatcttagcatccctccagcacacgtctgtaatatctgttcatgcagcctccccaccctaacgtgatgacaccaaatatcacctgcatccattcccaaacacccgctgacaggtataccattccagcttgagaaacactgatgagagggtcaacaaaaaagacagatgacacgtctgacttcaagttttgtttggaggtaaaaaagtggatttttctctcccttctttggctgattaaggaaaaaaggccaggccaacatggtggttaaagatgatgttgatttcgcctgttttatataggtttcatgctctgaatttcaaagtgggcctcataatcccatctagcatgttgcatatagttgatttaaagacaaaaagcttcctctgccttcagtgaccacatgtgatttccttggtgcccctcccctctatgaacactttcatgttgttagacaagtttgacaatttcccccatgaatcacgcacatacacttctgtcattgttaaaagcccatcgcaggactaactgtgccttgtcctgtggatgatagtcagttactcgttcaaatgaattagaagtcaacgttttcaccatcttgaggttcattgtattaactattcattgttggggacataaagactcttgcaagtatgaattttttgttcttaagtcacactgtattaaatagcaggatgactagtgataagcactctaacgtccttactgtttctcctcctcagatggatcctaatagaatatcagaagatggcactcactgcatttatagaattttgagactccatgaaaatgcagattttcaagacacaactctggagagtcaagatacaaaattaatacctgattcatgtaggagaattaaacaggcctttcaaggagctgtgcaaaaggtaagtccacatcgaggctgataagtcaagggcccttgctgactctaccaatactgaaaattaaaactggctaagtgctgttgactctgctctttttattctaataatttgtaaaagagctacagggaatgctttaaagagattagcagaattattttgaagttggtagtgattgattatggcaatcagggacgttcatgcaaatattcttttctttcttttcttttttcttttaaagaggagggatttaaattcacacttaaattcacaccttaagactaaggtggctgtggcctgtctgtgagtcagtatgctagtttgaattccctgacctaaaaaccatccgctcagttcacaggactttctggtagctgtttcctttctgtttggcttcgtaatggcagggccccttattccacatctgttgatccagggctctgatgagaagcagttgtaactcttggtcctttgctgtcatctgtggtgaagtaggcagagcaggaaacaatgtgagatggagattctgtgtccgtgttctcattttctgggagagctgagtgacaagagaagagttagggacagagaagaccaatgacttctcttacaccgacagccccagttgggaaacactgtaataactgccagttttactttcctggacaaagccacttgagaattctgcagcccaagaattattttactcactgactccaccaaaacccaggtagaacacaaacagtgaccccagtgcaaaacctgtgtgtacgttatatacctgcatgcatgcatccacttctacatcccagcctctgtgttgcaactccctgggtctctggtcattccagagtaactcttgaagttctcaaagcccttacctctaaatttaattctaatgtagtttattttttaaaaatccacatatagtaatataattatttaaaaagaggacatgtgtcagaggtagaggtaggaagatgtagctgttttgtaaagccagctaacaaaggtgaacgtctgtaataccatcagaggtagaggaaggaagatgtagctgttttataaagccagctaatgaaggtaaacgtctgtaacaccctgatagttgagatttgctgtattttatcgaatctaagttaccaattttcagcctactttgttatttcatgcatcactaagaaagaagaaactgttgattaaaaaaattaaacatgatcatcataggttctagaggttctagttgtatcttaattccagagatatcaaaacgttaaaaagttgtgcattatggaatgcatgaagtacctattagtttaatgtgtctataagaaaacacattgcttatgaaaattactttttcattatcattagtgtgtaggtgtttggcttcacgcagaatagatgtatatgtttaaattcagtgatccttaatgttacagtgtaatttttgagcaacagcaacagcaattctgttaatctattcatttttattgttctgttttatatttcattttcattcgtttgcttattgtcccacttgtgaagcttatctcttaaatactgagtaatctgtctttaaacaacctattcacatgcactaggggcaatctgctagttcaaaatggcatttcatattaaggtaattctggttgggcaaaagattgtgccctaatgttctgtttagattgactcatgttgtaactcctcaaaatgatgagataaactttttatttcattggtgtgctggttcttaaaagttaccctttgagttccttatggaagaataagtatggaaaatcagccaagttaattctgaaaataaataatattacgaacaaggacaggcacggtggctcacacttgtaatcccagcactttgggaggccgaggtgggaggatcacgtgagtccaggagtttgagaacatgctgatcaacatagtgagaccttcatctctacaaaaagtaaaaaaaattagctgggcatggcaacctgtgctgtagttccaactgctcaggagactgaggtgggaggactgcttgggcctgggaggtggacgctgcagtgagctgcggttgcaccagtgcactccagcctggcagcctgggtgacatagcaagaccctgctaaaaaaaaaaaaaaaaaaaaagaaaggaagaaaggaaggaaggaaaaagattattaacattatttatgagactgcaagagtggttcaataccaacgggttaaaggaaaaaaatatattatcatcttatagatcctgaaaagtgattgacaaaattttgcactatttctgatgtttaaaatccattagaaaacagaactggatggattcttgatgttattacgaatgtaataactttttatgtttttacataaatgtaaaattttaaataacattttacatttagttttaactaaaagttacctaatgattaaacataagagcatgtttcttaaagtcaggaacatgaccaagatgcccactgtccctacgttatttagcgttgttctgaaggtgccagctaatgtaattacacaagagaatgaaataagaaaatatatatagagaaaagagggcagaatttgcatgtgatataattatatacttaggaaaattcaaaagaagctgaaatgctacaagcaggataaaataaatcagtttgtaaaaattaataagtaataatcactagctgtccttatttcaaataactagaaaacatgagtgaaagatttcactcataatttttaaatgctctaaaaataaacataacaagaaatgtacaaggcttataggaataaaactagaaacctctacagaggcatttaaaatacaattggataatgtaaagacataactatgcacagtcataatttttgaggtataacttgggccaaggacagcagacaaatccatggaagagaacaagcggcttactgtgtgtctctctgtgagtgaatgtatgtgtgtatataatttaatataatacaacattactttaaataagtgaacatattctgaattcttaaaaagcatattgttcatccttttttaaaagttatagtaatttctcttgtcctaagtaaaaataaatcccagattgagagagtacttggtagccaattgttgctcactggcagtagtgtcccttaacacttagtgtggcttcactgaacttttctgccacctcctgcctcatcagaacattatcccacttcgtttgcgatttctaagtgactccttaggtagtatggaaaagcaatttgtatgtaaaggtgttagtgagcaataatggcagaattttcagtattttaggatccttttggagacatgatgcctcattccaaatgagtaacactaataatgagcgattcactacttggcaaaccataaggagaaaattggtggtcaggcaagaataatcaactgcgcttattaagggcatgtagtcttaattatactgataggttattatgactcacaggatgagtagaactttatttcatcaatttcacatttgcttttgttttgttataggatcttagcctttttgcataggtaataatatcagacacaagtaatcctttttaaagaattataaattaaagctgttataccaatgtgtgtttggaggtagaagatgccatttcttccccttagacaggatctttaggaaagagacaagtcttatttataccttatcattagaatcaatcagtgttcattaagtgcacgtaatgtgctaggcaccttgccatgtctttccctatgcccaaggatttacccttctcttactctattcagataattgtttgccaaatgtgttatcctttgatgaggattatcggttaatgtgacattctacacatcttgccaaaataatcagatttctcatttctcttgccaatgctaaaaataggatggatgcattaggcattcttaagtaagtttgtaccttagttttatttctaatgtagatattgagtgaacccttaaaacaaaattacatgtgtggctgcaatcattattgggagatcaacccctccagtggtaacagataccagacataagcacaatatcacattatatgtgtgcgaaaagtggtgtttacccaacatgtctttggtcagacatgtaatgctgtttttttccccatttttgtttgtggctgggttttcttggcttcccccaccccctttagcacagaactctgaaagcctctaagtgatccaaccctaccaaccacaatttataaagtctatcataacagtctatgacaataaagaaaacactagtacaaatatggtgtctgatttataaagtgattcttgtttccagttttggcagcctccctgcttctgccagccggggggtgaggaaggagtgaactcagatccaaacgaggactcccaaaatggcagagaggacactcagcccatagaccccctggccagactgggtggaaagccatctgtttatgcacttactatacattctaagcacttgagctgtgactgcacttgactttagtgtgctggcttgttaatttcacattgggtacctgtttgcagataccttcctgaaacttacttgcaaaggcatttgaaagaataatgtgcaggagaaaggtcaataaacaaattgcacaaatcacattcttctccaaaatgggatgttcagtgcattaaagatgatcccctgggatgtgggaaagaagcatagggactttctgtatatgtattttttaatattagcttttaaaagctgtgctttagtaaatattttggaatgtacaaatatacgagagtgattttatttaatatttaaataaatacatatgtacatttcagagcatgaaaaattttttccctgatggagctgcacagtcagccatttttgaagatcatggagtgaagctgcaagctccatcaggacaagggccacagccatttcgcgcacatctgaatatatcacacttagtttattctcaggaatgaatggagaaaagcatgaacaaatgatcaatgacttattgaactctgtaaactaatattttacatcaacgaactcataaagccattcagaatgttacaagccttgttcttatttatacgatgctgtcttaccagtcctacaattgataattaggaatattatggcctgaggcagtaatgcttcagtacaataataacacaggtttatttttgttagaagttacccccagctggccctctcacatcagtcacattttcatcaggcttctttgttctgcataacctgactgctatgtagaggtgggcttataatgtgaactaaaaacatgattctggctccatatatgagttaaattttataaaactctctaacttccctccaaaatatgaaaagccaatggtattgtaatgactgctgataagttatcttgttgtcatatcctcaacaaaccattccctggagtataagcctttgagtctctaaagacttaactggagaacaggaagtaagaccagggagccataattattaaacaattcattcttacctgaaattcttttttattccctgggaatcaggtacctatttggcctcatcttcagaattcataatgtagaattcagaattcacaatatcctctgatattaagattaatatacccaaagatttgtagcactttgatcctcaatgaagtatttgctgttatttggtatagtctgagctgggtaacaaacagacccatccattcagtgaactaactaagaaactttttccctctcacataacaatccagacgtgagtcatccaggaccagtagggatgctcctctgtcctcagcatgaaccttccatctctgtttctaagttggcttctccatttgctgttatttctagataggggaagggtaaaagaaaactgaagacagtacctggaagtggagacatcacttccagtagcatcatatcggctggaagttactcataaaccacatcttgctgcaagggagactggacaaggtagtctctagctgagcagccatttgtccacaaagcttgaggaagggagttgcctataactaataggcaaaaaggagtggaaggagatgaggggacaatgagcagtctctgacattcactaaaccccatttaggtaggaaggaggactcaccatatataagcaagagttaactctgagaacacataagtctattaaaaattttaatggtcaagattgtattttcaaaaggtcaaaatactttgggattatttagattgcaagagagtgagagaaatttgaaagtagattcaacagcattcatctttttgaggaagtttcaaaggtctgtttagagattgcatctgtgattgtggaataaaccttgattgtcacctgcaccgcttttgctaggttttgtagattaaaaagagcattaattaaaaactagaaagttcaccagattaagtgattgtgttttctacatatgggaaacagatccccttggattgcaatctccattattataaggagctcattcctatttttgaactaatgtaaataagaaatcaatgaaatttaaatagattgtaactgcttgtgaaactgtaatcattgaagttgttatatgccactatttctcatttgcctattagttaaaaaaaggagaggagggattaaaccccattcattgcctctttccctttgtatacaagagtatgtgtccgaagaaagtttctcataaacccacaagggtacttggtttttggagcactcatgttcccaagtcacgatgttagtcatgtagtggttttccaataggatttcatctctgtttgccataatagttttggaaactgcaattcaaccccaatcacatttagcgtttataaaagctgtctttatgggaaagctgaagtaagacccacagagttttcctacaaaaccaaggccatctattggctttagctcaacaataagttattggcttgtactcaatttcaggggagacccagggaagaaggtaggaagcaggagggtttgcaagaggaaaataaccggtgagttatgtcagaggtgggcttttctttgtgttacaagtaccccaggatggaagaaaagatattctgcatgacatctttaaagaaacagagagctggaaggacatgcttgaaagaggagccttcattatgtggcctgggatcttgggctaaccttccagaagtggatgaaactgagggtccttggttggagagcatgacagcaagggatagattggattgttctaccagcagcggcaggagaggtacagcctgtgtaattgaagagcgggatgtgccttagagcagtgtttccaaacctcctggatcttaagactcagttggggcccttgttttaaaaagagaagagaaaagtcctccagatctatcagtggggactctgatttggcagttcaggggtggactctgtgatttcttcaaagcatcctaggaagaggtgagagccactggtggacagggaagccatggtgaatgaagtgactatatttgagaaggagtgtgaagcctgtgtggtatgaaagaggtgggtcccggaaattgtcaagagctgtctgtttctgagatgaccagacaacaaatgcttgctcaaacttttggaagttcagggtgttggggagttccattctcacttagcttctgcatcactaggctgctactcctgtcctcagtctttgcccttcaagaacactaggtagcggcggcggtggtggtggtggtaccagtaaaaataatcatcataatgataaaccctaaggctcatattcatcaaaaagtttgaaagcactcagaactcttctcttcagtgcctgtggctgcttttcatttgatctagtttttcatggtgaatgacaataccattatctccaccaccccaaactggaagtcagaagatggtcttatccttttattcacccactcttcacctctcccccatcctgtgaattctaccgccttacaaaaccttcaagtattgtctctactctgctcactgtgtggtcacatgaacagaggtcatcatcctctcttgcctgcatccttgcatctggccaccccctcctggtctcactgccactggcccatccttcccatagctgagggacttcgaaaatgcacatctgaacaggtcatttcttttcctgcttaaagcatccttcagtagatcgctgtggttgtcaggatgaagtctgagctgctgaacatgtaacaaaaagtcctctgtattctggaaagcctcgttccagcccctgcctcttcaggcttgttaccttgaatgctccatgtcatcgcctccatcgcaacttgtactccacggcctcaccacactatggtgctgaactctcccgacctggccataccctttcgcctctctgcctctctgctgtaatcagcaagtgcagagagggcaaagggcatgtctgtcctgcgaacagtgtcctcagaaacccacaggactcctgactcctagcctccatcagtaaactttgttgaatggatgaatggatgaatggatgaatgaatgatgagtctttgtgcatagtcctttgtatgccactccatgcccttctttgtgtagtcggttttctaattgtcttttaaaatccaactcaggcattacttcctggaggaggagcccacagatgcccgcccacccacctgtgggggtaggtgcccctcctgggcccacacggggcttcttgtaacagcagtaaccacacggacctggggtgaactggctcacttgaatgtgagcttcccaaggacagggtctgtgggatgtttcctttctacatttccagccccagtggcaagcacatagttggtgctcagtgaaagtttaaagaacaagtttaatgaatatgtgagtgacctgtgccctatgtgtgcacacttggtgtgctcaggtggcgagttgtttaatattgccagaagctagccagccatgtgatcaatccataggattcttaaggggctggaggtcactcgcaagctcagtgttttcctgcttctttgagaggagagctcttttcctctttggagcgtgaacacgttagggaccttggggttaggggtgctccttcactggtagccttggcccttttcttcctggcctcatggatctaaagcagctggcctggtatctctgaccccctttgcgtctcattcttagggagaagtctgtgagagcaaagtcttttccagaagagatgaggatttgtcaatgtagaaagcactgccaatggaaggtggcattatttttcaagtggcagaggaaaacagagacatggtaaatagcacaattagcccaagatgccacactgcagttactctgccaaacttttagatgacactttttaaaccagtagtatagtataagacatttgaaaatcgggctctttatgaagactaacattgctgtcataagactactttatgaaaacccaaggggacctttatctgtagcagaagctttctcatttaaaccatgaaggttaaacaataaaaactaattttctattcccagcatacccatcgcactcccaggaaaagcatcagtctgctttatgaaaacaaggacatgctattctttagctctttggtaggtagaggacatgaactgtttgcaaaaacgagtctcttccaattagcagacttcttttggaagaaatgatccaccagtgactgtatttggggtttggggaggaggccaactcacatcttggtaaagtttttcactgagaattttcactgatgggcatgggatggtggccgctgattcagtaggagctggagcaattaggaggctgagtgcagtggtagtggtggtgcggagtgtgtagaattcatgttgacaagagtttggctttgggagaatttgattagtcagtacttttatattaaaaataaagaattatagggatcagaatgttaagttacaaatttaaggtgaggatggcttttaccttcgggatgagtggggtctataccctacctaccttcgctcctcctatctgcctgctgggccactggaccccttgcccacctcatgatttttcccctctcctctggggagggtgaggacctgccctctcacctcccccagtgctcctgtcctctcccttcctggtgtcttatagggctctgctctacggaacctaggctgagaagggcaatccaccatgatcttttataacatgtattcaggcaacagagaactcaatgaatcctgctcttaaagttctttgctttgggtgtttttgcactatgggctcttcataaggaaccaggggtcaccagctccatccaggtgcatatatgtgttcccccacatcctgtggattgcaaggtcagtgtgagctttaggggagggaggaaagcgagaggctggggcagcgatactaaagcctatctcattagctattgcacaacacccagtggccactctttctgtgccttgttagccaagaatgccgtggaaataagagcgttgcaattaaggatgagctattgatgaaacactggctaaggcagctttccaagggagcagtgtgtgcaaaagtctgcatgtacaggagggcagagttcttgcaggtggaactaagagtaatttcatgaggctggaacctatggcatcccagagcctccttccaggtgatgaggtttgggagtacaggggaagaatattaggggatttcggagtggtaaccagactaagtgaaaaactaatgtttttctctgtactctcataacctgtctgacaccaaatatgtggcgtttgccctcacacaaagcagttctccaactcttcaggcactaattggatgttctgcaattcaattatgatactaactattgggaggtaacacagccccaacaggttaaaggctcagccccacaagactgtcccacttcagatgccattcacaagtgctaggttgttgcctgtatttctgaccaaccagctacaaatcgggggttcccatgacctcctactcaggttcggtaatattcttgaatggctcacagaactcaggaaagcacttgacttactatgaccagcttattataaaggatacaatcaggatccacccaatggaagagatgcttagggccaggtatggggatggagagggtcgtggagcctccttgcctctcagggcatgccactccctcagcacctggcatgttcacctgctaggaaggcagtggttaccctggctcaagcccactgttgagagtttttatggaggcttcattacatagacatagtttattaaatcattggccattggtggttgatgtcaaccgggaggtcaggaagtcaaggggtgtgatatggtttggctctgtgtctccacccaaatcttacctccaattgtaattcccataatccccaagtgtcaagggtgggaccaggtagaggtaattggatcatggggggtggttcccccatgctgttctcatggtagtgaatctcatgagatctgatggttttataagcatctggcatttcccctgcttgcactcactccgtcctgccaccctgtgatgaaggtgcctgcttctcctttgccttccaccaagactgtaggtttcctgaggcttccccagccatgcggaaccgtaagccaattaaacctctttcatttataaattacccagtcttggccagttctttatagcagtgtgaaaacagactaatacaggctgggactgaaagatccaatcttctaatcacatgaccggtccctctggaaaccagatcccattctccaagggtcacatcattagcataaactcaggtaaggttggaaggggctgattttgaataacaaaggatgcttctgtgacacctgtcacgcgggaaattccaaaggctttaggagctcagtgctaggaacctgggatgaagacgaattgcatatttcttattatattacaatattacacaggcccagttatgcagggccttctaagccctggtaaggaacgtggacttgaacctgaagtctggaagcagcccccagaggattttaagaagggacatgtactttaggatgcactctaacctcagtggatcactttgaggagggcaggagacaggaagaggaggtaggaagctattatgctagtcctaatgagaaatgatgaaaacttgaaggaaggcagtggtacccaggttggagaggagggaatggatttcccagctatttacaaggtggaaatctgcaggacttctctgcaggaattggaaactggctattcattttcagaaataacccatgtgtggcattcatgtgctaactcggctgatgaatgcactattcttgtaactaggttggagaagaattacatgaagggtatcattaagatgttaaaatgaatgcattacatatgttaacaagtgtatgaaccctgtattatatctggcaaacggggtgttaaatccttgttcaaccagccagatgtctctgcagctgctgctggtattgcagagggaggcagccacctgagaccccagctataagctggtgccagtgatttccaaagcatctggctgtacaaattccttcttctgtgctctgattgacaggtaccacatggatcacacaattcacatcacaatgcacaggtgagattttcagtctgataagcccagactccagcaacttgaccttttcagaatatctttgcagctgagaatgttctcagttggagctgaaatctatttattattattattattaatttattttttttgagatggagtctcattctgttgcccaggctggagtgcagtggtgtgatctcggctcactgtaacctctgcctcccgggctcaagcgatctcgtgccttagcctcccgagtacctgggattactggcaactgccaccatgcccagataattttgaaaatatttttagtagagacgaggttttgctgtattggccaggctggtcttgaactcctggcctgaggttgatccacttgcctcagcctccgaaagtgctgggattacaggtgtgagccactgcaccaggcctatttatattactttgtaagttgaaaaaaaaaacactgtagtaaaacaatcttaaaaacaacttaataacattctctcctgaattggaatgttatcaaagtcttgtttggggcagttattcagctgaatttacaaagaggggcgtatcctttgctgtaaatgtttaaattgcctgaagcaaaattcccataactacttaaaggagttgaaaatactcctaagtgtttatacttattcttacacagtaccatctctcctgagtggccctagtttactgagattgagccagctctgagacatctccctcctccttaagtttggcaaatatcctaaaacgtttgaaaagatgtttaaaagatctgaaggaagctggtctcaatggaccagagacaaagtctgcacagccaggctcctgggaattgcacttcttggatgttgagttcaggagaggcagtactagagaccacagttacacaatcacattgatcttttgtgtactttgtttcctggagaagaaattgtgtaatcccagcatttttttatgagttaaatagaagttgaaatttaaaaaaaaaaatcacattggttgttttcctgtctgtttaaatgtactctgacagcaaagatgaaaagttaatgcagtctaaatagaaaaataccacaatgagaagattttaaaaaaatattgtgaaatatcctcatctctattgtttttagacgttggggtttcaaatctgcaaaggctgactgcggcgttgtcaggattgtcaatgttggacagcgtccactaggtggcagtatctcagaaggtttcttttatccttgaatgggcagagatttctttggttgctctctttggtagttcggtttcctttttttgtcttgttttgaagggttaaatgaagctatcataatttacttatctaaaattgcacttatctaaaaatgcataaattcattgcaaggcctacttgttacagcgtgaccataaatgagtttattcattcatgtgaattttcttggtaacttattattaatgatcctagcgtgtaacagatgatgaatatgccgtatcctgagaaggtagatcacaaatcctcctgggaagctggacatgggtgctcattagccaagagaagaaaataggggcgtcctttgcccagcttcctcagcctggtaactgtttctggcttctgctccaggctgttcgctgagaggtttgttgaagttacctgcacttctctacgcaaatctacaggcattctgatggcgtaggtaacatgtggttgtgttggatgtttattcagagtgttaactaactggtttttgttaatttacagctggcttaaaataagataaaatgtacatacattttttaaaagatctctttcatgtgaataatttgttcagaagaaaggagtcgggatattcttttgtagtattttcccaaaattagattatcagaactttctgaattcaaagaaaccggcagtgccgtctgaatgataagattttggaataaagaactatagaaattttaaaacactctaattaatctgacagatgtagaggactaatgtggatgaaaagaaatgtaaatgcaaagcttagaaaataaatggaattgtcaattggggtgaagtttgggttcgtcttcagaaggactcctataatcctgaaaatgaaaaatattagggggctatcaaaaggtctgtgtttggcatgtgcatagcaaggtctctgatctttgagaagatggcaacatggaatggctccagctttgtggagtggactcgatagggtcatgtttggagatgcaatgtcccttatccatgtcctgcaggtcttagtcttgggggttcatcagccaagccataaacatgggttggccagttctcagccagttgttttctgaagcccctgggaattctgagatcatattttctgatgtcccggctcctttttgtcagatcccaggatccccagcagccagatgccagtcaaggtgagccaccttttcagagttactgcttcagggagggagtcacgctagggattcctgggtgggctagtggtattttgtcccagctttcaggagtgtattttatgacgatggcttgtaaaaggatatgggcatacagatccagagaccaaagttcaagtctcagctttattaggtgaagccttattctctctctgcctccatttctcagtctgaaaaatgaggttagtagtagttatagttttccaggctctgattctaacaaaagtcaaatatggtaacagggaaaatactttgctgtctacaaatgtaagaggttattaaattttcaatacgtggaatatatatgcaagtcatgagactatagtaaacccttaactaaattgagatgtcaccaaacaactattcatgggaacacttaattagtaacaatgcttctcaatacctgctacatattcttatcatctgggagcatctttaaaaaactacccagtcactatcagactaattgggttcattatcctggctgaggttggggtcagggtatgggtatcttctaaactgcctaggtgtctctgctgcgcagccaggtccctcactggaatgcatcaagtactgcctacaaaacttcagttacaatctcaaggccagaagacaccctaaaagtctagtcttagaagaatgttatttttatgattgatatctgtgcacataaataacaatggttttagagctcaaaaagctggggtgcagatacagatattgggaatactttctttgtaccttgaggtacatgtctatagacagtcatgcgctctctttttgactctgaaacttacctataaggtttctgaggggaattgcaatccttcaacacccaaaaggtataaaatgagagcagcattacctcttgggtctctagctagagttttaattcatcctgggtcatgaagccttttgttcttttttttttttttttttttttaaagcagacattgaaagtgcatctgagaggtgctgctggttactgaattttcctgaaacaaaatgggtccgtagcaactctgacctagaagtttctgattaaatgggaaagaaaagttcatagttcattcccgggtagaagaggacaaactttccctgtccgttgcatcggtggcttgagtctgctgcttctttggcctggatatcaagctcccagaaaatctccagtctgtgcctctgtgaatctttgaggatgtgaaagggattgtcattctcagatgaggccccaggccagcaacaccagctcactggtgctgaatgcaaattctcaggccccaccccaaatctactggatcagaaactctggggctggtcccagcagcctgttttaacacgccctccaggaggtggtggtgcaatgcatacatgctcaagtttgaggaccactgagctaggacaaaggcacttttcttgtttttctttttctttcttttattttcttttttttagacggggtcttgctctgtcacctaggctggagtgcagtggcacgtcacagctcacttcagcctctacctcctgggctcaagcaatcctcctgcctcagcctcctgaagagcacaggtggatgtcgccacacccagctaattttaaaaaattaatttttatagagatgaggtctccttatgttgcccaagctggtctcaaactcctaggctcaagtgatcctcccaccttgacctcttaaagtactaggattacaagcatgagccatcatgcctggcctggctttcttgattataagtgtgtttgtatagaaaatcacaaaacaggcatttgtaggtatatgctagacttagttctgcttccttctccccttccccatctctcctctgatggaaaggcagatcagagctagagggaaaatgaggggtagcgttcaatctcagaattactctgtcaccaaggttcctcttccaatcttttaagagccagtaatcaagtaaagatatactgtgtatatataaccatataaagatatacacaatgtttagagatacgctgcatatccagctttgctggcaccaaagtgaagaagagatgaacagaggaaggtctattccctaaggccacccatccacctgcctgacaagaactgggaaataagaaactgctatcaaggcatgtccctgttacatgtcagacccctccacacactcccacacttccgcagcacttggcacctgctgcagcaagaaaaatgcccaaaagccaactaaacaagcagtagcatttgaaggataaggggcccaatggctgggaaactgctgatgtgagaaagaccgcacagttacactcacatttgcagcaggtagtagagcgccatgagcagcttaataatgaaattttcctatagccttaagggagaaaataaaaacctgcagaaagaaagaaagaaaaagatgcactgtgttatctataagtctgttgtgaaggcaggggagacaaaactaggaaattccagaaattaggcaccattgagaacccggaggtcttgaggaaatcttggaagactggaggttgacatgagtggggaagaaaacgaggcctgggaagggccactcaacccaaaaggggctaccatgtgcctaaatacccgccctgcacacggcactcccagagctgtgcagtgtagtgccccgggtctaggcaacagcagaaagtggctttgagtgagtcctagggtttctttctaagagtcagccgcactgtgactagaacttcagaacaggtcagtgaagacagctgtgctatctcctccaacggtcattaaaaacaacgtagattcttatctctctctcagaagtttggaagcagaaagaagaataaatgttatctccagaatccttccagctaataacagttgaaattatgttattgcctctatctatctatctatctatctatctatctatctatctatctatcatctatctatctatctatctatctatctatctatctatctgtctatctcaaagccctcctctctagacacttaaagaacttaagctgcatggcctatctttcaaacaccgtggggagaatggttagcatgaatagttattccagtaacaggggaaattaggaatctctccagagtggttttttttcagtatccttataatagatatctcttttgttttttgtttttgtttttgttttgagatggagtctaactctgtcacccaggctggattacagtggtgcgatctcagctcactacaacctcccccgcaacctcccggttcaagcgattcgcctgcctcagcctcttgagtagctgggattataggtacccacaaccacacctggctaatttttgtatttttagtagatacggggttccactgtgttggcccagctgatcttgaactcctgacctcaagtgatccgcccatgccagcctcccaaagtgctgggatgatgggtatataatagacatctaaatttaccaggcactctgctaagtgcctacacacattatctcctttagtcttcacaagcaccctgtgatggggtgctgttaatatcctccgtttatgcaggaacttgaaccaaggtgaaagcctgagctttcatcccctccaccttactcttgccctaagatgtgacattttagtgtcagctaatgtctggatacaggtgggcatgtggttacctatttcatcctttattctcagggttcaaattgagatatgcaattacctatactctttatgttttttcttttttctggcttgtgcttctaatcctctatttgtggccatattttaagttaattgttggtactctaaaggctcttagacttccatatagtgctttaagtacactgtaactttaaagtaaaaaattaaccactgggagctaagcatcgttctctttcctgtgggctgagctttagtattataacagaaattcactaatgaaatagacatgaaaagagccttccagaagatttaagagggtcatatattctgtgtagttgttattttcctagttaacttcatctccatttgtgtacctgctacagatttttaattatgttcaattacgccatggtttataatctacatcgtcttttacttcctcttaccgtccaaagtattttgtttgaagttgggtatgatctcaaacacatcaacaccaattcttttgggggaacttccattgatagccacctaatacatataggaatttcactgccaatgttactatggcacctttggaaggaaaagagggttaatttgttgcatatgtaacagccctgaattcttattgctttacagaaagaatgattttataaataaaattatttttcctttttatttcaggaattacaacatatcgttggatcacagcacatcagagcagagaaaggtaagcatggatccatacatctgtatgaaatcccacagggtcactactattttggctataataatatggtttctctcatctccagcgatggtggatggctcatggttagatctggccaagaggagcaagcttgaagctcagccttttgctcatctcactattaatgccaccgacatcccatctggtaagctctatctgcatccagcctgaaaaatattttaagagtcatttatcagcccatttcaatactgaaacctatttttagtctgtcactgaatttttgagagcccttacttcaaagccaaaggaaagaccattcatcctcaggtgatgattcacatcctggaaactgtgattctcaaaaatgtcagaatggacatcatcaccctattcattttcagatcatcagaatggatgcttattttaaatgactgccagctgaaagcctgtaacctggaaggacaatcctttgttatgctcatctgtactttcccaagctaaagttgacacagccctgctgctgacctcggaggtgaatgaattcatcaggtagtcacatactcagctatctcctgcagaggtccagggaggacactttagacccccgttaagatctttaagagacagtaaccctctagaaaatgagatctcctcccccttctccaagggcttatcattttctctgagtaaatgcttagcttgatggactagagacctgattatcttgaaaatgaagaaacccggagctctctgcctacagctactgtaatacaccagttattccatcatacaacccccactggttacttcaccatgggctagatagctatcaaaaagataacagaactttatgatacagtgacaattgaacattcttgttatcatcatgccactaatggaacacttgaagatcttaaagggggatcttcaggtgtcctccctggcactctactggagatggctgagtctgtgactacccgatgaactcttccacctgtcaatcaggtgttttccccttcctcaatacctctcatccttactgcaatcctgcaaggtagggattatcacgcaaattttgcagacagggaaactgaatgatacataggttgtcatttgttcccagtcatgatgatgataggattagaagtagaattcccgtcccgttgattgctaagtccgtgctttccatgctctctattatcacataagcaggccacaaggtacttgtggtcagttggcttggccagagggaaagaattcaaagcccttatgtttctcttttcctgtgagaagtagattcatgtgacgtctaataacaggggtgctaaaatctgactgcctgggtttgaggctccattgtcctggctctgtgaccttgtacaatttattgcaatcacatatgcttcagcttcatcatgtctaaaatggggatgttgatagcatctgcctcaaggggtagctatgaagatgaaatgaggtagactgctaacattcttgtgtggaagaacggccatagtaagcacttgggagtgtgatttgttatttttgagttcaattaaataattatacatattccacctttttcctacaaataatttaaggcaagtttttctcggagttaaagaaagaaagttcaagttttgctaagttatttggaaaactttgttacggcatggacaagggggaatttttcctgaccgaagacacagaaagggagaaaccaattctttggcttttagaggattttccaaatgacctctcctgtcccagacacttgcttcataaataatttgtctcactgtgtgtctatgcatgtcttgtggtggagctacactaattttctctgagtggaaaactgttttgcatgttagcaaaggcaatcaaataaatatggatgcatctgtattaatttctctgagtggaaaactattttgcatgttagcaaaggcagtcaaattaatactaatgcatcagctgtgtgtgctattaatgttccctacatttatcttttcagttcactttaaatggcatatgataaatattgcattagaccgtttgccaaagtctgtttggcaatagcaagcatgttttagttataaaactctctctgcaggcacctagcatcaaatcattgccaaaaacacaaggcaaaactcctggttattttctgacagttattgagtttgtgactgagtgagatgagttagtgtatacttctgtttaagaaaatagaatttgtggctctggctgggcccacaactccttgagtccatttattacccagttttggccagtactggaggtttcagaggaagtggctttaaatttgcatgttcattttggggctctgttttatacttacttacacaagtaaaatcagaatctgccttatatggactgataccacttgcattttcaaaatatcttagatgaaatgcgttgggaagtatttagtgaggtcagaatacatggctttctttaggaggatactcaggctaaatatttgcagagacctcttctgcggtacttagcagcagggactgaagtgtagggcaggggaggctgggaaagctggcaggctggagtcaggggttgtcagtgtgcctcagtgatgaaaatccaggtttccatgtgaggcctgctgtgtgatcactgcatatttttctcatgtttttacctggtattatctgcttctgagtcctctcttcacactgactggctctcctccttttcccccatacgtgccatgcatattccattctttgctcagtttccttcactgacaataccctcccttttctcagcccatccaagtctgacccaaggccccactgtcctctggcttctctgccccttcctgagctgagctctcctgcttgccatgaatttctgtagctgtctcttggcagttgcttgtaactgaatgtcaaccatgtgctatgcaacatgcagaagtgaaaatgcatattttatatgctcattttctattttctctactattagtggtgagtgccattaaggcacagttggttgatgtaattcttaattacgggcagactgcctgttcctaaaaacaccacgtagatattgtgtgactgatcaaaagcatgaaccagtgaatgtatgagtaagtcaatgcacaaaaatagagagatgtttagtaggaaataagggcacttcttccacatgacttacctaacaatgggaatggtaatcggtcaaggttcctctcttctcctgcctctctatttcatattctttccttgccttcctaggccatatcttgctctaacgccagctgatccatcccattgagagggtagacttctcttctgttaagagataactataagaaaaatcattgattgaacaacaaattgactgcaagagtgggataagaatgaaggcagcatgggataacttgagatgggaaacatcttgaatttcatggattttgtcaatggattagaggaattgcttttactagtgttcatgaaggtgtgatgatcatgctcactcacttggggccagatgatggtatttatatctggggtgctttaatctgggatgacctgaaataagacctccgatgaaaaagaagggtgtttattgtggtgagcccaggaggcaagagggcctgtgatgaccccgctgcagataggttgtggagttcaggaaatatcctgtttctggacagagggattggaaccattgaattcttggtcttctcatgatggattgccccaccgttggatggcccttgctgcagtttttctcccaagtggttgaaagaactgcctgtttggttcctacagcctagttttgaggctcccagatcatatcccaggctcccagttctttagagataaaattgtagaacattctctatcttgtgggcctctagagaaggatgtagatgttcaaggcccaccaaaccagactaggctgggaaggtaactagtgtgtgtttccttttttttgtttgttttgtttgtttgttttttgagacagagtcttgctctgtctcccaggctggagtgccgtagcgcgatcttggctcactgcaacctccacctcctggattcaagtaattctcctgcctcagtctcctgagtagctgggattacgggcgcctgccaccgcgcccagctaattttttgtatttttagtagagatggggtttcaccatgttgaccaggctggtctcgaactcccgacctcatgatccacccacctcagcctcccaaagtgctgggattacaggcgtgagccaccgtgcccagccatgtgtttctttctcgatgaggctctcataaggattcactctaatcagagagctgtcagttttgatggatctctggaatccactataagtcttcatctctgggctaatttatctccctcagcatctcagggcctgacctaagttgtggttgggtgtgacaggcagcagtgaacttcttgtggctgcaggaactctctcaactccagtctgagactcaactctgctttgttttgctgatttcaaactgctgaccaccttagtttagtataagtatttacaaaatcctctggaagaaaaatgtatttttgtactttccacagtattacaactttcccaccattagttaccagcttttccagttgaacaatagtgtccacatcaatacaaatctttgattaattgggtttatcacagaggtattgccaatttttaatgacccaggaaaatacaccaaaggacctgaaatatgaaaaggattggacacactgctggtttagaaggttctttagaaatttttactgctctgaagctgtagcaagaggaccaggtgtcacctcatttcaggggtgagtagggctaaatgagaattctggtcagtcaggagaagctttacagacctttggtcagaaggattgtgtgaagttgttaagctagggagtgcaatgctaagaatatgttctttttgagcttctctggagttagcttttcagttgtgcaagctaaggtgggagacacttgggctactggaggtgaagaaaatagattatgagaattgagtttagacgtctgacctttcagccaaagttactgtgacccagtttttcatctcctactttccctcttcatgagttaaaagagaaggttgagacttgtgacatgtggaaattgtcttcctatcctagtttcttgctttcctgtctcagttgcctttggcttatctcttccttcaacctggaatgacctttctgctcctgtctgtgtggctgaatcccatttctcttaagttctcaggcttagcagcaactccacaaaggcattctttacccttctgggtggaaagttgttcttgtctctccgtcctttgagctcccatgggagttactgaaccttgcctattgttactcatgccttacttctgctctgaacacatatcgtacttacccctggtgcactatagacgccttgagggcaggaaaaatgagtttttgtcttcgtagcctctactgtgcctaacagaatgcaccaagtacatctgaatgtattctccccttctagaaaagaaatgccaataagttattctccctttgaaataatgactgctatactattttttctccctaacctcatagaattgtgaagacgtccttctcatttaaggactgactttcaaatcttatgcctctcttctccacaggttcccataaagtgagtctgtcctcttggtaccatgatcggggttgggccaagatctccaacatgacttttagcaatggaaaactaatagttaatcaggatggcttttattacctgtatgccaacatttgctttcgacatcatgaaacttcaggagacctagctacagagtatcttcaactaatggtgtacgtcactaaaaccagcatcaaaatcccaagttctcataccctgatgaaaggaggaagcaccaagtattggtcagggaattctgaattccatttttattccataaacgttggtggattttttaagttacggtctggagaggaaatcagcatcgaggtctccaacccctccttactggatccggatcaggatgcaacatactttggggcttttaaagttcgagatatagattgagccccagtttttggagtgttatgtatttcctggatgtttggaaacattttttaaaacaagccaagaaagatgtatataggtgtgtgagactactaagaggcatggccccaacggtacacgactcagtatccatgctcttgaccttgtagagaacacgcgtatttacagccagtgggagatgttagactcatggtgtgttacacaatggtttttaaattttgtaatgaattcctagaattaaaccagattggagcaattacgggttgaccttatgagaaactgcatgtgggctatgggaggggttggtccctggtcatgtgccccttcgcagctgaagtggagagggtgtcatctagcgcaattgaaggatcatctgaaggggcaaattcttttgaattgttacatcatgctggaacctgcaaaaaatactttttctaatgaggagagaaaatatatgtatttttatataatatctaaagttatatttcagatgtaatgttttctttgcaaagtattgtaaattatatttgtgctatagtatttgattcaaaatatttaaaaatgtcttgctgttgacatatttaatgttttaaatgtacagacatatttaactggtgcactttgtaaattccctggggaaaacttgcagctaaggaggggaaaaaaatgttgtttcctaatatcaaatgcagtatatttcttcgttctttttaagttaatagattttttcagacttgtcaagcctgtgcaaaaaaattaaaatggatgccttgaataataagcaggatgttggccaccaggtgcctttcaaatttagaaactaattgactttagaaagctgacattgccaaaaaggatacataatgggccactgaaatctgtcaagagtagttatataattgttgaacaggtgtttttccacaagtgccgcaaattgtaccttttttgttttttcaaaatagaaaagttattagtggtttatcagcaaaaaagtccaattttaatttagtaaatgttatcttatactgtacaataaaaacattgcctttgaatgttaattttttggtacaaaaataaatttatatgaaaacctgccttgtgattttgtacttcaccttcatgtctcttttgctctgtgatcctattattttcaatatggtaatgtggcttctatctctttccaaaggttactgggagaaatgcagatttaattaaaaattagaagcagattcaattaaattaatgatccttggaatctgaaaaataatttgcaaggaatttgtatgcaaggatatatccagatagaaaatggagtcttcttcacttaaaaaagccaaaatttatattatgttgatattgtgagaaaaatatggtgctttgtataagttcataatgtcttaaagaataactgtgcatgttgtgcacacgtaccctagaacttaaagtataataaaaaaaatagtaagaaaatgcacgcacacaaaaaagaataactgacctggaggaacacctgacattttataccttactgtggtaaggaagaattaacagtgtcctggactcttgttctcatggaaatttatacaggaaagctgtctgacccaggttggttacttatgtgggagagatataagaaaataagcagcttgggaaggcactgtacaccataatctaaggcacttttcatttatggataaatgtttttagatggctgtgacaggatagaaggagagaagaaacagcagatgttacaaagaagaaattgtaaaattcaaacagcagagctacaatggtggaactcaatcattggccaaaatagacctactatttaaaaactgtcagtacgtctaaggtcaattggtataaaatatgacttctgtgtttcatgtcccaattgctgagccttagtttaaggaaaaaataattttgataggcaatcagagagtttctccactctccattggcactgtcttattatgtagagtgcctcattagctactgttgctctcataatactattctgttataggactaacaggttcatatgcccactgcacagtaacagtccaagtacactgagacagcaagatttgtggcagaggaagagtttaatgatctcagggcaccaagtgagaggatggaaggagactcagattcatctcccccgaggagttctgggctgaggtttttaaggggattagggagagcgaggggttagaaaattggggtcattgagtggctggggtaagagggatgaaatcctcaggatgtggaagctgcattccttggtgagggagcttctcatggggtcctcttcagatcagctggtgtcagtagttttgctgatatgcaggacctgaaagaatgtctcaaagggaaaacttaacattttgtgatgttcaagctgttatctatggagcatttaaagcgaactataatcttagagtctacatgattctaagacaataggcaaatagctatgaggaaggggtcggagagcaagctgacctagtgatggatgctgagtgtgttgcaagcttgctttatttttgttttcccccctctttgcttccctgataaatgttataaagtttatagggacagtttcaaatctgtcatttccaaaggtgaatgacattcatccatttgtttgttccatattatttcttgagtaccatctatgtgctaggcactgtgccaggcatgtggatgctatggcactctccctgcccttgaggagtttccattctagttgggagccagcctagcaagggtgtgtgtggtcagccctagggtgtggacatacacagcaggctgtgggagcagagaggaggctatggaacccatcttgggagccacagaaagtctgaaaatgatatcagactggataggaagtggggttgaaaaaagctttgaaagtggatatagaatatccgttaccatttttaacttagaggtaactgaatgtgcagtctctcaaagatgaactaaaaatccaaggtccaggaatgaaaaaaaaaacaccccaggatctagtgaggtaagacatggtggcaccagccaaactggagaactaacatggtagagggcctgcaaagccaagggacagcctgtattgaagaccccaggccgggcgcggtggctaacgcctgtagtcccagcactttgggatgctgaggtggctgaatcaggaggtcaggagtttcagaccagcctggccaacatggtgaaaccccatctctactaaaaatacaaaacgttagctgggtgtagtggcaggcgcctataatcccagctacttgggaggctgaggcaggagaattgcttgaacccaggaggcagaaattgcagagagccgagattgcaccactgcactccagcccgggcgacagaatgagactctgtctcaaaaaaaaaaaaaaaaaaaagaagacctcaataatggagcctacctgtaatgtgaattttatgtacattagcatcatagcaggtcagagatgttttagagctttgctggaatgaatctatgacttaatgaaaagtgagtataaattggactatgccttgaaggaggcaatggtagcaagtggatatgccaggaggtatggaaaagacttttctagtcatgctcaaggcttgccaggctgagttgtagggtctaaaatgcaggatgcaaaataccctactttcctcttcacatgctacttttttacttctgtttttcttctcactcatcccttttacccttttgtgtgtgtttgaactcttcccttttttcttttcctgttccccccaatgcctggctcttgcctcagatgacaatttcatttctgtggtgggcctcggggaataaggaggctgctgcatctaatggagatggaaccaggtcatgtcaacactcagtgacagctaagtgtgttgaggtgtgacaaaatcatgtcaggaaaccaacacatatgatggcaaactcaattgtttgctcattttaatgacttcatttcaatcttattcctaacacatgccaaatctgaaggaaggaaagagtgtcaaagttgaagccatctgtcttcttgaattgacttgcaactccaccagaccatgcacccttgcacctttcaaagcgccatgtgtgcaccaatttttgtttagtgtacctgttttcccctctttgcctatttccttttctctattcatcttcattaggccatcctagaaaaaaatatctggagcagatgatctatttccccagtgactctgggggggaagctgagcacctcatgtatatcctttccctctgggtctgattattggtttggcttgagctagtgccatcaggttatacttgtacattttgggagcataaccttgactcaaattgcacttctacgtttagcctggccaaacatgggcttgcttcacttttggctttgttaatcgattcttcagcttccttgctatgaaattgaaatatgtttcccagtagctgcatttataaatgctaattagttattgattcacattattatgatttagccttgtgtcactttctacaataaaaagtgtatacacagtgagtgttagatttcagctataaagcagaaatctatccttttgattaataacacttctatgatacttctactcttctattcctgtaatttaaaatgtttatttcctaatcatctaccatcacctcccctctcctctggtgactgatttcctttgcaggggcttgtcattattgcaccttgaccagtgctctggctgtttctagtggcagtctcttgatattatcagatgtggacaagttataacaacattattcatattgctactggctttcaatgtctgtaaagaaaccatgtagagtcttctgttttgaaaattcttagacgtgtgtcttccagttggcaaaggagtgagctagaagttactccattagcagcacccaggggatcagaggtggtttcagaggcaagaagtttttctaaaaaggttgatagttacttcagtctgcctaaagagggtcctagaatcatgggatgtcactctgttgggcaaatgccaatttcttccctttcctatggattctgcagacacttcgttttctcagaagtgtgatctcagcaacctcaggttggtggaacaaaacgcctcatgagatgtgaacatcttttgaaagaaagattgcagatttaggtgtcagccagacccaggcctggagtctgatctccactgcctggtaccctgggcaggtggccatcatttagattcagtttcctgccttgtgaagcaggagtcaccctgcctgagctgagtcataaggattggcgcaaaacgggctcaacaaataggagccaccgtcaccatcctcctagcccatttgctatatccttgcacaaagtttacgctttttttctctagatgctgggcagggcccacattaagcaaattactgtgctctgcattgtggtaccagaatagatactgtattaattccctacagctgcctagataacaaatgaccacaaactggctggcctaaaacaacagaaatatattttctcacagttctggaggctagaagtccaaaatcaagctgtgagtgggaccatacccccctgaagactcttgggaggaatgcttccttgcttcttccaggtcatggtggttgctggcacccccgtgtgttcttttccttgcagctgcatcactccagcctctgcctctgtcttcacatggcttctctcctgtgtctcttcacatgattcttcctccctgtgtgtttttttgtgtttgtgtgttctctgtgtctccaaatctctctcttcttatgaggacaccagcgactggatttagggcccattcatcttaccttgattaagtctgcacctgttcagatggacataaattttgggggaacgctattcaacccagtatagatacaaggaacttagagttcaggggtgaaataaatatttaaaagccaagtcataaacaaactggaatgaaataaatgccacaatagaagcacaagcaatgaactattgaactcacctaactcagtgagggtttgctttcattgaaatatgagtgaaaccatattttgatgacatttgaatagctacaatgtgctgttgtgggctgcgtgttttcaagagattatttcggggttgggacaaggctcatatgcactcctatttacctccactccttagaagatcctccctacacacacacacacacacacacacacacacacacacacacacacacacatgcacacacaattcacccacgctacactaggacatccgggctctgcagatgactgctacctggatttatacttgtttcttccttctaatggcgaatgtgattttgctcaaggattagagtttaaccagtttgaaatagttcatctctttaataaatacggaataagatggagaaaacgttactccccggagctccagagtgcagaggaaggtggaccagctagatggagctttccccagggggatctgcagggctggagatttagcatggtgttctgcctgcatgccagggggccacacgacgatcatgtgggtgatggcaggaggcacagttgggctgagaggacagaaccatattggtgactctgaagtctttggtaaagtgaccagctttatgagtttgttgtggttgcattcctggtgggaacccagtggaaaggcagagtttgactggcgctacaagatacagaatggagcaggctacagaagcaggagcagagagaagcacaaggccatggcccgacctcaggtgtggagatgctggtgccttgaggcggggtccttgaaccttctctgggcagggaggccttcttttgttagttagtgtgctccggagatactgaatcatagtgtattggtataggctgggaagtccccttcctgcaagctggaggcccaggaaagccagtggtgtagttctagttcaaacccaaatgcctgggaactaggagagctgatggtgtaagtccaggtctgaatctgaaggcctgagaaccaggagtgctgatgtctaagggcaggagaaaatgaatatcccagttcaagttgagagagcaagttagctcttcctctattttgttctattcagactttcaatggattgggtgatgcccacccactctgtggaggatgggtcttctgcactcaggccactgattccaattctaatctcttccagaaagcccttcacagacacacccagaaatcacgttttgccagctatctgggcatccctcagcccagttaagttgacacctaaagttaactgtcatgctgcactgaggacacttgggttaggtataaagtggcttgttcaaatttagaaggaaagcatcttaaaccctaatagatgaaagaggaaaagtccgcacacaactctaggggaaacccaataatacaccaaactttaaaaaaatttctaaatgaagaattaagtcatgaaataggggataagaatttgtgtaagtttgcctaaatagacaaggttcagagagacattatctatagcagcaggggaaaaaaggacccccagagagcatcagatacatacagcaggtgcaggacaggtgcagcaccttccacttccctttgttctgcagaatcaccaacacaggtggcacttactccaaaaggcagatcttatcttgagttcaggcacaagtcaatagcacagaagcagtgatgagtgtctggtccataagaaagagataagtgtgcaacttgggggagagagtctgtcagttcaggtctaagggcaattaacatggaaacgattttagtgtgtggtcaagatctcaaaaacaggaattcagctctggaagaagactaacagaatccctagaagtgggtcagatcgcaggtggctgggggtacaggcagtgccccctttcaagacaccagggagctgtaggtgtgggaggaaactccaggtgcccatgatccccgggtagaatgggccagagaggaagataggctcccctgtagggtagattcagaaagcagctatgaaatctcatccctgaaactgtgaaagactgttaccttctgtattagtttgctagggctgctgtaactaataatgacaaacttggtgacctaaaacaacagaaatgtattcttgtgcagttctggagccagaacttctgaaatcaaggtatcggcagggtcaggctccctcttggaggatctgggaagaatccctctttgcctcttgcagcatctggtggctctaggagtttctgtggctacttcactctaatctctgcctctatcttcatgtggccttcttcccttctttctgtgtcttttctgtttttgcttttttttttttttgagatagggtctcactatgtcacccaggctggagtgcagtggcacagtctcggctcactgcagcctcctcctcccaggttcaagcgattctcattcaagcctcagccacccgagtagctgggattacaggcatgcaccactacgcctggctaatttttgtatttttagtagaggcgaggttttgcctgttgtccagcctggtcttgaactcctggcctcatgttatctgcccacctagacctcctaaagtcctgggattataggcatgagccactgcgcccagcctgtttttgcttcttataagggtgttacaataggtagctagtcagacatgagtagtgcaggagaacaacccccaaccaggaatgtcaggccaccattagatgatggtcaggtggttgtcaaactctctaaaataattggttgcggccggcaccagggaacagcagtctcccaatagatagaaacagctgaaactggtgatcagcagcttcccagtaagctctctaagagttgacctagtgggctcacacgtgagcactaagaggcaaaatggtggcgtttaataggcatgtgactttcctctaggaactctcaactggtaagggaatgactcatcaagtgagcatgcgtacagctttagtaaacacactgcacatgcagcccctcccaagtgctacttccctctgttctacaaaatcaccaacacaggtggcacatactccaaaaggcgtatcttatcctgagttcaggcacaagtcaatagcatagaagcagtgaggagtgtctggtccatgggaaagagataagtgtgtaacttgagggtgagattctgttggttcaggcgtaatggcaattaacatggaaacgattttcgtgtatggtcaaggtctcagaaacagggattcagccctggaagaagactagcagaatccctcgaagtgggtcagatctcaggtggctgggggtacaggtagtgccactgcacatgtggacagcgcaccccaagaatcaagggagaaagaatgcaagatcccagaagtatgccaaggtataaaaccccaagtcaaatgtcaaactgcgcatttgatctctcaagttgcccacttggccctcctccaagtatactttccttcctttctctcctgctctaaagctttttttttttttgagatggagtctcgctccgtcacccaggctggagtgcagtggcgcatctcggcaagctccgcctcccgggttcacgccattctcctgcctcagcctcccaggtagctgggactacaggcgcccaacactacccagctaattttttgtatttttttagtagggacggggtaaagctttttaataaactttcattcctgctctaaaacttgccttggtctctccttatgctttatgcccctcagtcaaattcttcctgaggaggcaagaattgagattgctgcagacctgtacagattcaccactggtaacaagggcactagtcattggattgaggttctgccctgttaatccaggaggttctcatttaaagatccttaacttaattacatctgcaatgacccttttcttaaataaggccatcttcacaggttctaggcttt

SEQ ID NO: 1346 - DNA, 2226 bp, Homo sapiens
ctcgacccacgcgtccgcgcgccccaggagccaaagccgggctccaagtcggcgccccacgtcgaggctccgccgcagcctccggagttggccgcagacaagaaggggagggagcgggagagggaggagagctccgaagcgagagggccgagcgccatgcgccgcgccagcagagactacaccaagtacctgcgtggctcggaggagatgggcggcggccccggagccccgcacgagggccccctgcacgccccgccgccgcctgcgccgcaccagccccccgccgcctcccgctccatgttcgtggccctcctggggctggggctgggccaggttgtctgcagcgtcgccctgttcttctatttcagagcgcagatggatcctaatagaatatcagaagatggcactcactgcatttatagaattttgagactccatgaaaatgcagattttcaagacacaactctggagagtcaagatacaaaattaatacctgattcatgtaggagaattaaacaggcctttcaaggagctgtgcaaaaggaattacaacatatcgttggatcacagcacatcagagcagagaaagcgatggtggatggctcatggttagatctggccaagaggagcaagcttgaagctcagccttttgctcatctcactattaatgccaccgacatcccatctggttcccataaagtgagtctgtcctcttggtaccatgatcggggttgggccaagatctccaacatgacttttagcaatggaaaactaatagttaatcaggatggcttttattacctgtatgccaacatttgctttcgacatcatgaaacttcaggagacctagctacagagtatcttcaactaatggtgtacgtcactaaaaccagcatcaaaatcccaagttctcataccctgatgaaaggaggaagcaccaagtattggtcagggaattctgaattccatttttattccataaacgttggtggattttttaagttacggtctggagaggaaatcagcatcgaggtctccaacccctccttactggatccggatcaggatgcaacatactttggggcttttaaagttcgagatatagattgagccccagtttttggagtgttatgtatttcctggatgtttggaaacattttttaaaacaagccaagaaagatgtatataggtgtgtgagactactaagaggcatggccccaacggtacacgactcagtatccatgctcttgaccttgtagagaacacgcgtatttacagccagtgggagatgttagactcatggtgtgttacacaatggtttttaaattttgtaatgaattcctagaattaaaccagattggagcaattacgggttgaccttatgagaaactgcatgtgggctatgggaggggttggtccctggtcatgtgccccttcgcagctgaagtggagagggtgtcatctagcgcaattgaaggatcatctgaaggggcaaattcttttgaattgttacatcatgctggaacctgcaaaaaatactttttctaatgaggagagaaaatatatgtatttttatataatatctaaagttatatttcagatgtaatgttttctttgcaaagtattgtaaattatatttgtgctatagtatttgattcaaaatatttaaaaatgtcttgctgttgacatatttaatgttttaaatgtacagacatatttaactggtgcactttgtaaattccctggggaaaacttgcagctaaggaggggaaaaaaatgttgtttcctaatatcaaatgcagtatatttcttcgttctttttaagttaatagattttttcagacttgtcaagcctgtgcaaaaaaattaaaatggatgccttgaataataagcaggatgttggccaccaggtgcctttcaaatttagaaactaattgactttagaaagctgacattgccaaaaaggatacataatgggccactgaaatctgtcaagagtagttatataattgttgaacaggtgtttttccacaagtgccgcaaattgtacctttttttttttttcaaaatagaaaagttattagtggtttatcagcaaaaaagtccaattttaatttagtaaatgttatcttatactgtacaataaaaacattgcctttgaatgttaattttttggtacaaaaataaatttatatgaaaacctgaaaaaaaaaacaaaaaaaaaaa

SEQ ID NO: 1347 - DNA, 954 bp, Homo sapiens
atgcgccgcgccagcagagactacaccaagtacctgcgtggctcggaggagatgggcggcggccccggagccccgcacgagggccccctgcacgccccgccgccgcctgcgccgcaccagccccccgccgcctcccgctccatgttcgtggccctcctggggctggggctgggccaggttgtctgcagcgtcgccctgttcttctatttcagagcgcagatggatcctaatagaatatcagaagatggcactcactgcatttatagaattttgagactccatgaaaatgcagattttcaagacacaactctggagagtcaagatacaaaattaatacctgattcatgtaggagaattaaacaggcctttcaaggagctgtgcaaaaggaattacaacatatcgttggatcacagcacatcagagcagagaaagcgatggtggatggctcatggttagatctggccaagaggagcaagcttgaagctcagccttttgctcatctcactattaatgccaccgacatcccatctggttcccataaagtgagtctgtcctcttggtaccatgatcggggttgggccaagatctccaacatgacttttagcaatggaaaactaatagttaatcaggatggcttttattacctgtatgccaacatttgctttcgacatcatgaaacttcaggagacctagctacagagtatcttcaactaatggtgtacgtcactaaaaccagcatcaaaatcccaagttctcataccctgatgaaaggaggaagcaccaagtattggtcagggaattctgaattccatttttattccataaacgttggtggattttttaagttacggtctggagaggaaatcagcatcgaggtctccaacccctccttactggatccggatcaggatgcaacatactttggggcttttaaagttcgagatatagattga

SEQ ID NO: 1348 - DNA, 67832 bp, Mus musculus
  misc_feature (26053)..(26112): n = a, g, c, or t.
  misc_feature (28892)..(29324): n = a, g, c, or t.
  misc_feature (30179)..(30757): n = a, g, c, or t.
  misc_feature (32761)..(32780): n = a, g, c, or t.
  misc_feature (43840)..(43859): n = a, g, c, or t.
  misc_feature (57867)..(57886): n = a, g, c, or t.
  misc_feature (60656)..(60675): n = a, g, c, or t.
  misc_feature (61916)..(61935): n = a, g, c, or t.
gtgagatgagcatacataagcgtctgcctgctcggctggttctgaggtccgaaggggctccactccggggcatgggtctccatggagctgtaccctgccgtgaccactttctatgcccgcaaagcttcctgccaccctctgctacaagcaggatggttttgcttgcttacccaaatgccatcccattttatactaatgagacccttttaattgttttatactttaacatgtctttgcatagtattttccatatatatgcttatgtaagtatatgtctctgtgtgtgtgtgtcctctagctggatagctgaatagaaggagactacccggcttctagatatttgtgaatctcccaaatgactgtttcctcatctttccaacataggagagttttgtggtcctgaggaagttttggaaaagcagccaacctgggaaggaggtgatgtgcttagcattttccaaaaagatacaaaagcaggcatggcctaaaataacacggaactagaaagaaagatatcctgtgagcctggcctctgccaatcactagcatgaatgaatgcatttatttctcagtaacggtgatctaagaagaacatcagatagtagctgctaccctcttgaatttgtggggcagtgctgatgggaagtcaagatgaaagagtcatacagacatcttagtgacaaggcctgcctcggtgggggagtggggaaatcacgaccgtgttcacctactctgtggtttacacgccatgcatggccttcagtgctgggcagtgagaagcctctgctttagtgtgagcagagggctgcattcccaaacaagcctgtttgttattgttgattcttctgaagacaggagatcctaatttggctgagttagtccaatcaggaagaccctttctgctttaacctttacaaaaaagtaatctcatgcaagccagtctttaaacaaagaaaatttagtagtgtgtgagtgtgtgtgtgcattgtgtgtgcactggtcaagaattttcttaattgccaatgatgcaggagggcccagaccactgtgggtagagccatccgttaggcaggtgagcctggaccttataagaaaagtagctcagcaagccagtgggcagtgtcccttgtggtcctgtttccaggctcctgcttaagtgtcagtcttgacttccctccatgatgatctatcaccaataaggttaaatgaattcatttctctccaagttgcttttgggcagagatttttcatagcaacaaaaagctaactaggcgagcatacgtgtgtgtgcactgcacttgcaaggagagtcatgtgcgcatgtgtgaaaggcagggtagctttgcagttggttttctcctttcctttcacctttatatgggttctgggaattgaacccagatctctaggtttgcacagcaaatgctttgagctgagccagcttgctgccccgtcatggtttttcttggtgcttgtctttctgctcccaccttacctgctgttctgatttctgttgagagctctcggtctgtttcagagaatggaggcttggcgtgattcatgaattgtgactaagctgataattgtgtaagctgataattcctacttttatcttctaacaacttatttcctgaatgcttaatccggtgcaggctgccttgttaagtattctacatgctgaaaagttataaaatgctcagaacaaaggacgggcactgggggctggtgagatggctcagtgagtaagagcacccgactgctcttccaaaggtccggagttcaaatcccagaaaccacatggtggctcacaaccatccgtatcgagatctgactccctcttctggagtgtctgaagatagctacagtgtacttacatataaccaataaataaatcttaaaaaaaaaaaagaatctttaaaataaaaaaaaaaaaggacgggcactattataaattgtgatccttttacaaataaggaaactgtggttgcgaaggggttaaataacagcttacagtccagtggcttttccgtgctgagcaacagcttcagacccagccctcagacccacccactgctattcctccttggtaaaactgccttacttctcattccttccagaagttgtcaaaaggagcgtagcagtgagatcctactttagctgcaaatgagagtccctgcacttccaaaaccaggttctcctaactcctatcacgcactggtgccaggattcaccctgccttgttgcggtctgtcagtcatctcagccttggagcctctgccttcccctctcagaagcaaattacttatcagctcagagctgctacttctcttggggcagccaggccaggggctttaggttggttgtgaagacactgaattaaacaaacttccctgaatcctcaagctgagagaccacaactgcctgaggtgaaccaggcctcaagtgaatttggagtaattcatttctctcttttccaaaatgacaaaacggcccgtgcgcatggactagacacatggagttttctcaggttgcataacaggctggcctcccgggccaaaaaagacacgcttggtttcacatatacctctgttcaagcttctagaacatcctcctttctgatttatgtgggtttggcactgacttccagcacttgaactaaaaatgtctgatttccacctcccttaggcagcggatgagctgcagagtcaaatccattgcagaagctgtagttccaagaagaaaagaaaagccgccttatgtaaacaaagccttttaatttgttggttttattaggcagcccatgtactgactttcttcaaggaaactatgggatgctactatttttaaggggagcaccttaagggttattctagtaaatggatgttttttggagcctatgaagtcctgaagaagcccaggttttaggggaaaggtgagagaaaggaccatggtaagtgacagtgggggcagggaggaagggacagggaattccaataaaaactgggtgcttacactgagctggaggctttaacagaaagttccagacagacacacaattggataggagagagagagagagagagagagagagagagagagggagggagagagagagagagagcacgccttactagcatcacagggcaccaacagttcttacacgtgcctgattttgtaaaaatatatttaaggttaaaagacaaattacatgaatccggaagcaaacttggatccccgggtttggctgcaagcgcctttacccattcaaccctcgtccttacctatgattacgttctttttcttccccatcttgtattattgggaagtgaacccctgtgtcactttgttcctatttcagtagatatttctagaaaacacttctaaaacataattctgatactgcgtttcagctaaaataacagtttctcccaagtatccagggtgcagtccggattcagtttccagtttgtttgtttttccctaagtgttacagttttgcttgcggggtggtgagttccaaatagttgaaccaggctccaaacaaacattgtgtcaggttactaaatctcacagccctccactgctgtgcggcttccacatcttccatccctgcccccaccttctccccacccaccctctgcacccctctgtcccctctacccctctgccccttcagtttatttgttgaagacattgcgtcatcttccatattgattacatgcctgtaatgtgttataatgtgaattgaaatcaaaggattgaagagattctggtgttccttttgggtccagcattcttcccacgtgatggtgtatccatccatcagacagcatgtgagtcacctggctgttttcatttagtgatgctggcccccttgaggatcagtgcatagacccacttattcattaggggttggaaagcaggtgttacagtaggcattgtctccgaatggaaaacaaattgtgtcttttttcttctgaattgattatcctacccagaagtctatttgggttaggaaagacaagttatctcattgtgttttcccattttctacacaacagttggatcacaggcactatccaaggaataagaaccaggttttgatttggtaactctatggtctcagtgatatgaaggcatttactcttgttctggtccactgtggcttaggtgatggatgttcatggtccgatccagggagagaggaagcttgagtcagggtctcctctggatctgttgcacatacagctacagccccagtatcttttttgtttgtttgtttatttgtttttgttctttgggttttgttttgttttggtttggtttttggtttttcgagacagggtttctctgtgtagccctggctatcctggaactcactctgtagaccaagctggcctcgaactcagaaatccgcctgcctctgcctcccgagtgctgggatttaaaggcgtgcgtcttccatatcctccatccctgcccccaccttctccccatccaccctctgcacccctctgtcccctctacccctctgcccctttcagtttatttgttgaagacattgcatcatcttccatattgattacatgcccagctcagccccagtatcttaaagagtcagcttccttgcgatgccaggaaagttctcaaccttcctggacattttctgccccaggcctggactcacaaattcagttccttaataggaagtcatagttgcagactgcgactgagcactgaaggtgcgtgttgcttatgggttgggatttgtttctaggtcttttttggtgggcagaaatacatacttgaatgtatatgcttctatctgtacatataaatatcatatttgtatctttctatatgtgtatttgtgtcagtgtggactttgtaatgtgttttaattttaatataaacacatatgtgcatgcatgcatcttgcgctcactcaactggccaggaagaaccacgctgcaacaggatccttctgcacacgtttattcagtcctgtttcttcttgtttatatctctcccgaaccctgggcctctcactcttttatactctcagttcccatccacgcacagcaggccacgtcacctcaccaggtacgcagcttcagctaatcagggcagcaggggcatatctccatcaaaatggattcaccagtatcctggtgcacctgtgcagctctcaagatgtttgtggcttataggaggaagtcaggtgcaagtcatacgacttagctacagtccctggcacctttgggactgctgccacacccgctcctcacatatgcatatttattaacatataagttcttctggatacttcttatccatatttgtgctagtttcatgtatattgctatagtaaaatacctggacaaagagcaacccaaggaaaaagggtttattttagcttacaactccaggctgcaatctgtctccttggagaagacatagcaacaggaccccaagacagctagtcacattgtacactcagaagcaaaaagaaatgaatacatacacactccccttatatagtttaagactccctgactaagaaatggtgctacccacagtgagctgggtcctccaacgttagtcagctcagttaagacaatcccccatcgatatgactacaggtcaacccagtgtagacagtcgctctctgagactgctcacaggtgatctcatgttgtatcaagcccatactcgaagctaaccacaataccttttcctgctgtatttgggtcttaatgattctcttcagtcgtaaccgtgtatctcctttcagccatgtcaagactgcctttgtcgtacccaaggagctaaagggatctgcaaccctataggtggaacaacattatgaactaaccagtaccccggagctcttgactctagctgcatatgtatcaaaagatggcctagtcggccatcactggaaagagaggcccattggacacacaaactgtatatgccccagtacaggggaacgccagggccaaaaagaatgggaatgggtgggtagggaagtgggggggagggtatgggggacttttgggatagcattggaaatgtaattgaggaaaatatgtaataaaaaatattaaaaaaaaaaaaagaatcaaccaaaaaaaaaaaaaaaaaaaaagactgcctttgtctcaacaccacccggaacacatctcataatcactcttttcctcataatacattcaaacatcacagtaatacaccaatgtggcattgaaaagagagtgagcttgtgtttttctaaactttctttccccttactttattttagtcattctcaagctgtatcccagttgtatctaccatctgattaccgaattagagactggagagatggtagatccatcagagggtaggagtgcttgccacccgagcaccggtggaaaagcctagaatcccagtgctgcgggaggcagagacaggagacgctgaagtcttttctttttggtttttgtttgtttgattgatttttgttatcagcttagccctggattcagtgagaaaccctgtctcaaggaagtaaataaagtgacaggagaataggagatcctccaatgtcccccttggctgtcacaggcacttggcacacacatgtgcatgtatgtgcacacactaatacagtatacacacacacacatcccaagcatagaatcacttagaacatttccttttgacgtgactataccaacaatttgttgctatacacactcatttctttctttcctattatttttaagggtttgcattttaaatttaatgcgtattttatagtaatgtaaaatctggaatgctagaccgtttctctggccctgaaggcctcacctttcttctttccccttcctcaaagctcagctgtctttatatagcctgcccttacagttttgtttcaataagtttgtttgtgtgtgtgcacgcatcctcctctcagatgaatgggttcgtgtggttcgcatgggctagctgctgctttgtcttacggttgcctgggcttcgctgaggagggctgcagcagctccatggtcatggatgtttgcacttctcaggccgctgcaattacacacttcacacccagccaacagtgtgatcgacagcctgctctccgcaacctggccaatggcatggtggtcatagcagttggatcagcaaatagcagtctggatttcttactgcgacgaaacagtatgcttttaaccgatgccatcttggtcttaggggtggagccccagcagatatggattaagctgtgtgtgtgtgattcttggtgaaaacagagccagaacccattaatactatgcttctaaatactgactgtccactcgtctatggagcagagtccccatggctgataggatatgcaagcaggtgaatgctagctgtgcccggcatcaagaaaggtttattattattattattattattattattattgtctgacataatgaagggaaccgttgggctttgtagtcatagatcatataccctataaattattatccctccctcaagtagacttagtagaaatgagagagacgctagagagatgactaagaagtcaagagcacatattacttttgcagaggacccgagtttagttcccacatctggaggctcacagctgcctataattcctgctccagaggatctgatactctcttctgggcttcaccagcacctgcacacatgtgcacctacctacacacaggcacacacgcatacacataatttgtaagatataaatccaaggatattaatgtgaagaagaggaggaggaggaggaggtggtggcagaggagaggctttggtgtggcctggcagtcatgccactgtagacctgagcaccacgcttagaatttgagtccggatgagaagaaaggcggaggggaaggtcactgctgagttccaggtgtccttcctggaggctggctgggccactggcagggtacatgcccagaaggtgcgtttgaaactcactggactgtgaatttagtcagctgctctgtaccagcccagcccccatctgccctgccagacttggacctgaaggaaatgcctggttgaggtgtgatcttgggtatatacactacagctctttgcagcccctgtggcctggaattggacacagtttttcagggcgcagtccctggcattgagagattccagccctttaaccacacttccgtgtggggctaggctagcactcctctacatgctcttattcatgtagcaaaggtttggcttccttgtccctgatctttctgtaagccttgggggtttgtggtggttatcgttcacctctgctgtcttcgtcatggccgactcctctggctttgtttctttgggattgaaatttttgatctctttaagtgcaacatggggttaatggagtttcccttttctttctttaaaggtttgggggtttttttgttttttttatgttagtgcagaagagggcaccagattccctggagctgcatacacaggtggatttgagccaacttgggtgctaggaaccgaactcaggccttctggacgagcagcaagaatcctggtccgctgagctctctctcaagacccaagctccacttttcttaccctccactaaatgtattgaggatttttcttcatgctcttaagttctaagtaattaccacctgtgtctgaaatcactgtggataagttccgcgtgctcgtgagttttcagagacttcgggggttccagtttgtatgcttgagttcttatctcattgcactgtggtaactcacggtattggtctttgtttcacttgagggatgcagtgtgaggtcagtcgctgcgtaaagaggcaggcctacaaattgctgtgcaacccaaactggcctcaagttctggatcctcctgtctcagcctcccaaatgctagcatgacaggcatctgccactatgcctggtttaagatatcattttcggaggcgacttatgggaacacgagttataccctaagtcatgcgttagaagcttttgatcagttttcacctgtaaatttgtgttaaaaaaaaaaaaagaagaagaatcctctgctcacagggtgctatattcttaaagtagcagttagcttgggttggttagctgccctggttgccaggcagcaaagcagcaaggagttgagttaacatccaatcagcttcatcctgcctgggtccaagatgaaaatacctactgaggcctggttactttggtgtggtccataaaatgttcccaggccacgggaagacatggcagcttcttcattgatgcaaacaaggctggtttatagaagttaactattatatagtccctgctctattagcctataaaacccaggcccaggtccccttgatcatcctggctgtttaatgatggatatttctcctttaccattatctaagaatggaattgatgaatgtccttaagaagaacaggagtcctggcccatgtccctgtgcccagtatcaatccaggtccttgcttgcttgaccatgtgtgtgtcacatgtctcattacttcccagagctgtgcttctccaccactcatgtgggggcatactctaacttgcatgaggctcagctgagttatcctcaaaatgtatatattatctaatttattatttttgtgtgtacatgatgtagtagtgtccggtacatgccatggtgggtgtgtgaaggtcagaggacgacttgtgagagttgggtctctcctttaccacgagggttccagggatcaaactcgggtcatctggcttggcagtgagtgcctttacccactgagccatctcactgaccgtgagactcagattttaaaggtgtaggtaggtagaagatattctaccgtgaggaagtggaatttgagagtgacctcagtgacccttgaccctttccacctccagaaggggcttggacaggatgaggacaaagaaattatttggaggtgtctaaaattctcccttcttctccatcagtgtgaaagacaggcgccgcagccatgaccacccacgtcactttggaagatgccctgtccaacgtggacctgctggaggaactgcccctcccagaccagcagccatgtatcgagcccccgccatcctccatcatgtaccaggtaatagaaatagcggggtcagtggagagacctggattccagaggtcctgtaaaaggacctgccctgaagtacagggaggaggggtctgtgtcgagaaggtgaaaggtcaggagctgatggagtcctcgtgcactctaggatcccggtggaaggaatagattaactaacaaatgtgtgccagaaccgcttccctgccctagggagtgtttgttgatctgttctgaccccgaattcctgctggcctgttcctgctattgcaccacccggattatggcatccctgatctcatgaattaaatatcgcagcttaggagcctctagagtctgcctgggtaattacttttccttcatgtgcgtgacaagagctcacataagcccgcatggcaacccgaggctcagggaagtgggtcacagttgtttgctttggccctagatcagatcttttgataaaccaccatcccattacatacagctatgactctggcaggcccagtaaggagcgtatccatgcagctagaggccccttggcccaagccccttgtctgggtgtgtcaggctgaatgtcatgttgagaataaatgtgttagtttggaaattggggcaacattgggcctttttgctaagtcttaaatggtgaactatgaataaatataattaattttttttcatttcattcaataattacatatatcagtcacatacttggagattcatttcctaaatttgacttataagtagcttttaacagagatcacaatttcaactatataagcatattttaattttagtgatatgtagagagattttcattataaacaaaatggaaaagtgtaacatagaaatttcttatcccagcatacccttctcagtgttcatgaacattttgttaagtatatatgataaatagttattctttttactaaaatagaaattcattttacatgcatatatatatatacttctaattcatctttttcttaacatttattgtggaaccagctgtggtgactcacagctgtaatcccagcattcaggagactgaaggaagagggttgctgtgagtctggaccagcctgagctacagagaggacttctgtctcaaaaaaaaaaaaaatcacagggagaaaatcttctcctgtggccattactcgggcatcagtgcagtaaaaccaccttatggttaggcggctcgtggtcccttccagcctgttgtacacactgacatctatttcggcttttgctgggtgtttccatcttcccaggctgttgttgtaaaaagtgcatccgtggcctgactcgtgcattgacacctgtgcaccctcaggcacgcatgtctcagtgactgcataggcgccctgcacaccttgacttttagcagctgtttggacttgcttagttagctggaagtatggtttccttgtgcttagatagtttgtttgtttgtttgttttttaattcatgatgacatgcatataaagtcagtgcatttatcccatgaataaataggcaaagtctatcagtaaagccttattaactggaatctaaaagtgccaatttggaattaaatggttacttctgaggcttggttgcgtgaaaccagttaccgatgagaagcaggtactgcctgtctgcccttagctgaccagggggtaatatttaaagccaccgggcagtaggtttccacagaaagcttgcgggtttttgttggcagctgtttgttccctagacacccagccagccttgatgtgttttccaacaaccaaatgtccctcctgtcctctacctccacaggctaactttgacacgaacttcgaggacaggaatgcatttgtcacgggcattgcaaggtacattgagcaggcaacggtccactccagcatggtaagtctccatgacccacatgtgcagctgccccgcagaagcaggaggaaccatgggcagcttcccacaccagacctgtgcttagctcccccgtatgctctgccatagtcaggggacctttttccatcctgaaaaaaaagttcctcctaaaaatgacagtgatgtggctttgcaagatattatttattgacgcaaggaagccgctggcctaaatcattcataaatggaactagttgttttccattcctcttagggtctgaccctaaaagggcagaattctcttcttcccttttatcctcatagacatttgtagagttctagactcctcatctgtgggcccctgcaccatttccctggacctttctcactgtgcgggatgtgttctacaaacccaactcatttgttatgcattgtgtgcctgctgtgagctgattttagagttagtgtggggccagtctcagttctcggtgaatcaagtgcgaaagagacaaggcaaccaaacgccttttctatgcaggcatttcatggtcattgtctcatttaatgctcacacagaccctgtgaggtaggtcattggcagccccaatatctcagctggccaacattgaagcctctcaactgttaagaaattgactcgggggtctcactgctgaatggtggttagttctaaacttaggactctggtgacaaagcttggcctttgaaatatttattgcaggcaaatataaaactgtataaatgttccacattgtgataaaggtttgaaggtcagcttttcaaggggccttgagaaggccagaggaagctaggtgggggaagccactttttagtacagcctcgtaaggaggtaatgatagcatatgttgtacacactgctctttgaaatgtaggcagggcaatctgctgtgtgatagcatcagagcctcataataaccctggggcttgcaaagggatcattatacctattgtagagatgagaagactgaggtctggagaaattaataagcgggttgctcatggtcctacagctagtaagtccttgcatgaacctgggaacggtcctgacctctttctgtggttctctccatcccatggaaggttgaagcagtcagagatgagatggggagggggctaggtgaccatcagcatgagcaaagacagaattttcagactgcccaaaattggggtgtgtctatgtgtggtactgtacgtagcattgatggagatgaggtctagacatggagatcattttgccgtagcaaaataccatgagtaaacggcttaaacaatgggtgtttgctttccacggccctggaggatgcaattcctggaccagctgtcgacagggctgctttctcctgatgtttccctggctactcaggctcattcctcccaaactcctgggtgtcagatgtctctgtgtgttacccaagtttcctctctttataaggatgacagattgagtgagagtctgccctcatgatctcctctgagcttcagtcacctttcaaatgggcccacctagaaacagagtcacagtctcaagcctgtaacagagacgactttcattcatttcctcaaagtgcagaaaggaggctggagacgaagctcagctgtttgagtgcctgtctagaacacacaaagccctggcttgtatgaaccaaatctccagcaccaaataaactgggtatagtctggcaaatgcttgtaatctcaactgtggggaggtggaggcaggaggatcaaaagttcaggatcactttctcagctacataggaagcttgaggcaagcttggaatagagaccctatcactaaagggagccgaactcaggttcagccatgcttgatctgtaattactcttggaatgagctataaagaggaatgaatggaacagatacactggacgagagtctcaaaatgattgttactggaagcatgaaagggtgggggcgaggatttcagggaacagctgtaatgatcgtatacacgagagaaaccgaaggtcaactccagctgccataatgattctttggggtcggggaagcagaaccagactgaggtctctctgagataccaggtcacaggctcaggcaggcaaatctaaaggaccggctggctctaaacgtgattctgtttgttatctgctgctgctgtggcaaattgcataaactcactgcttagtaggtagattgcttacctggcattcacaaagcccgaagtttggcccctaacacccacatacaccaggcatagtgggaaatgttgtaaccctagcacctgagaagtagagacaggaagatcagaagttcaaggtcatccacagcgtcagaaatatatctctatctctctaaatatacacacacatatatgtatatatacaatatactatattatacatataatttacatatataaaagatggccaataactcaaggttcccaaggccacatccagagctctttccaccacgccatcttgacctctgtattctgggcttgttatgtaacaactatggctgaactgtctagagggcagagtgcacatcttggttctcagttctgtttctggcacagagcctgggatctaaagatgcttgctgcagcctttttttttttttaactgaatgaaattatgcgtgctgagggcactcggggtggggggtgggggctgagaatagccacgtgttccttacattactgccagttcctcttttagacacgtgtgcccaaactgaagagaaagcaggcagcccatgggttgctctcggttgtttccctcagggacagcatgttactgacttcttaattaagaatggaagctgttgctgttgagcagattcacaataagtagcaaactccaagttaaattggattctgcctttaaaatgtattataaagtgaatatgataaatagatttaaattttaaagttcatttttccctaaatatattttcaaggagagaaagcataatgctaattcttgtctcctaatattctttggagtatgctttccataactgaaaactgcttaaaatatatatgtctatatttttaatcatcttcacaatgttatacaactgtcaccaccatctaatgtcattgccccatacagacaccctagaatttttagcagtcaacccaggtcctctccccacgtgtttccatcaactacaatctgtccgtaaggctgtacctcttgtgggtattttgtccaaaggaatcggagaatatgtggcctttcttctggctttcactgaagttcttattagatcagctattctaagatataaggtgcccgtgacttacctgggaactttgctggaatataggttcgtattcaggggctcagacatccttatcagcaagcgcccaggtgatgctgctcttgcctgccatggcccacatcctgggtggtcccgatgagagcctggagaagtccatggccctagtgttttatgtccctgatgactgctttgccgtttcagaatgaaatgctggaggagggccacgactatgcagtcatgctgtacacctggcgcagctgctcccgggccatcccgcaggtgagaccatccttgcccttcagagaggcctcactgcttctgcagtgctcctccaacctgaacccaaaccagagggctgaggtccccaggtggcgggaagcaaatctgggcctctgacccaaagtgcttcccatagtgctgctgacaaggtccacgcccagggtcttaacagtttccctcccggcacatatagggcacagtattttatttcaaaggcagtcgatgtctcttgtcacccaggctgtcacaaaggatctaaagtagcaagcgtgacattgtctcacttcatctaaaccctgtgcttcagatggttctgggtctttttattggcatgaccatattttataaattcatatcgtttccacaaaaccgtattgttctcattttttacactgtcttggacttgttgaaaatacagatgattttattatcattgacatttttgcataattagtggattccgttgtaacaaagtcagcaaactatatgcacatcaagtaaacagaggagcccttctctgttccttttagccctcatatttaggggcaactattattaaattttttgtacttttcacattttctgagcctggttttgtttttcttaaacagttgattgtcttaatttttatttatttatttatttatttatttattctctctcacgggaaggtatatatgtatcgtggcatgcatgcgtcagtcagaggataatctaaagaaactggttttcccccattcagacagtcaggcttgaaagcaagtgccttttcccacagaactgtcatctgggcagccttggaattttgtttttctggagaaagagaccaaactggagctatggctcagtggtaaagcatagaggatgagtgttaaacatactcaaggtcttggtgcccgggggcctggattccttcccagcagtattagatagatagatagatagatggatagatggatagatggatagatagataggtaaaattaaatataatatgtgtcaaattatacttaactgttctgtggcctttttgcctcttaggtgtggtgataccttttcatagtcactacagagatccaccttagcccttctaatgtttgtaatggtatatgtgtacgaatatatatggttgtatcactttgtccattgaatgacccactggcagttatctagccattgataatcataaaacattatccttgtccagtgtatgtggtactcacgtgtaatctcagcacctagaaggaggaggcaggaggaactttagtttcaagccagcatgggctacataatgattcactaaagaaaaaaaatgcattggctcactctcacacccagccagcctattagcaggcgtggcacatgtgtgttcacagaacatatggcatgtgatactaaggtacatgctgactaaaagcaccagacagaggaaatgggtccctggatgactcagcttaggttacccatcattaacttggatatggctggggagactggttcatggtcgtgtgcatcgggataagaggagagcacatgcatggacatacgaatgtagccaactgtaaaggcgggcacaggccggcagagaaaggagcagggccccatgttgggatcagctggcccctttaccacagccagtctccagggagcacttgtggggcctgtcagtcttctacagctccctcttgctacagtgaccctaaccattttcacccacgacacgatgccacatgtgctccactggtgagccatgctcctgaggtggcagctgggagcccagatgatgaagccgcctttcgatttcacaggtgaagtgcaatgagcagcccaatcgggtcgagatctacgagaagacggtggaggtgctggagccagaggtcaccaagctcatgaagttcatgtactttcaggtgagtggggtgtgggcgggtccacagcagaaggctcaggtgagtggtgtgtgggcgggtccacagcagaaggctcacgaagtcccccacccttccacatctagactttggtgccatgtcattttgtttctgtccagctagtatttttgagagccacctacacccctgtgggtgagccaagccaacaggtgtccccgcctccacagaggatgtgtcctagtgagtttgtgtatgcttggagtgcagagtgacgaaaatacacactagtttttaggacaaggtaaaggcctgagtaaaatacaatttacaacagttgtaggttgcagagtatttacgagtagttgccgctttagggacaatggcatggagctacgaactgggtgacaagaggtcctgcaaagccccaaggcctggagggatcagtgtgttcaagaaatgaaggacagtgagctataaaacagtgaaagcaaggaagaggcccaaggggaggcttggggtgggaggacggggacccatgagatgggcactgtgagcctggagctttggattgggtgatgtgggttgacctgagcttttaggaaatctggccactaggtaggaaatgcttgggagatggaggtgggaagaggctgggatggaggagtgcagaggagcaggagaccagtcgggagctctggaagagtcatttttagaggaggaagaacagggagagggccaagggccttcacagtgagggagataacgtgtaaggacagaaggcgtgggcagccagtcacttcctggggactcactggcaactgtgagggtggtagagaacacctcaaagctggtctgtaccccacacacagcatatacaacccacacccttacatatgtcccatgcatagagcattgacactggccaggctctactgtgtctaggccagagctaggactatactggggaagtgcctcagcctgggtcaggagcaatgctaggtcaaaacccagcactgctgtttcctaactgtgtgtgactcattttatacacatgtgtacacacacatacacgtgcacattcacacatacacggatacaggcacccgcacacaccagtacagggaaatgaagcctgcctctcagggtggtggaaaagataaactcggtctctctataggagcacgggagggccctatgacagcttaaagtgtttcacagctgttgttactgtcatagatggcctgacttcccagagcctaaagtctcttttgggaagcagatccaagagagataaatgaagagcttcccctaaagaggtgcacatggaagaaaggaaggctgggatgattcactgccatgtgcctcgcactgtggccactggctaagcatagaaacagtagcagttaacagtgaaactccccagcaacatgaggctcactctaagcactcagcagccaccgcggccatccacattagttactctaatgccaaataaagcatcaccaggaatctcaaggaagggcaggcgtactaggctcacagtttaaaggtacagtccatcccagcggtataagcgtgttggcaggagcatgaggagtggtcaggttgtgcccaggtcaggaagtagggggaggtggaagctggtctcagctcactttctcctgttgactcagtctgggctccaaggacatggggtcatgccataccacatatacattcaggggaagccttccccgttcagttagacctttccagaaacatacttcctggacacacccagggtatgtttccatcaagttgaaagttgagagtaatcattacaccattgtgagcattgttggtggcgaacaattccatcatggcagaaagcctaactggactggctgtggcctgctggtccttgatgagacgagctggcagttgggcaaggtaggccttggagtggaagggagctcacatctgcacacagatcctcttttccacacgcttccctccctgtgttcattcctcttccaactcctcctcctcctcttccttcttctcctcctcctcttccttcttctcctcttcctctttctcttcttcttcctccccctctattgttcgatatccctccattactacttttgcttcttcttgcttttgaactactctcctcccccatgcccaacacacacacacacacacacacacacacacacacacacgtgacagattttttttgacatcgtatttaccaggtagagtgacagcccagcatgctctagtgtcttcacagagttgggtattcatcatgtaatctgttctagaatgttttcacccctccgaaaaaaatctcctgaaccatcacctcatactacccaacaccctctcccttcagccttaggcaaccactaaatgactttttatctccgtggatttcctgtttggacatttccctacaaatgaagttatacaggacatgatgtttcatgcctggcctcttgcagccggcagggtgtgtttgattgtcgtctgtactgtagcaggtgacagaacctaattggttggttggttggttggttggttggttggttgatttaatgacggaatgccatgtcactgtgcacacacatacaccgtatttcattcatccatttaccaggtgataggtgagggtgtttttcccttcgggtctgttagggataaaaactggacacctgcaagagcttctctatcattgcaggctctttgtttctcttgggttgtgagctggttagggtttggtcaactagacaggagctggagtcatatggagaaaattgattgactgatgagaattctctattgactgacctgtaggcaagtctgtgcaggcatttgcttgaatgattggtgtgggagaacccaattcactgtgggctgttccggggcatgtggtcctagattaaataagaagcagactgctcaatctgtggaccctccgtggtctctgcttcagttcctgcctctgtgttcttgtctgagttcctgtcccaacttccttcagggtagactgcaagctgtgaaatgtaagaaatcttttcttccccaagttgctttgagtcacagtgttgtttaatcacagcagtagacagcaaacgaggaaaagcaggtccctgtgagtggagtgctgggtcacttagtgaatgcaccctaggtgtgcaagtttcctgactgcccctgcagtctgctgtcagctccgcattattattgaggccacaatacaggctatactacacacacatgcgccctcatgagagcctctaagagccacagcccctacagtattgacttggctcttctgtatgcttactccagctgaggccagcctcatgcttccttaggcctcccacagcttcagggcctttgcaggatggctcatgcttccttccttcccttgtcccggtccttctccttctctttcaaattatttccctacaaggtcatttcttggtgacttcagtctttctccctagaggaacagttttgtgagcccttcccaacctccatcccttcttcatttcctgccatatcaagtatgaaattctgctgcaaagaatttattttgttttctatgaatcaattggcatatatgatccttaggacagttttggttttttccttcttgttttgatttctgcttgacctcagcccttacagtggtttcgtggttatatagtatagtatagtatagtatagtatagtatagtagtgtatatagagtatagtagtatatatagtatataggatggatagatagatagatagatagatagatagatagatagatagatagtaggtgctcactaatcagttgcttattgaatgcaccactgtctctcctggcatttcacacactggggccatggcgctttttagcaaatgtgttttagactaattcataaagtaaactcacttggaacaggttctagcacgctgtcacgattagctttagaaacggggacatctcagagaaagactgcctggcacagcagatgagtccttacactgttcctctgtctccagcgcaaggccatcgagcgcttctgtagcgaggtgaagcggctgtgtcacgctgagcgcaggaaggactttgtctctgaggcctacctgctgacgctgggcaagttcatcaacatgttcgcggtcttggacgagctaaagaacatgaagtgcagtgtcaagaatgaccactctgcctacaagaggtcagaagccctccctgctccctggactcttttcactgtcttattccctagtaatagaatagccttcctcaaaccaagctgttgtgacagggtgatctgaggaaggcatttccgagctggggcttcagaagagttattgctggccaggcttgatgtcccaagatggcatctggtcctcacctcccccatctaggggggcagagcaatttctgccatacctacctcatggcaggaagattatcataaggcattgcatggtcgttttctgtgagaaacagaagccagtgtttatgtcccagatctgcaaagtcaggcatacattaccccagttaccccagtggccgcatttggctggatctcttaccagctctccccccggacctgcctctccatggtctcctttctcagataggcccctgcaatggcttcctgccagcccatagcaaaaccccagctttccagaaaaaagttcctccttcctcatgcattcagaaagtcccagccaagattgctatcaatccagcttgctaatccctctgtcagacactgagtcaggtggaggtgatctgagtggatgacagaattaggggaccatgtcatcgttgaaaaaaagggctggagttgggaggtggttgttcatctccaggagccaggatgtagccacccaatgacagggagcactacaaaatatcagctccccagggagttgggtaaggctcagatgagcacctatgtctgtctatacctcctggaagggttgctcatatgactggcacactattcctatcccgccatacttcccttggatttcaagtcagctacagaaaggaagagggcagatgttaaacctgggttgcccaatagttagagcccatctcaaggtcaactcaagatatcacagatggccaccagcacagcatccttccccatatacggcccgccacttccatcaggaccacagccagcatctgtgtcctaaaccaggcaggcgtgttgttcccgttctcacgagttattgtgacgtgagctgtgtcaggctgggttaagttgggacacagttgagcccagcctgtgttctccgtttccctccctccatctgtcatcccatgttgccgtgcaatgctgtgcgtaagaatgttgagggaaagacacaaatcttttctactcggaaagctacggcaggagaatcatcggctaggcctagcagcacaggactgaaatccttggtagctttcatcagttcaagtgagttcgaggccagcctaataaacttagcagaaaccctatctcaaaaatgaaaaatagtaacaaggttgggaacatagctcagagatcaatatgcacagcatgaacaataccctgggtccagtccccagtgctacaaaccaacccaaaaataggatgctgagattttcctgtaatgaacagagcacatgaaaagaaaaaatgaagcttcctgcctgtgattcagttcttctgggctcactgtgcagttcccctggagctcaaggacactgcccccactccctgtctcatcatccctccctggtttccgttaaataccctgagataccagtgggctttttttgtttgtggtttcatgccctttaatacccagcagctgtcaggagggcgtaaatggcctgagagaaaggactgccaaacacattttccattgaccttgggaacacctgcagtgttcagagccagtgacattagcacggtgtctcttgttggctgaggcgtgggaacagattccccggcaccctgttattgcttccttctctgtgtttcagagcagcacagttcctaaggaagatggcggacccccagtccatccaggaatctcagaacctgtccatgttcctggccaatcacaacaggatcacccaggtgagaacaaggcccatgtgggtcctgtctggcatcccacggaagcaatcctagggccctgaggctcagaggactccaaggaacgagacataagctcagtccacatttgtctccactgcccttcatgggagtaaagttacacccagtgacctccccccccaaccccttttagttctctggaagcttcccacacagggctgtgggtcccacatcagtttctaggttgagaacaagcctgaccataggtccattatcagacttcgggcaaagtcagagattcagtttactcatccataaagtgggcatattattttgagactattatgagaatgtatctcataagactagcttggaaagttaatgaagtggagacaaaaagccccccagaatgtgaccaagagcctgggaagggcacagttacctccaccagtttgccaggttgtatccactcggcctctcctcttgcatttgtggctgtcatagctggacctatctctctgacagttcagtaacaacaagagtgtctgcaggacccaggccaacacaagagggattgtgatgctgctcccaagacatcccaaaggcctggccgtagtagggccttctttgtcactagagaaggatatggagtctcaggcccctgctctctgtagagagttcccccagtgctatccaagagtatcctgcaggcctcgtttgcctccatggggagaaagggacagagagaaaccaaccttccgtaactgttgatgctcctggatcctaccaggaaagagatacctacctattgtcactccctccctgggtgggtcttctccctgcctttgtctgaagaaacctcatagagacccttgaaacaattactgcagggcctatctgtaaagctgggctgcccaagagtacataactcagcccttagaactggctgtctgccattaggctcctgtgtgagaggtgaacagggacaaccagctaatgcctagcatccaaggggagtcaggtgtcagcccctgctggcaggaacgctccctcctcctgggacctcagtaggtagggatcaaagtgctcacttattcagcccagctctgggccttctgggtggtgcaggaagatgtttgctccgcctgaccagtgggtggcgctgttgtttagtgtcttcaccagcaactggaagtgatcccgggctatgaggagctgctggcagacattgtcaacatctgtgttgattactatgagaataagatgtacctgacgcccagtgaaaagcacatgttgctcaaggtaagacttcccctcctgacacagcttcctgccaggcgtgcgtgcgtgcgtgagtgtataggtgtgtgcatacgagtgtgggtgtctttaaaggccagaagtgtcagataacctagacctagagttatgggcgattgtgagctgcccagcatgggtgctgggaaccaaatctgagtcctctacaagtgcagtaactgctcttaaccaccgagacatcgctccagccaaatcttttttttctgacgtgctgtctctcactgggatccagggctcacccattaggcctggagagccgaccagcaagctcagagattggcttgcctctccctctccatcataggggttacacacgtgctccaccatgccaggttttacatgggtgctagagaatgaactccggtcttagacttgtgcctcaagcacacgtgactgactgggccattagcccacaatgttggagactggacgtgatattgggcttctttgagggcatgccatggtggaactatttcgtgtccccaaatagaaacaccagtattcagtcatggggcctctaaagagctaatccaattctgttccaagaggcctatctttaaataactaggaggttacatttcaacctctttttatttattaatttatgcatttctttttttgagacattctctctgtagcccaggctggccttggattctcagtaccccatcctcagcctcccaaacgtttgggttacaagtgtaggctaccacatccatcaggtttcaccctcttaaagtcatggccctgtgactttggggcttaaatgcttgccagagttcagggaaacgaaacatattgaaaccatagcccagggcagcatggcttttgtgactcgctcactccagcttccttgggctgtcagaaaccagcaaaggctgccccagctttaaccgcctttcctccctagtccaaacatgggtggtacagcagttatgcccaagtctcatgctccgcaggctgccttacgatactccatctcaaagcaggtttagatgacttcaggttctgggccttcctctcttatcagccttgaatgtctgcatagacctgctcctccccacccccacacaccaccatcaccaacacacacacacacacacacacacacacacacacacacacacacacgnnnnnnnnnnnnnnnnnnnnnnnnnnnnnnnnnnnnnnnnnnnnnnnnnnnnnnnnnnnntccctgcggctgctcttttacctaaagtgactagcaggtgggctgacagtatcagggagtatcagcatcttcgggtggagatctgctctttaacaatggccttcacattgttgcttttctggagaactttgtggtcacttatcattattccagtgcctgcctctcaacacctctgggaaacaacaaggtcctttctctctcggaggatctataaatccacacttggatggagatcctaggctaagccctttgcagatcgtctcaacaacatgtgtgtgtgtgtctgtggttccagcaagctctctagccagcctctctatgtctctgattcctcatctttagaatcgaggccacccttcttaaaccctaaccacagccgctgccccagagtaactgctgtaataatatactaaattcctcgttgaaattaggcacgtgttttctgttttaatttggaaatgtgtgtgattttgaaatagcacgtgtgtctctacaagatgccagtgaatttgtgcacgctcacatgcgtgtgcacgcatgcatcacagcccccatgtttgttagctgctctggaggtgtgatgaggatgttacacgtggcccctttctcattctaggtgatgggctttggtctctatctgatggacggaaatgtcagtaacatttacaaactggatgccaagaagagaatcaaccttagcaaaattgataagttttttaaggttagtaattggtgctggggccaagcaggggcacagaattactggggcctagatccctggtggaaggaaaggatggcattggccagaaagctgtggagatggtcacaggcatctaaagattctcagggaaaaggaagataaagcgcaggccccagctgctctcactaaagcaaggttactgcccacatgtgagtgatgctcaacctcaggactcgctgggattccacgggaggccttgtaagtcttcttgcatgtccctttcccctttcctaaaatctttcctctaaaggcatagttgcatcctagaagtcaaaacctatgtgaattttcattacactctacagctcatggagacagaagaaaagagtagaatttttaaaaagatttcacttttatctgatgtataggggtgttgtgtctggggatgtgtctgcaccatgtatgcagtgcccacagagaccagaagagggcattggataccctggaattgtagttgcaggtggttgtgagcactatgtgggtacctagcatcaaaccctgcctcactgaaagagcagcgagtacttttaactgctgagcctcttctccagccctgaaacactggattctaagtggcttcatgtttgccctttaggcacgatagctcacagcattctgtttaagcgtaccctctcaagcacctctgagggctgaccattgggccccaaaactctctaagagaaactcgcaggtaaatgttaagcctttggtgtttgaacaaagagatgtccgtctggaactgaaccctcgttctgacatggctgtaatgttggatcctgcagatgtgagatctgccctaggggatagtgtgtcgtgacagatactaagtgaggcttaaggagatgtgtgagtcacagaggtcttgtggcttgatttcttagcttttctacagatctgcccagggtgaaaacaggccccatgttgggaaactgctatgtctgccttcaggcaggaggaaggaaggtagaaccaggcctggctccactgcctcctagtgcctttgagaaagtcatgaactagacctcccggagctgagggttctgatcctggcttttgctctatctggtctgatttcctgaagagactaagttccctatgtgtcaatctctgtgtgagtaccgagggagggaggcaggactgactcagtctagttatatatggattgagaccatggatggttgggtgactaggttttatagtacttagaattaagcccagggtctcacccatgagaattaaggcctctatcattaggtatatcccaactttttttttttaactttattttaaggcagagtctcactataatgcgcatgatgcctatgaacataagatcctcttgccttcgtgtcatgaatatctgggagtgcaggcctatgcagccaggctttgctgagatagtatttgtaaagctgctggttctgtacccactgcaggagagacagatgtagggagacagtagcctcccttcctcgtgtcctcggctgtctgcactttaggtatcaggtggacagtctcagatgccaccgcaggcaatagctcactgccattggctcctagtcatgtttggagcagcagaaatcttctgagctggtgaaaggaccctgtatgaggaagctagccatctggtcctttgtttcatctagtcacctatgtgaccctggatcagtcactttgctctctggtgtcaattgcttgaagtacacagttggtcggaggcagaggaaggggcctgtgtgctggttgggattcctctgggcgccaggaccccatggctaccccattaggaatccttcaagctaccggccccaggtgcacactgaagccttccaccccgacggtacagcagccccggcctgcgcgagccatctcacatgctctgtttgcttcctttgcagcagctgcaggtggtaccccttttcggcgacatgcagatagagctggccagatacattaagaccagtgctcactatgaagagaacaagtccaagtgagtgcctgccgtaatgtctcttggctnnnnnnnnnnnnnnnnnnnnnnnnnnnnnnnnnnnnnnnnnnnnnnnnnnnnnnnnnnnnnnnnnnnnnnnnnnnnnnnnnnnnnnnnnnnnnnnnnnnnnnnnnnnnnnnnnnnnnnnnnnnnnnnnnnnnnnnnnnnnnnnnnnnnnnnnnnnnnnnnnnnnnnnnnnnnnnnnnnnnnnnnnnnnnnnnnnnnnnnnnnnnnnnnnnnnnnnnnnnnnnnnnnnnnnnnnnnnnnnnnnnnnnnnnnnnnnnnnnnnnnnnnnnnnnnnnnnnnnnnnnnnnnnnnnnnnnnnnnnnnnnnnnnnnnnnnnnnnnnnnnnnnnnnnnnnnnnnnnnnnnnnnnnnnnnnnnnnnnnnnnnnnnnnnnnnnnnnnnnnnnnnnnnnnnnnnnnnnnnnnnnnnnnnnnnnnnnnnnnnnnnnnnnnnnnnnctgctcaggttttgtgactatgcagtaagtacgtggttaacggtgtggcttggatggttccagctgtgtcctgggttggtaacttgcccctatgtcatctaaataaaccatggttctagggaatctatgttaaggcctgggggaaagttagtggctctcaggggggtgttgggggtggggcgttttttccacggctccagcctttgtccctctgatctcagattcagatttccatctgtagtacctacaactaagagacaactaatggcctattcatgtgattggtccttgccactctctggccagtgtctttcttagtttcacagcgctgacaagtaaacccgaggtctttcccatgctgggcaagtacacttctactgaactatagcctctttttactttttatttggggtcattactcattaagtaaactcagtctgtagcctaggctaaccttgactttgtgatcctcttgctgcagcctgtcttaatagctgggattaaaaagatacccgcagagcctgggtaaggcacaaacacctatactcccagcagttggaagctggaggtaggaggatccggagctcaaggccagcctcagctatattagaaccctgtccccccaaaaactaagatacctgcaaaggggtccttgacctataaccgatatatatctggagccccagagatgaatccttgggaaaattcatgtctggcagtcttagagaaagaggctgggtgggcagatatcagcttctcagacagagtcagaagtttgagcaacagtgtccctctataaacagctcaaagtgaaaagctagaggcgtctaagccagaggaaggttcattcctcannnnnnnnnnnnnnnnnnnnnnnnnnnnnnnnnnnnnnnnnnnnnnnnnnnnnnnnnnnnnnnnnnnnnnnnnnnnnnnnnnnnnnnnnnnnnnnnnnnnnnnnnnnnnnnnnnnnnnnnnnnnnnnnnnnnnnnnnnnnnnnnnnnnnnnnnnnnnnnnnnnnnnnnnnnnnnnnnnnnnnnnnnnnnnnnnnnnnnnnnnnnnnnnnnnnnnnnnnnnnnnnnnnnnnnnnnnnnnnnnnnnnnnnnnnnnnnnnnnnnnnnnnnnnnnnnnnnnnnnnnnnnnnnnnnnnnnnnnnnnnnnnnnnnnnnnnnnnnnnnnnnnnnnnnnnnnnnnnnnnnnnnnnnnnnnnnnnnnnnnnnnnnnnnnnnnnnnnnnnnnnnnnnnnnnnnnnnnnnnnnnnnnnnnnnnnnnnnnnnnnnnnnnnnnnnnnnnnnnnnnnnnnnnnnnnnnnnnnnnnnnnnnnnnnnnnnnnnnnnnnnnnnnnnnnnnnnnnnnnnnnnnnnnnnnnnnnnnnnnnnnnnnnnnnnnnnnnnnnnnnnnnnnnnnnnnnnnnnnnnnnnnnnnnnnnnnnnnnnaggaaggaaggaaggaaggaaggaagtaaggaaggaaggaaggaaggaaggaaggaaggagtggtggggaagagcttccgaccacacctctcagaatgatagaaagccacccaccatgggtacatccatgctaccaggtccttgttgggaaagacagagaggttgcctcccttggctttgctcgactgtgattctgtccttttgtggccacagagaggctgtgatcttggctctcgccttctcacttacctggtgagtatcgtgcactggtgtccagaaacacctatggtaaaaatctggagaaggcagagacaggactcttctttctagccatggtgcctacagagcaggctctggggtgtaggcagccactttaccgtttggtttcacccagaggagccagctatgttgtctgaggaccaggagcagcctgtcccacgaaggtgcctggagccatgacccatgcacaaatcctgtggtttttctcctccccaggtggacatgcactcagagcagcatcagcccccagtacaacatctgtgagcagatggttcagatccgggatgatcacatccgcttcatctctgagctggctcgctacagcaacagcgaggtgagttctgtggctggtccagggtccgcagctgtacagagaggctgggcaagagagggcatcatggagtagggagaacgcgctgccagaggtaagaatgtgccttgttggaagtgtgggctcagagtcagactaggatggatgctcagtatctctgtgcctcaattctttcacctgcaaaaagggccataatgctagtaatgccggaggagggtgggcgtgggcagggagtcagtgatggagagagaaggtattgttaacagatgcagaggtaatcatataggaaagagagtttccttccggctttcttcttgggggtatttgtacttttagtaaatagccactatttaagaaaaatatgggtctaaaatagctaggtaggaggaactacttttaatgttctatcacacagtagagggcctgtgtttgatgataattatgatcctccataggaagaatgccatcaggggtgataggtacaccagggagcccgtctaatcatcacatgttgtaaacatgtattgcatgtctacactgtgtcccatagagatctgcagttgctgtgccaatcaaaaataattcagacgtttttttaaatggaggtaatgacagtgtttacattgaaaggttcactgagataattaatggggtgcctggcatatgtgtcgtgtctggaataaatgtcactaagtattcatcagctgcacaggactcatcccatgtcaccttcaatggctagagacagcgttctgaatactgctcctaacactgtttaaacacgcatagctgtgtcatatgatctttgcaaaaataatgtaaatggaatccgagaagggtaaaaaggccataaagggctgtggagatggctcagtgggtaaacattgccatgcaagcgtgaggacaatggagagaggatctccagagctaacacaaggccagtggtagcacgcgtctgcgacctcagagctcctacagcaacatagggtgctgtggaccagacagcccagtgaactatgttgctgcagtgtcaagcaacaaagagagcctgtaccacaggaaacagagtgtgaaaaccgacaccgcagtggtccgcatgtgcaagcaccataaagatctctcccaatactaaagattgggctttgagcttttgcttttttttaatagaccatatcaattatataatattaattcatagccttaagggaaaaattagataaacaaaaccaatcccatagaatcctaccatcccagaactaactttgattatcatgtgtctttgtgggcaccttcccagagatgcctttctcacagagacgtaatatgcgctgtttaatctgacataggtccctaatctgagcgtccatagtgtggaagaggccacgtttgctcannnnnnnnnnnnnnnnnnnnatttattagttcacaattccaggttagtagtctatcactttgaggcaatcacaaggtaagagcttgaggcggctgctcatgtcaggtccacagttaggcatggagagaaatgagtgcatgccctcttgcttctgctcagttcaatttcccactcaaacacaattcaggacctcctgtttagggaatggtgccacccactgtagacaggatcttctcacatccagttaacttacccatggacatacctacaggctgactcgatgtagacaatctctcattgagacatcaattctacattgtaccaagttggcaacgagagctaaacatcacaccataaatagttggtttcctgtgtatagggggtaatgacaaaatcatacactacagatacgacatttttttcaaaatatttctcatctaacattgcatgagttcattggctatagactacctcagacacctagggccaaaggaacacctttctatgtgcatatgtggtgcagttttttatgagtttcagtagtagcattgaacaaaacactataaactctgattttaaaaagtaatgagcctttgcccatagagaaaaatcaaaattcccatgagcctcttgccacagtgtttttatcggcagagagtgttgtttgatctccatttctgtctaaagataggtaattttggatgaatcattaagattaaatgagggttgcagccttgtgacttctgtttgaaggaagtgttctaaacatgtctgccatggctttcctgcagatagagcactacatggcacagtggttctcaactgtgggtcacaacccgtttgggatcaaatgatttttttcatggggtcgcctaagaccatcaggaaacatagatatttacatcacaattcatatcagtattaaaattacagttatagagtagcaacaaaaataattttatagttggtggtcaccacaacatgaggaactgtattaaggttgggaaccactggcataacacatcagccctgtttgaaactgttaattaaaagcacaaaactgtgggcatcttgacactgcttaagctgcagggaagatgtttgcttgcaacccaaaaagggagagggctctgctcagctgggagcatgcaggtgtctgctagggatggagatgttgctgcaagcattaatttgggaaattacaggaagtgatgatgcaaatttgcaaagatactgtccatcattgatgacaactttcatatattcatgtacacatacatacatatccatgtacatataccgtgtggctacatacatgtatatgatgtggaatgttacacatacagacatttgtgccagatctttttaattggggcattgtagtagtaggtgagctgtgacaccattttggtggtctgcgattagcactgtatgcggagttgactatgaagccaggattcctgtgacgtcacagtgctgggcgaaggtcattgcatgcatacatattcatgtttcatttccctgcaaagatgctatcctggcagttactggtgcgcacttcctactgtgaatacggtggagatagggttaaaccctttgctgaagggctaagtggggatctctatgacacttcctgtggccttcatcatgacacctatcaaagccgagtttacctagcaagggagcataacaaacacacagttcttgcagggaatcacaggaggactgcttatgagcctcaggcacatggcccatgaggtgagtgtgaagttctgtgtcccccaggtggtgacaggctcagggctggacagccagaagtcggatgaagagtaccgggagctttttgacctggccctgcgaggcctgcagcttctatccaagtggagtgcccatgtcatggaggtggtaagtgtcctgaggtgccaggcctcacactggcctgactcacaaggcatccatgggcatctgcctctagttggcactctgtctttcaacataaaaatccatataccatacttacccaactgaaacctgcatttaatatatttacagaagtatatgaccttaaattaatagtttcatcacttaaacaacaaaaatatcacatgtgggacccagcaccaacattaattggctcacaacctcttgtaaccccagcacagtagatagtttgcgtctggcttctgtgacacccacactcacgtgcacttccccacagacatatagaaacataaataatattaaaagtaaatctcataaatgaacccacatctggggctggagagatgactcagccgttaaggctaggctcacaaccaaaagcccacatctgtcaccctgcccgtttagccttcggtattctgactctatgcatcccagttttagagattcaccatatatagactcatagagctcgtgtggtgttttgtgtctggagtttcttacattgtgttttcagggtccagccccatcctgcacgagtcagtatgtttaccccacatcccattagtgctccctggtgttgctagactgctttgtttaccactcctcagttgatgggtgttggctgtttcttctccctccagtactcttggaagctggttcaccccacagacaagttctgcaacaaggactgcccgggcaccgcggaagagtacgagagagccacgcgctacaattataccagcgaggagaagtttgcctttgtggaggtgggtgtgggaataccttgctctccccacctactcccggacggctgctccccgtggtttctggagttattttgatccccaaactgtattatctttttaacttgctgccctttatctaatttttttttaccaatctaggttgttctctgtcaaaagctactaggaaatgatgagggatcgagctaatttgaaatgcccctaaggaagaacagctgctagttcctggggtagtaagagccgcttttagtaggagtgtggccattggttgcttccccgtgctccagtggatgacctcatggccatgggcagcgctgactgtactcactgagttaaaacatgataaatagatgaatacatgaatgtttatgaaaggaggatatgaaaccggaggggaagtccctgagggaggacggggggggggggggggggtaagcatagatatgatcaagacataatgtgtccgaatcagagtttctattgctgcgacgaaataccatgaccaaaaagcaagtagggaagaaatgggtttatttggcttatacttccatattgcttttctttattggaggaagtcaggacaggaactcaaaacagggcagaatcctggagacaagagctggtacagaagccatggtgggtgccgcttactggcttgctgcccctggcttgctcagcctgtttccttgtagagagagcccaggtccaccagctcggggatggccccacccacaatggactgggccctcccaaatcagtctctgagaaaagacctacagctggatctcagggaggcatttcctcaactgaggctccttcctctctgatgactctagcttgtgtcaagttgacacaaaccagccagtagtacataatgtatacatgtatgacattttctaagaataaattttaaaaatatatatggtgagggctggcaaggtggctcagtgggtgagagcactggctacacagccttggggacctgagttcagatcccagcaccagtcacagaacagatcaggatcctacccttaaccctggtgctgtggggatggacatagaagaatagctgggccacacactcggttctctttggctttgtttgttctgtggttggttttgttgacataggatctcattaagttgctcttgaactcacttgctaaccaaggcaggtcttgggactatagacttgttctgtcaagcctggctgaattttagctttctaccggagtactcacacaatacatgttccttcaatggccacaaaaagggggatttcacactctccaagtctccctgagagtctcgctgttttgtgctctcacaggtcttggcagtggccatcttgagaatgatcttggtcattctgatggccatatgggtgactatcattaaccctggcattctcatttcccagagtctaatgttaccaagtattttttcatgtacttattggccattcttctatcagtttgtataagctatttttgaagtctttgctcgtttttaaaggttgttttctgccttctcattattgaactgtgagaattctttccaaaatgtcaccacaaaaccctcaccatgtatgtgatggaaacagcttctcaacttcatgattttgcctcttttttccccttgacaatgccttttgaggaaagctcattttatattttgccagagtcgaatttattcatcttattattttacagtatgccaatgaggactctaagaaatccttacatggtctcaagtcgcaaagacttttccctctggtcttccagccttgcccactctgtatttggaattattctgagcccttctttattggtctcagtgttttaatgatggggttgtctgtgtgagacactgtgcatgtgagtgtcttaggaagccagagacatcggagagccttgagctggagtggtaagggcaatggtaagctgcccaacatgggtgtttggaattgaacttgggtctgtaaaagcagttagtgctcttaactgctgcaccaactccctactccctgtctggatgctttttaatttcacctctggccagaagcccagctctttgaatgcctctcttattagttctcttcacaataccttactgcagccaaacagtctactctttggcttctggggatgtcctcaccatctgacaaggtttcttaccctaattgctagaggtgtgcttgtttgtttgtttgtttgtttgttctgtttctttaatgcttttcagaaagaaacaagcctcacgtgtaagcatgccccccattccgccatttcttcctgttcaacagaaggcttccgtttctcatggacatgcatagcagggctttcttggccattgggccttctgtgcttcgggctggtgcatgcagtcagacacgtcactgtgtgggtgtgagagtgtggccactgtgtgaaggccgattcatcatgtccccaattcgtcacccatgtcccctctgtcctcacaagtcagggtgtcaccactcgagaccgactcaggaggcaagtttactgctggtaaagatggactagagagactgtgtctcctacctgagcccatcattcctatccccactgcgccgagtcagcatccccaccagccagtctcaagtggtaacacgacacacgctcccctcccctcctctgcacaggtagaaacagaggtgtcctcgggacagcttcaggagaagattccagtgtagagctcagatagctgtcagccacatgggggttgaaacagtgatctggtttggtctagttcatgtcagagagatctccaaaaggcacaggagtaccacccagaatgtggttcaaggaccagctgtgatttgtcatccatcagcagtgagattagagcatgggtcagggtgacagtgaccaacttcgtgaagcacagccatgcttttgtggcaggatactagtatcattttctaagtattacttatttctggttgacacgtggtggctataaatatacctgaggtccactgtgacatgtcagtgctttggatgcagtctgtaaaggtcagatcagctcatctgcacatctgtcactttgaattataattatgagcattcaaaaccctctctgagtgactgtttgaaatacgcagctacgtgtgtagtgcagcttccccaccggggcatagcacaggaaattgtctctcctacccaactgcacatgaactaccccgtctccatactgccactgtatccttccgggttttctctctcgctagcccgtgtgtgtgtgtgtgtgtgtgtgtgtgtgtgtgtatgtgtatggtgtatgcatgtatgtggggtatatgtgtatggtgtgtgtgtgtgtgtgtgtgtgtgtgtgtgtgtgtgtgtgtgtatgtgtatggtgtatgtgtgtatgtggagtatatgtgtatgatgtgtgatacatttatgtgcctgtggaggccagagctcaattccatgtgtcattcctcaggagctgtccaccttaggtatttttctccagttaggtgaggctacctgcattaagccccaagaatctaacttgtactgaattatgagcacagcaccgtactcagctttttacctgtgggttcgggagtttgaacttggttctcatacttgtagcacaaacacctcaccaaccgagccatctctccctccactccattttgggttttttggtttttttgtttgtttgtttttttgttttttggtttttttttaattctaagctttgtggtataatgcacctgatgtgatgtggtgaatgtcctccagttctgtccatgttgctgcacatggcatatttcttctttctggctgcatagccttgcattgtgtgcatctaccatggtttgtctctccactcactgtcaaggtccaccccagtagattctgtcctggctgttgtggctggtggtccagttatggttgggttcatttcttcaacctagtggtttcattgtcctcagtcacacccagaagtaagatggctgaatcatgtgatacctgtatttctagcatctcaggaaacaccgtcctgtttccatacggcagaagtaattggcatgaccacccacagtgcactggagttcccctttagcatgactacttaatcacgctaaagtagagctctgctctgtgtgcttttggtaccatttcttacctggcagatttagaggccctggcctcattctctggggtatctatctccagtaccctctctgggcaacatggcaaagcgtggtgagcagatggcttgctaagtgacagctaggctaacccttgccctgtgcccaccaggtgattgccatgatcaagggtttgcaggtgctcatgggaaggatggagagtgtcttcaaccaggccatccgcaacactatctacgcagccctgcaggatttcgcccaggtgacgctgcgggagccgttgcggcaagcagttcgaaagaaaaagaatgtccttatcaggtgggtccttggatggcctcactcgggaccctgcaggactgatgatggggcttgaaggagattgtaaaatggggtcgtggtatcctcagtcgttgagtgatggaatgagataatccatgtgtagacttcagcacacatcgtgtgtagcgagtaggctatgaatattaactggtactaaaatggagttagtgatgctaatgagatgttgctctagctcctcctgttctccctactcccaggtcctgttgtcttaccccctgcatagctcaaagctgagttcttaagtaatgaatggtcaccaaagccatggcagccacttgttaaaagcaccttaacactgttacagcatccgtgagtgagtgggtccaggaatgaatgagcatcccagacactcagcgctgtatgtaatgcaggaggtgctgacaccttgttagggctggaaacagccttgtagacacctaagtggaacctccgtttttccttccccagcgttctgcaagcaattcgaaagaccatctgtgactgggagggaggccgagagccccccaatgacccatgcttaagaggggagaaggaccccaaaggtggctttgacatcaaggtgccccgccgtgctgtgggtccatccagcacacaggtgagcggtttcccggcagcctggctcctctgactccaggccaatcggaccagcaagggcaacatgcttagccgtggggttagtgggatccttgtgaggaagggcggggcttagcagctgctctgggcttttcctgaagtcttgttttgatagaaaaagggaagaccactggcctaagattcaggagacctgggttctagtcctagacacctgtgtgaccttgggcatgttacacaatctctctgtgcctcagttgtctggtctgaccggtgctggtagcaccatatccacctacccagcgatctcctaggcctgtaaagttcgcatattacagtgcaggagagatctgacatggagtccacacacatcactctgtgtgttgtaagaacccagcccctggtaggaaacttggaagttctgccccgacctgctcaatgttccggggcaagtaccttaacccctctcggctctgattatcatcggagaacaaaaactttggatgagatttttaccaacacttaacttttctaatatttccatccattttccaaagacagcccacaggcttggcaagcctcctccccttagagaaaggctggttgtcagaaacactccgggttcccagccagagcttctgcagtaagatgctgtctgtgtttatccagagcagtcttaaaattacacagggtgggtagggtgagggaagaagggtgaaccacgaaattaaattctcactgctggtttaggaaaaggtatttcctgatctactttctgtcaaatttgaaaagagatgagtttgactgtaacccctgggggtcttgcaggctccagaagccccagtctggaagctcctccttacagggcctttcaagcctgtctctgctctgaagtaggccatctgaggccctttcttacccacccttctgtgtgtgtccgcgtctgggcagggctggggctgtgcaggggcaggtgagtgtttggcagggttatcaccccttagctctgcagtattcgatgaccaatgttcacagactgtcttctgcttgtgagacagcccaaagaagcctccgtagacagctctgaaacatttgagggtcagagagcttcctaactctgagtgccctggtgtggctgaatggctctcatgcattttgctaagttctaagaggttggtgcagacagaagaaggactgtggggagggggagaggctatagacagaggacagaagagagagggcatctcgtggacaatctgagagctgcaggttgatcaccaaaagctaagccccactccttgatgccactgggataggttgattgcacagacatttagttgactcctagacagcctcggagctggaagagtcctgagagataaactcacccctccccctatcacagatggagaaactgaggtccagaaaggggaagtgacttgtccaagtcacagggtgagtgccaggtagaggtgggacaagaaccccggtctcctgatacccaccccagggctccatcgcagccttcagaatgcaggaaatgtaggcatctcatagagctgggcagcacactgtcctggtagattaaatgccctgctaaattattacagttggctaaagcattgactctgttcagaataaaccctatttgctagtagttagaattagatgtgaatctagtcaccatggccccctttctttggggactcaaaggccatcatcattagcactgttctttgatggtcagagggaggaaatcggcaacagtggttatcccctccccacagaagggaccctgcctagggtagcctggcatgccgatctgtgactgccaggcccacggtgggtgagacgctaggtcgtccagaagcagcagagtgtagcgtgcttgttgggaggccggagtgtgtcacatgtggcccctgcagttgtggcagctttcccactgtatacaatacctctcgcttttctctctctctctttctctctctccctcctccctgtctctcctaccctcccattccctcttccttctctcctatctatgtcttaggcctgccagtggtccccgagggctttgtttcaccccactggtggcacacagggccgaagaggctgccgatccctggtataacaccgcctggttgggttggtttgggtgcctactgcgggaagcagcaggaacagactagcctggctcctcaaggccattcccagccctcagattcaaagacaaatggagagggggggaaaactagaatagcagaaagaacaaccctactgcacttgggccctttgcatgtagggcactctgtaagcaggcgttaagtgtctaatcagctcctttgtaagtatggatttctacccagaatctctggaagactgtgcaatgcattccaggccaccagagggcaccagcattcactggcaggttcaaaaccgcaggatcagaaacaaagtggttggggggggggggggacctgttttgagctttgtccattgctaactcctcccggtgttagaactgaaagagattgggttgagaacttatctggtccaattcttcctgcgagaaaaggcaactggagcccagagtggaggctttgttgtctaaggtcacacagcaagtcaatggcagtgcctggctttgaacctggctcttttgattcctggttcagtgccccatccatgctgttaccatggtcatctgggaaatcagagagtgacatggatgcccaacacccttggctaagcagggccggcaggaggacccttcactacctgccattgtctggtcacctagggggtgccgtgggtcctaggcagagagctttgcaaagctggtcagtctccctctcgggagacgaggggaggggtggggagctcaaagatggaatgcttgcctggcatgggctgggtcccagaacagcagggggatgggggaagaagaggtttccgtagttctaaagtctctgcctaaatcagtgcttccttaagataggtctctttacaagcagaaaaaagccacaaggaaggtggggaggaaggcaagttctcccttgacatggggagccaccctgaccctctcctttctttttcaagctgtacatggtgcgcaccatgcttgagtcactcatcgcagacaagagcggctccaagaagacgctcagaagcagcctggatggccctatcgtccttgccatagaggacttccacaagcagtccttctttttcacacacctgcttaacatcagcggtgagnnnnnnnnnnnnnnnnnnnncagtttgatctggctggaagctgtagatggagtcattttgctcccaaaggcaaaagaattattttaaagaaaaaaaaaaaaaaaaaagaaaaaagaaaagaaaaggtaaatgaaaagaaaacaagacaagacctttctgtcagcttgaggaggcaggaaaggccaggctctgttacactcattctgactcaaatgaatttggtagacatccattgctagttaggaatcacaccagagatacacgactatgagcccagcatgcactggctcagacgtttgttggtaagcagcagctataaactctgttgaattgtcttagagggtttcatttctgtgaggagataccatgaccatagcaactcttataaaggaaacatttaattggggctagcttacagttcagaggtctagcccattattgtcacagcaggaagactaggcacatgccctcatatcaaggcaacccaataggaggaaaagggccccaaaccaggcaaaagagtcaaagatcagagatagtccttgttcccactttttggagtcccacaggaacaccaaactacacaactataatatatattcaaaagacctaggccagacctatatagactccctgattattggttcagtctctgagctgttatgagccctggttagttgattctgtgggccgtgtttttgtggtgtccttaacccctccttcctcctcctcttccagaggatctccaaagtctgcctaatgtttggctgtgtatctctgcatctacttctatcagttgctggatgtagtctctgatgacagttattctaggctccaatctacgaatatagcagaatatcattacaaatcattttgttgaccttttttaaaaaaatgtttggttctatcctgggtctctgggctctccagcctctggttcctggccctccaggcagtgtcaggcgtgggctccctctcatggcatgagcctcaagttgggcagtcattggttggccacgcgcacagagtctgtgctacctttaccccagcatcttgcaggcaggacagattgtaggtctaaggttttgtggttgggttggtatccctcaactggaagccttacctggttacagatagcaggcccagactccatatgccccatcactaggagtctttgctagggtccccctcgtagattccaaggagttggaattacactattgcactaggtctctacctcaccctcaaagtgcacctccccccaattccagtcatctctcccaatactttctccttctatcccccaatctgattcctcctgttcccatccccactcacccccagttcacccatgaaatctattctttttccccctcccagagagagtcttgcatcccttcctttcctgatctctctacgttatttagcctctcagggtctctgggtcatatcatgattagcttttactttacagctattatctacttataagtggcaatgtaccatgtttttctttctgagtctgggttacctcactcaaagtgattttttttctagttctacccatttgcctaaaaagttcatggtgtcatttttttaacatctgagtaatactccattgtataactgtaccacattttgtttatccattgttgggttgagggtttatccattctaggttgtttccagtctctgactattgggaataaagctgatataaacatagttgagcaagtgtctttgtagtaggataaagagttctttgggaatatgcccaagagtaataatatagctgggtcctgaggtagatcaagtcccagttttctgagaaaccgccatattgattttcaaaatggctgtacaagtttgcacccccaccagcagtggaggagtgttccccttgctccatccatatccttgctgccaagagctgtcacctgtgttgttgattttaggcatgctgacaggtgtaagatggaatctcaaagtcgctttgatttgcatttctatgggggccattttcattcaaactaccatgggtactcattgctccaagctggggaagcttccaggctgcactttagtcccatgccctcctctccctcagaggttgtatggagcaggacagagagaaataggaacccagtgacatggaagtctcaatgtacctgtttaaaaaaaaaaaaaaaaaaaggagtagaggcatctcggttagggaatgacctaagctgggctttctagacctcccaacagtaagggagccagaattaccacacacaggagataagggagccacacttccttgaaagtaagcattgccaggcggtggtggcacacgcctttaatcctagcacttgggaggcagaggcaggcggatttctgagttcaaggccagcctggtctacaaagtgagttccaggacagccaaggctacacagagaaaccctgtctgggggggtgggggggtgggggagggaagaaacaaaaaaacaaaagaaaagaaagtgaacattgataagcgtgttctaaaagcactgtgtgatataaaatcacactttagggatcgctgtagggattttgtagagatttagtagaaatggtaggacggcaaatggtataaaaacttaccagcccttcccacgtaacttgctctgtctcagaagctgacagatgccattccctgtaatcggtactaagctggcttcatgcacaaggcagcaggatccgggaagggctgtatacctagcagtgacagccaataggtagcaaacactgcgatgtgtgagcgctctctgttaagtcaaggctctccctgtgcttccagaggctcttcagcagtgctgtgacctctcccagctctggttccgagaattcttcctggagttgaccatgggccggcgaatccagttcccgattgagatgtccatgccctggattctaacggaccatattctggaaaccaaagaaccttccatgatggagtaagagatgggattgggccaaccaggaagttcctggggtggaatgggagggtggcttgcctctgagctctgtgctttacagaggaaactactgagtagagattaggcaaagtgttccactccaaggtcatttgcctcagccccacagattgacttagaaaggccctaaccccacctgcccttcctgactttgtctacctcttaacagctctgcttagaaaatcaccttgtctaggaaccaagaagtaatctcctaggccaaaatttttaagccagggggtccatcagcatcattgattctgatatctgtgtgcaaatttgaaagcaagttcttcctacttggaggcacggggaacacagagagggagggagcttgtcttcaactccaagccatctgcctcatcactcacacctctttttcccagccagtgtaatttgtcctccgtgactctgtgttccttcccaggtatgtcctctaccccttggatctgtacaacgacagcgcctactatgccctcaccaaattcaaaaagcagttcctgtatgacgagatcgaagccgaggcaagtggcatgcttcctccattcctgcagtctcccaagatgctgggcttatccaatacttaatgattatcagatgggggtagtgtgtcagaggcacttatccagggaacaaaattcatgattgctggggctgtcaaacataatactgtacagtagcctgctcctttctctcctcatcccttgtctgggctacaccatgaggggcttcaaggaccttcatgtatatatacacttcggcttgcaaatggtgccatctagaaccactccaaaggcaggtcacgatctccagaaaagaccatggggcctctggaggcatcaggaatatttggacaagaattcagagttggttctagaaagggaacatggggtttaaatgaacactcctaagttgaccctgtagactccttatctctagaaggtacattgagcatcaagaggttcagaggcccaagcaggaggcctcagttaccgggatatgaagccagcaccatgggttgaagccagcaccgtgcacagcacccactgtgggttctgctctatgtaatatagtgggtgtcagatacaagtacagaaacttttaaataaagggttcgtcttacaaagctgagggcttaataggaagaaatcaaagatggacctcctcctttggctctgcctcctgccctgctgatgccggagcctgatctctttcaagtcccacgttggccaccttctgctccccattcatggatagaagcgacgtctctggtgcttgatgtggggtgtgcccttgtcttcccacagacttcatagtctcctatgaatgccgtgagacaccgcagggcaagactttgtacattaaaaaaccagagggatttaaggaaagctggaagaaagggacgtttctgtctctaagagcatgctccaaattaactctacagagcaagaaaaatcaaatacaaggaggagacaagaaagtctttgggtccacaggctgctagaggtagtcacaacatcagagggtggcctttcatttgtgttccctgaccaaacagtggggagcaatggggagactggttcctgggctcctctgaagccattgagggcaaagggctgacttccgtgcctgtgaatggccacaggtgctttcttcttcttcccctttctgtcagggctgttatgttgccccagaatgcacgtcagtgaaccctgccctggtgccctccccgctgcccatctgtaattaatccagacaggacccgctgactgcctgcttttccccaccaggtaaacctgtgttttgatcagtttgtctacaagctggctgaccagatcttcgcctactacaaagccatggccggcaggtaaggggagtctaggcagtgagcagcgtcctttctttagcctcgcaccttgttcagcctttaaggaaaaatgaagcgatttccacgggctcaggcagtgagacatgttgtgaaggagaatagatggatggcatacaactacactacagttgcatagaagggcagaaactaagcaaaatgaaggacgttcatgaaggaagactgagattctgggactatgtggtagataggcctcggctagtcgaggctatcttaaggaaacagtgtccagggagttaagtaaaaggaggtgagggataggtccagagtgcaggcaaagggaacttcttgtctaagccggagtggggcaggtacaaaattaatagcttgcctgcctgcatcaggctggtgagaagcctgaggtacttcagtgcagtggccactagagggcgagctgttccacctggcatcgttgtaaacacttgatcctggggaggcatctgccaccacaaaatggtttcagaagcacaggggtggcttgacttgacttttaaccttaacgttttaaaaatgtaaatccatggagtgcgtatttaaggtgtgttgagttggagacatgtcaggtttatagacttgtcagtattactgaaagatactgatttaaccccacccccctcccctcatcctcaatggattcctgggttttcaaaccctgcaatggtcctagtcataaaggaaaatacatttatgtaaaagtattgcagttctcgctggaagttgaggtgggccagccagccatcccaaggtgatccccacccccaggggcttctcctccctacccccttggaagtgattggcttcatttgactttgacaaacttgacacatttcaaataggagtcgacgtgcactgcacataaaatgccacgaacatgggatcctaaccgataaacagaacgcacaaaggtacatccatctctaagaagtcacttaataggtgtgagcagatcaggtaggaagcggttaacgacgggggagagagcatttctaagagcattctgagcctgaatatgctgatacttttctgtgtaaacaaacatgggcatgtcacatcctggcgacgctccatacttagtttataaaatctcatcttaggagctagagagatggttcagtggttaagagatcttgatagtcttcagaggactcaagtttaattcccagtaaaagaaaggggaattgaagttcatctttaaagatatatgtccccagctgggttagcagcacacacctttaaccccagcactcggtaggcagaagcagacctgtgagtttgaggccaggccagcctggtctacagagctagttccaggacaaccagggctgttacaccgagaaaccctgtctcaatatatatacacatacatatacccatttgaaaaaaagctctcaacaactttccctgcaaagtgggtgctcttcaaaaggatggaaattgagagaaactggggaattcagagaaagaaagcactagaagggagagtaaccctggctgatccatctgaggtaaaacactgcctcgagtgggagccacctgtggcaccctcagtattcagcagccatattttaatgagggaaagaaatggctgacattttaacaatatgtttcatttcattcaacaaactgaagccactaacatatcagcgtggcatcagtgtaaatactattaaagacatctctgctttctcctagatctcctaaatctattacgcacatgacagcggatgccccctttgaggcgttcagtaggcaccatggttggtggctacagctttggactgtgccattttgaatgtccctttcccacttaaaacctttcaatggcttccagtccatgcagacgtcccaactctctacaagggtctgtggtctcacaagatcaggcctgtagactaacatgatgtaacctgttttggcaaactcttcttttctttaccccgattacgtcctgtttagtcgaacagaccacacttactgtgtgtgggataaatttacctcagccttacgttacctctgcccaaagaaaccacgtacaaatacttcccataatgcctacctccaaatgatttaggttattgctttccagtactagggatactctaccacctatgtctcaatatggaggacagaaataatacacgtgatttataggattggtgtgacattaaaaatagttgtatatgtatgcccttgtgggcgtgtgtgtacactcatgtgcgtgaatgtatgtgtgtgtatgtgtttgtacctgtgagtgtggtgtgtatatatgagtctatgtgtatgtgtacatgtctgtatgcatgtgtatgtgttgcctggtgaatgataaaagctatgcacatgtttcctattaaaaaccatttttccctagattgctcacatttatcagtgtctctttattggaaagtctgtaccttgaggacagacagcaaggaccttcgtttcccctacaccgaaaattttcactgggaaacactaagaatacactcagttgtttttgttatcaattaaggaaagagtatccaccctgggttgcccatcctttactgagaaactctctttcacatactgagcttctgcatccagaaagaagcttggggaacggtatctacagcgacctcaattctggttgagatatttaaggtcatgtgtcccaggaggaccggttgagaagtcatttgccaccctgtttaatgcacctctgtcccacgtctctcttccagtgtcctgctggataaacgttttagagctgagtgtaagaactatggggtgatcataccgtacccgccatccaaccgctacgagacactgctgaagcagagacatgtccaggtatggtgggagaaagccatgacggtgggaacagactctgtggagatagtgtggacttacgtatgtgcccgaagtgtctgcaccaggcatgacagcctcagagtcctacaaacagtactgagtgtccttgggtgcaagttctagacttcctggctcctctgcagctagcctgagaaggactgagcaattccagggcctgacatcctggagtggccttttcctcaccagcactgtcacacagaaacaggtagacccacccctgaagtaaatgagaagagctcaaccccatttaaatgtagcacttcaagctacacctggggtagaaactgtgttgtagaaattttttatcccaatccggagtttctatcccaccttggtcattcagttcccagataaaaggcacacagcttttattatttacaataagccttaaacagcacaagagctgggcagatatctactaagttattacttattatgttttatttgggctgctcttaactcccaacaggccagctctcagggccatgttttcatgactcacccaacacatggtggcttctttccctcctcccttcttttccctcttgtggttctctgccccaaccaggtctctccaaacctatctacctctaatctctagaccttctggtatagaatttaacattacgatctatagcagtggaccaaacctcaacaaaactggtttgtttttatccagtggttttccttaacatttgaccccagatgtagggaaaatgctgccgggaacaagaacacagatcctggttttaaaatgctaatcttagctagaaaggcatagcggtaccaccacagaccctaaacccgccctgcaggtggctggtcagcagaacagcctgtgtgctgttacatctgtgtggttgttgtgtggtcctaggtctctgtgaaggagcagagctgaggccaagaggatattgagctgagcaggaaagaatcaatattgaattctcaggacatccattgccagtgtctagtcgcaagagaggaaaaaacaaggctcactagatgagcaccagaagttgcagtgcagccagaattagccacaggatccccttatgggaccttagttggttagtaggaaatttatcctaagataaataatacctaagagtaatcatgcagtgcctagcaaagcatcgtgcacacagcaggtactccatatatggctattgctgtcttcatagcatctgcaatagtacctatgtggatcccagtggaaattatcttaagctatattttccaccctttaataagcctttcatatgcttgcttttaaaaaccactgccatgaaggcataaagtaggccatcgctaaagtggctacagctccctagggactgtgaacaggaagacacagaaggagcctcaaggctgaatctagggtgtcaacagaagcgttcatcagaggtcagagcttgccccaagcctctgcccacagcctgaatgagttgtatttgacctcagcgggttttatctaaatcagtggttctcaactttcctaatgctgtgaccctttagtaagtccctcatgttgtcatgacccccccaccataaaattatttgatcctattttataactgcatttttgctactagtatgaatcataatgtaaatacctgagatataaccgcaagggggttgcgacccacaggttgagagccatgcatgtaacaccttcgagtagtatagtgcaaaactctctccaggctagccagactcatggtgatgagcatttcattgtactgagggcatttttctctttgtcccacaagcatgcatgcccattacacatacaccatatatgcatataatatgccaaagataaaagattaaatagaattaccattgccaagagattatgtgatgctatctatattctacatacaggcattcccttgccacaataatgctttctataattttagttcagtttgctaccagtgcatcgtatttagttgtcagatatctgtgtagatattacgtaactttctcccacctctgcccttcagctgttggggagatcaattgacttgaacagactcatcacccagcggatctctgctgccatgtacaagtccttggaccaggccatcagccgctttgagagtgaagacctgacctccattgtggtaagaaacggagacccttgtaggctctgctcttggatgcctcagatggatgcccagttggaaatagttgttagctcttctggcctagtttaagagtagcaaggggtttcctttacatctgaccagagagactgggatgaaaggtcattaatggaatgggaataattttaccgttccttatggaccggcagccaggtaagcagagtggaggagagtctccagaagatcggaggtacccatcccccaggttgggccgtgtccttaggatataccaggtgggtcaagcaggcagagtcctaagaggctagaggaagcattacaaggtcacttgaagggcatgtgggaggtgagagcccagaagggttctacagtgggttgtttgttctgcttggtctctatcttgaaaggctggatggttttgagcactgccccgtgtcttcattttgtactatgccccttagagttttcagccagctctgttgcccggtcaggagtaaacctgcaccttccagaaaacagcagctggacttgctccctctcagtcttctttctaagaggtggcaggcatcaagtgcattgaactaggacaccagagtcctacagactcatcctcccagtctgtccctagctctgaccgtgactagctctgtcatcttgggcaagttatatatcttcaccaagcctgtttcctacctctaaagtgaaggacaccttagagtccacttcagagagtcattagaaggacatagtaagaactcatctggaaagaatttggaatgggtctttgtagttgataaatgcttaataagtgatagcttactttttcaagagaagaagggagcgagaaaggactagagggctgcagtgttctcctgggatacgggaatatctgcagcatctgtaagcaggacgtgaaccaaccactcacctgagtcttgcatcacttacaagaaactgtaaaatagctcacattcctgaaatcactcgcctgcctttagcttgggaaatagagttttgtacgcattaaaatgtcctcggtgcttatctctcaaggggtgggagtttgagtttcttctcttttgtttatctgtgtattctggcttcccactaatgagcatatctggaggggggggggcaggtatccacgacctctccccactccctggaagacactgagtgttctcttggctagaacacaatgaaaactcgaagtgtgagcccttgtttaatcagctgagacactgacccccacccagaacatcttctccccggggagcctagggaggaccccctggggagatgctctcctgtgggcaggcttggttcctgtggcctaggcggggcagcctctgcctcctggcagtggcagaaacgaactgaggaatgtgcctttcccatccaccttcaagactgctctaaaatgtgtgagtcaccgcgtgtgacttggggagccagtcacctcgtcgtgcaagtgtgccaagcagggagtcctgcagactggcagcccatgggctgtttggcttctggtgtactcgaaatcttgagtcaacttggaatctttggaagcattcaagaaagactgcaggagctgggacagcaccagactagcactcccagatggcagcaattgctgggcggactacagactcaggtcaacaggtccagctcccctagtcatccgcagagcccccacaagcccacctgactggcagcccactggcccctgctgtatttaattctcagatgcccgctggagtctctctgagctctcagaactgtggtcgctctggtggggctggcctctccttctcctccttcccgctctttggagactggttctttgaaattgcctacctggctgtcttattttcccattttgcttttgtgccccagttcccacatcagcagagttgagtaccagctccttttgtccacccttgcatcaactaacccacgttcatggaacttgaaatcatagaatcacagacctctttccccggctctcgttgtcttccccaaaacagggtaccgcgtgcagcgtgctaaaagggctcaatgatcttagaaatgagctcgttagcgttgccatcagtgttcgtttaccatattgcccgtcctcagcagatgggaacggagctgcagcagaaccagctcagccccgagagacagaagcagagagctctctatctctatccttcgttcacttctttggtgcagagactgactgccactctgtggttgaaacccaggttttagcattctttaggaacatctaggatctgccatccttagcccaccgtagcatggcaacagttgggataagtgtcaaagcaccaggcccagtgctgtgctaatgatagagtcccccacccgccacccatcccctaagactcccctttccaagccatctagttttccatctggggcctgcctggccccgttgctgttagcatttgcaattgcaacctgcactcccagcttacagctatgcaggatgagtttcagagtatccaagctgcagtgttggaagtatgagctgagtccttgaccccaccaaagtagacttgtcaggtgggggaggaggggcccgtggctgatgagacaggagccaaatctttgtgggtagtgacccactgagctccctgggaaagctggtcccgaccatgccagtgtggttttgaatgccatcccaagcacttgttcttgtgtgaccttgggcacatggccttctgatcgtctcccctcggtaacaggaagagcggcaccacggtgtaaaaactggcctcaccaaagcatggccagagtggccttcgatgccccaggacttgagctttttcccctcctacgtagattgtgattctttttggataataatgattgagaggttgcagagcagcatgaagggaacccaattagaagggtgtcattatcactttatttcccagcaaacacagcaccccactctgtgccgacccacaccctgagctcacccctgcctcaatgatcagagcctctgccacacacaggttcctggtcactggggtggagtgcagactataggggtctcagtgacaatgttgccaaaatctggaaatatcctacttcagctgactagttaaccctaagtaggcggtatctcctatatgacactttctgtaagacagagaaatgacctctaccgagatgcagtcacagtattacttaggacactcacactaggacaggcttttcccttaccaattaagaaatcagaaaaagacagccattgcagtacattgagctccatagagacagcgccagggcaagcgcgagccggacaggcactgggcgactctgtgcctctcggaggaaaatcaactaaacatgggcaaaggagatcctaagaagccaagaggcaaaatgtcctcatatgcattctttgtgcaaacttgccgggaggagcacaagaagaagcacccggatgcttctgtcaacttctcagagttctccaagaagtgctcagagaggtggaagaccatgtctgctaaagaaaaggggaaatgtgaagatatggcaaaggctgacaaggctcgttatgaaagggaaatgaaaacctacatcccccccccccaagaggagaccaaaaagaagttcaaggaccccaatgcacccaagaggcctccttcggccttcttcttgttctgttctgagtaccaccccaaaatcaaaggcgagcatcctggcttatgcgttggtgatgttgcaaagaaactaggagagctgtggaacaacactgcaggggatgacaagcagccctatgagaagaaagctgccaagctgaaggagaagtacgagaaggatattgctgcctacagggctaaaggaaaacctgatgcagcgaaagagggggtggtcaaggctgaaaagagcaagaaaaagaaggaaaaggaagatgaggaagaagatgaggaagaagaggaagatgaagaagaagatgatgatgaataagttggttctagcacagttttttttttcttgtctataaagcatttaacccccctgtacacaactcactccttttaaagaaaaaaattgaaatgtaaggctgtgtaagatnnnnnnnnnnnnnnnnnnnntacggtgggaaagagatgaagacactcacttgatccgtggaggaggcaagtcaccaactcccacagccagcccccacttccatatggtttggtttattctgatttccccgcctaagcttcctcctgtgtgattcccactgggttccagatgctctgctgtctagctgctccaggcttcctgcagacaaggggaaagatggtgagatttccctgggaaaacatgctgcctggtgctatcagaacaaaaaccaggctgcctgtgaactccaccctcattagtttgaataaaacccaggcgtttctgccttgtggggtttccaaacggcaggaaaaggagaaatcaaagagagccagctgtataggtcttaaaacactttctggtagggagccaagacttcgggtgagctcaagaaagtgaagcaggttcaatggtggctactacaagggtagggttgactgggtaagacggagtgcagctaccccctaccaaatattctcattgactctcctccctacaaatgccagtgtcatcactccattttatgctcgaggactcaaatgcaaaacacaatagaagcttggcaggttcatcactggcttttctcagttcttctggggggtccaggattcctccttgctccctgggccctcataactgcctcagtctaccagaaacgttacctcacccctccttgtctggagagattgaggacttctgttatccttccataactttcttctgctgtccaaggaaggagtatctccaacctctctgtccttagtcttattcagcgagaactttcaaccatttaatcaatacaattcacaaaagcaccatctatctctgtcttcagcaccatcatcatgcccaggccttggacactgggtagcatagcataaatgttcctcttgtgtctcatgactcagtttcccttagcctcttctactcacctctgatcaaaggcttgtcttgtacttgatagcaacagggaacctacctagaacagcagtaggcatcaaagagaagagcagagaggggtagatagctggtatagactatgggatgcaggaagcagagtctgtggagaagaagatggagaaaggatggacagaagcaaacaagaaaggaaaagattcaggtgtggaatcacatgccttttagtcctagcacttgggggccaaaggcaaggtgatgtccatagttggttataagccagccaaggcttcatagtgacaccctgcctcaaaaatagatagatagatagatagatagatagatagatagatagataggcaggcagatggatagatagatagatagatagatagatagatagatagataggcaggcaggcggatggatggatagatagatagatagatagatagatagatagatagatagataggtagataggtagaaaaaaacaagtaaataaataaatggggggaacatagtgagggcaacactgatgttcatatttctttctcttggggatacatctcagccaagaatacaagcaatagagagcaacaatctaggttgttagaaattagtaagagttttaaatcagaaaacatttttatatattttgataatattttttccactccctcagcacctcccagatcttccccacacctctctacccacccaacttcatgttctttctacaacaataactacaactagaaccaaaagccaaaacaagcaaacaataaaatgaaaactttcaagacaaaaagagaatccattttgcgatggcctcctgggaaggagacctaccctggagtgtgtttgatatccccagtgacactccatttaattttttctttaaaaatttaaagatgattttctctttgccaaaggctatcttgcaaatagtttcttggttaggggtggaaacccatgtccatctccccttctcagtgctgggatcccatctgacttgaacttgtgtgtgctgccacagtctctgtatgcgtgtcagttctactgtgtcttgaagacacaatttcccttggcattatccatcaacactggcctttattctaccaactcttctacatagatctctgagccttgaggttaagagcttcgaggacttcccatttaggactgaggactcatagtttctcaccctctgcacattgtcctggtcactgttttaattcccacctacaccaagaaaaagcttctctaataaggactgaggaaaggccctagtccatttggtatagcagtatgtcattaggagtcatttattgctatgttactttaacatacttaacagtattgggttttcctccaaggcccatgaccttcccagtcccaggttcttgaccacttttgcagtgacaggtatgggtttcatttcatagagtgagccttaaatccaatcaaaattagctagtcattcccttaatgtttatgccaatattacaccagtgcctcttccaggaaagtcactgttacagattgcagggcttgttgctgggtgatatttctcgtcatggtaacatgtagatacttaccagcatcatgaaggatggtcagtagggggtgaggcgtctagctgggcacaagcttatcttctttaggagtaagtgttgtcttcagcgacaaggcgttaccatcaggttgtggagagcgatcaatagccttggcagtagagtgtaatatttagtggggtccatgggtcctctttggccaaagactgaacaggtgtgaccattacttggcactagaggttttatttgtgggctaggnnnnnnnnnnnnnnnnnnnnaaaaagaaggaaaaggaagatgaggaagaagatgaggaagaagaggaagatgaagaagaagatgatgatgaataagttggttctagcacagttttttttttcttgtctataaagcatttaacccccctgtacacaactcactccttttaaagaaaaaaattgaaatgtaaggctgtgtaagatttgtttttaaactgtacagtgtctttttttgtatagttaacacactaccgaatgtgtctttagatagccctgtcctggtggtattttcaatagccactaaccttgcctggtacagtctgggggctgtaaattggcatggaaatttaaagcaggttcttgttggtgcacagcacaaattagttatatatggggacagtagtttgtttttttttttcttttggttttatttttgggttttatttttttcatcttcagttgtctctgatgcagcttatacgaagataattgttgttctgttaactgaataccactctgtaattgcaaaaaaaaaaaaattgcggctgttttgttgacattctgaatgcttctaagtaaatacaatttttttaattaaaaaaaaaaagaaatcagaaagatacaaacatgctttctacccaaagggctgcagatggggcttgcccacactcagcggtctctttcatggctgcatgtagcttctccaccctctcttgtgtgttgggctttttttttttttccttcctatttcaacagtgattctttgggctaataatgattgacaagctatagagcatcaagaagtgaacccaaccacaagtgctacccaagagtatcagaagaaaggaaaattgtcccatgcaactgaagggggtcctagtcctcatataggaggccaaagcttgcctcagaggggtctcctctaagtgttcagtgtgtatgtctgtatgtatttgtctgtgtgtgtctgtgtgtgtgtgtgtgtgtgtgtgtgtgtgtctgtgtgtgtgtgtgtgtgtgtgtgtgtctgtgtgtgtctgtgtgtgtgtgtgtgtgtgtgtgtgtgtgtctgtgtgtgtctgtgtgtgtgtgtgtgtgtgtgtgtgtgtgtgtgtgtgtgtgtgtgtgtgtatgttacctgaaactctttagcagctgtgggttctctctctctgtcaggagctggagtggctgctggagattaaccgactcacacaccgactccttctgtaagcacatgacgctagacagttcgatgccannnnnnnnnnnnnnnnnnnncattcttgtagggaaggtcacaggtgctttgctaaagagctgtcctttacaaaagagttttgatgtagccatgcctaaagctttgccgtgatcactgtcacaaggaaacttttccccaaagtcttactgtgtttaaatgtggtgtcagagtcccgaggtactgatccagggccagccaactgagctgagctgagcctgtattttattcccacctgaccgggattgttccctgttggctgtaatgcatgcagggaccctcacagcagctgtgaagataaagtggggacagaccataggctccctaggccatgctatggtaaccatgtgtgcacgaggcctgggagagtttgatgaaggacagtgttctgatcacactgtccatgtgtaaggacatggatacatacctgaccatgtgtgtacacaacaggcccctttgcagagtagaacttgcctcccggaaggaacacccagctccagggcaggctctgaggtatagataagacctaatcctttcctcacacagggccttatcacttgtattcacaaaccaagcgagaacagttggatggttgggtgaagatgtgtgcaagtgaagtcactgcgttccaggaacctgggtcagggtggtgtgaactaaatccatgcgggacgaatggaaagatatgggaagagtctacacacagatgtacctgaatctgtacattgaacaagatatgctcagcttcataaagatctgactttatagtacattttgagtcatggctacaaactattgcctggccacaactatacatcctatcttgttggcagccatgacaccagtacatgacctaagactggctatgagcagcccatgcactgggaatggtgccatctctttgagggggatcctgtgttccccgtttgtgtgtgtgtgttgtatgcatgtatgtatgtttgaatatgtatgggcatacaagtatgtgggtgtgcatgcatgtgcatgtggacacccacatggaagccccaagttgatgactggaaccatcctcagagctcttcccctttcattgagacagactttctcaatcaaccctagagcttgcctgttcggctaggttgacgagccagatttctctgtctctaagtctatcttccaccttctgaagctggaattataggggagcagctgcagccactgagcactgttacgtgagatcccaactgtggtcctcctgcttccatggcaacccatggccttcccagccccgcattcccatcttcagtgggtggtcagaggaaaactcaaagggcaatagtcatgatgtgaagatgatttaaaattcacaattctaatggaagtcagccatgttctcgagggtgctgtcatctatgacattttcatatccaagggcagagctaagtccttatgacagagatgtctggcttgcaaagctgagggattttttacctggccctttacaggaggagtttactaactcagcttctaaactaaactggaggtgacaaatggagccccagagaaggacatcttcagacccagcacaccctgactcttgtgtctcctgggccccaagtttccccatttttgagaagactgggaaagcatgcagtaatcaaaggggagggggtatcagaagagtctggctcctctgtagacagccatctaggacctgctgcaggtgtcggtgtggggggctcctgcagttgtctgtcccttggaggatgtcacagggctctgttaactgcttccctgtctcttttcttctagttttgtccgaactgccatccctttcacccaagaaccacaacgggataagcccgccaatgtccagccttattacctctatggatccaaggtaaacagccctgtcccatctcacccgtgacagacagagtgggaaaagacaaagggaaaggtgttcccagaatcaggaaagccacggggtatcttattcaagaggaacactgagagccaggcagaaaccactgcaagtccattcaactttattagttcacagctagcagggatggggtagaacattctggacagagggagctgggcaggagctgaggtgaggggtgagtaatgtgctgaggtgggtgggtaactggggacatggggagtctccttgtggcctcccagtttcttctatttcttggttgatttatcataacatcatcaggtgattctgggattctgggctctgtaagttccagagctttacagacagagcttaaaggccattgtaggtgtctagaactatttctgagaggaaggtctcctctacctcatgtgacttattttgtttcctcacatgtgcacatcttcattccaagtgattgtcgccactgggtccattctaattcctcggtccttctgcccattcactcaatggcatttcttatataccccttgtaggccagacatgggttaggttgtccatgctcggtgtccatcgggaatggagacatgacgtacacccacccacaccctcatttccacagttgtggagggaatagtttccaacaagtcccaccaaggtcacaatatgtacaatttaacccttacaataggggctcatgtagaaggaataaagaaacatgtctcccactggggatggggggggggggcgagagacaccagtgattttcttgctaatggaacaaaacccagccacctttgatcccatttttaaactcagcagagataagccgagatgactatggtggagtgagagctttagaagtgtggtgaaccccagagaggctctggctggggcacctactgtgtaggaggaggatgctagagaggatgggtgtcttctccagagaagtcaaactgtttaaggtaatttctcaaacctagagaggctcatcatccaggggtggtagcactcgcctgtcctagcactgagggtctgaggcagcaggactgctctgagttcaaggacagtctggtctacgtggcaagttccagttagccaagactgttatgggagactgtatccccatacacagaagaaaacaaaggaaggaggggagggagggagggaggagtggagatgtcttgcagacgtcatttcaagaggcttagagacatgggtcacaaactaaaaatctggtttcccttcccagttctctttcaaaccttagcttacataaaagaaagacatttgtattgatgttaatgctagtctcatttcttccaagtactgtgccagattcaggtctagctactttcactgtccatcacatagccatggttgattttaatactgaaacagagtcttccgttctttgctaggcctccaaatagacaatactgaaacaatgccttgtttgcccctgatgtaccttgagggtctgtgttgtccaacttggggaccgttgtcatgtgacatctatacagcactgacatgtgagaggacagaagtgggaggtctatagacaaattttcacaaataggaccaactatggagagcaatttaagctttggaaaacggggcatctccttactgttgctcactccctatagtgaggcagtatggccggttggttaccaatctctctagctaaggccaccacctctaaggcatcctggatggcttcagcctctggttcagctttggccctggcccctgagttctttcgtggcagttcctccagggggaacccctgcaggtcttcttccctctgaccaagagctggggtctcctcgggccatcttaccaacccattggcttcctccatttggccggctctgtaagaccaccgaggttcgtgacagcggaggcaccagaactggaggcagatgaaggccagcacagcagtgaagcaggccagcaggatggccatcagcacccaaagagaaatctgggggtccaccagggagcccccggcagccagcggactcttatccagggtgtggaacatggtacagtagtgactatacgggaaggcagccttcttgcagctgatacagaggaagtagagagtggaaggagcgaggtgttccaatgccacagaggtgatggttcgaggcaccttctcctcgtgatggaagttatagcgcaggtatccggagaagatactgttccagttgggcctgtacataatatggtaatagtcctccaagcagggctccgagggtgaccaggagatgatggctcctgtgtgagacacgttcccaacctcaatgttcatcccgggtctggaaccaaatcacagtgaagagtgacatcctccctcctacatcagcatttgacatcatcctagccgctgcagactgagcgcatgagatggccacagatactgacatcgttagagagacaaaagaaaatggacgtccggaggttaagctagtaagccagtggtggaatacaggtaggaatgaggactggctcatgacaaagctagcagccctcaggctcaagatgtacccacatcatcccggccacagcccatcctggctgagatccatcactgacagtgtcgttcccagcccttccaaacacaggcaacgtgaagagagctctgagggcctaccttatgcttctcagctcagtcctgacctcttgcctctgctgtgaatgctgtaatgttacctagaacattctgcccaatggcttttttttttttttttgacaagttacttttcccatgactagtagagattccctctggcgccccccagtggcgatctacctcaaagcttctgcaagtgttttgttttgtcaaagcccaaggtgcaagaaattagtttctcagatcaaggtcctcagctcccaggatagcttaacttctaattgccccataacttctaaaagtagcaatagtactatgacttttgtgactgtctaacccactagttcccaactttcctaatgctgtaaccctttaatacagtacttcatgtgatggtgaccctccaaccataaaattgcttttgttgctacttcataactgtaattttgctaccgtcatgacttgtaatgtaaatgtttgtgttttccaatggtcgtttggcccccaaaggggttgagaaccacagcaaatcggcagttgctggatccaggctgtgccaggtggcttctcccacaataacagactccattcccatcttattaatgagcggcctggagtatcagctcacaggaagagagagaacttacccacttagccactgtatttcaatgcagagcccctgagttcagtaatagattattattgttgattatttattattattattattattattattaaattattggtaaatgaggtaccctggttggctgtatggcagatgagccctgttcagattgtaagcctttcagctttggtaaaggagaggcatcaaggtttttgggttttctttcattctctccgattgagagaaagctttccttctgaatcccccctgatcaaaaatctagacaagcgttgccaggctctatatgttccggtctccctctgccttcttctccattccccatccccagccagaagtgcagatgctgcggaagattgaaatggcaagcgggcacgttcagcccaaagtgaatattaagccaaactgatttctgtttctgggcttgtgttgttaggctaggtgagccaggggaaaacgtaacagcgtgaagtaagttttcagtccttggtttccatctctaaagacagtgacatgcttgagaaagcagcttcctcctctccacgtggctgggaatttgcacccagtaaatgggaaatacaaaagatgaggcaggggtgtacagagcctcccagagatggctttcagaaggaaacggacttactctccctcgggtctcttgatgtatgcccacctccccacccagggacctacatacccaacaaacacacttccaacctccgta

SEQ ID NO: 1349 - DNA, 4294 bp, Mus musculus
gaattccgttcctgtctcagtctccgctgctcctctccttcagtcgcactgcggggtgatgcccaaggcgcatcacttttcagaactggaccatgaacaacttcatcctcctggaagaacagctgatcaagaagtcccaacagaagagaaggacttctccctcgaattttaaagttcgtttctttgtcttaacgaaagccagcctggcctactttgaggaccgccacgggaagaagcgcacgttgaagggctccattgaactctccagaatcaagtgtgtggagattgtcaagagtgacattagcatcccgtgccactataaatacccttttcagactcttgtgtacttacaggtcgtgcatgacaactatctcctgtatgtgtttgctccagactgtgagagtcggcagcgctgggtgctgacccttaaagaagaaacgaggaataacaacagcctggtatccaagtatcaccctaatttctggatggatgggcggtggaggtgctgctcccagctggagaagcctgctgtaggctgtgctccctacgacccatccaagaatgcttcaaagaagcctcttcctcctactcctgaagacaacaggcggtcatttcaggaacctgaagaaaccctggtcattgccttgtacgactaccaaaccaacgaccctcaggagctcgcgctgcggtgtgatgaagagtactacctgctggacagctccgagatccactggtggagggttcaagacaaaaatgggcatgaaggatatgcaccaagcagttacctggtagaaaaatctccaaataaccttgaaacctatgagtggtacaataaaagcatcagccgcgacaaagctgaaaaacttcttttggacacaggtaaagaaggagctttcatggtccgagattccaggacgcccgggacatacacagtctctgttttcaccaaggccatcataagtgagaacccctgtataaaacattatcacatcaaagaaacaaatgacagccccaagcgctactacgtggctgagaagtatgtgtttgactccatccctctcctcatccagtatcaccagtacaatggaggaggtttggtcactcgactccgctatccagtttgctcctggagacaaaaagcccctgtcacagcagggctaagatatgggaagtgggtgatccaaccctcagagctaacgttcgtgcaggagattggcagcgggcagtttgggctggtgcatctcggctactggctcaacaaggacaaggtggccatcaagaccattcaggaaggggcgatgtcagaagaagactttatcgaggaggcggaagtcatgatgaaactctctcaccccaaactggtgcagctctatggggtgtgcctggagcaagcccccatctgcctggtgtttgagttcatggagcacggctgcctgtcggattaccttcgaagtcagcggggtctctttgctgcggagaccctgctgggcatgtgcctggatgtgtgtgagggcatggcctacctggaaaaagcttgtgtcatccacagagacctggcagccagaaactgtttggtgggagaaaaccaggtcatcaaggtgtccgactttgggatgacaagatttgtccttgatgatcaatataccagctccacgggcaccaaattcccagtgaagtgggcatccccagaggtgttctcctttagtcgctatagcagcaagtcagatgtgtggtcgtttggtgtactgatgtgggaagtcttcagtgaaggcaaaatcccatacgaaaaccgaagcaattccgaggtcgtggaagatatcagcactggctttcggttatacaagccccgcctggcctcctgtcatgtctaccagatcatgaatcattgctggaaagagaaaccagaagaccggccacccttctcccagctgttaagccagctggctgaaatcgcagaagctgggctttagcagggactcattgaccagacacagccataaatcctgagtgaaggaacaatgtcctttttccagagcattaaaagctgccaccagtccagaaacccccacaggtgcctggaccatggtgccagcacctatgcagccacaactgcagcatcatagaaaagggtggagggccagccactgagccaacagctgaaccacaactggagcagtatctgcgtgtcaccccatcccagcctcttgtcgtatgctgtactcaaagctccattgcccactctgggagcatcccctccccctcttagcaatccatggagaggcagacgtaggccacactcttctttattattactttaagaataattcaagtaacctttaatttggcccaacgagacaatgtgcccattttatggatggaagagcgggaaagcatcattctttttctaagaaatgcaagaggtgattaaaccagggtgttctactacttcaaggctgtcagccacagcttcctgcctcacatgaggcggagcggatgcttgtgccagaggccggatgccataaggtttcagagcacactgccacctctctttgatggggcacagagagctccaccgggtggatagggcagggtgacacattcagaccccacggcaggaccacaggatgtctgaggtcggtcaggaatgagagggcctctgatggtggaagtaaagagctgcaaaagaagcctttgggttgtccctgacccagcggccctgtttcacggtgagtcatgtgtgtgactggatctcctgttctgtgcaggatgctgaagcagtgactacagaacggtcatcattccagcctctcaggagcggcatccactcagcactgtcatgatccttgtgactttgagactttgggttctttcaagcctttacgggttcagcagtcttaaggttgccatgtaagctctcaagagcccagcaaaggaagaaggcgtttgctcttgcccaaactatcaggaaggaaagaggcaagcactgggcggtgcttccaaaatgcacagatgtctcctactgattggcactcgcacaggtgacatgtgtatatcctgcacacaggtcatcctggcgaatcacagttcataccaacccaaccacgaggtattattcatgtcttacagaaagtggacttggtcttttaaaagctggatagctgccccagtgacagaactgggaaggacggagattgagatgacacccgaatataactccagtgtagcctcttagctcttctcaatgctgcctcctactgggttgggccgctgagcgcataacacaggaaagtctgggttaatgggcaccccaccccacagccaagttgctcctactcagagcactggggggcccagtgggaccctccaaattgaaataggctgttctctttcttcaccctcacctggatctgagttcacaaccctggagccactcaaaattaaccctttcattctcccaacctaccagagtcacattgcctgaggccatttatactagagcttcaaaggtgctttcaactagtctcctgcagactgtttcctgtaattatcccttcaacctagagctggctctcttgtgagaaggaggattccctggtgccaggcacactggattttctgcggtgttcagacaaagcccctagaaaaatgatcagagtcacagatccctcttcctaagtcacgtggcatttaggctggcttgaggctcaaatgcatcacttccaactgtaatcactgtgtccagataaaactctgtcattcagaaaatgaacttcctcaactggtccacaatcatctctgtttattctcttttgggaaaccttaattaagagacgatttctgggacatccaatctggaagataaacactggaaccgagagaagtctgtggtgtggtttaggagactggcccccatacggtggtattggctctcttaacctcacatgcacgaaggctttgatggacgcgtgtgcactgcttactccagtgtcctgcttgggaagatgggattctcttctgctggtttctgtcttacatttttttgtaaatggtgccctgtgttcacagaaaggttttggtttgaaatgtattttgtaggccttgcaattcataatgtttggaactatgtatttatgcctagatcaggagagtatttattgcttgtcttcatgataaaaaatactgcaggtatgtcttaccctctgtgggggccacaagtcaatcattgcttatggaaaaaaatatatatataaagctacatgttttacaaaaaaaaaaaaaaaaaaaaaaggaattc

SEQ ID NO: 1350 - DNA, 1878 bp, Mus musculus
atgaacaacttcatcctcctggaagaacagctgatcaagaagtcccaacagaagagaaggacttctccctcgaattttaaagttcgtttctttgtcttaacgaaagccagcctggcctactttgaggaccgccacgggaagaagcgcacgttgaagggctccattgaactctccagaatcaagtgtgtggagattgtcaagagtgacattagcatcccgtgccactataaatacccttttcagactcttgtgtacttacaggtcgtgcatgacaactatctcctgtatgtgtttgctccagactgtgagagtcggcagcgctgggtgctgacccttaaagaagaaacgaggaataacaacagcctggtatccaagtatcaccctaatttctggatggatgggcggtggaggtgctgctcccagctggagaagcctgctgtaggctgtgctccctacgacccatccaagaatgcttcaaagaagcctcttcctcctactcctgaagacaacaggcggtcatttcaggaacctgaagaaaccctggtcattgccttgtacgactaccaaaccaacgaccctcaggagctcgcgctgcggtgtgatgaagagtactacctgctggacagctccgagatccactggtggagggttcaagacaaaaatgggcatgaaggatatgcaccaagcagttacctggtagaaaaatctccaaataaccttgaaacctatgagtggtacaataaaagcatcagccgcgacaaagctgaaaaacttcttttggacacaggtaaagaaggagctttcatggtccgagattccaggacgcccgggacatacacagtctctgttttcaccaaggccatcataagtgagaacccctgtataaaacattatcacatcaaagaaacaaatgacagccccaagcgctactacgtggctgagaagtatgtgtttgactccatccctctcctcatccagtatcaccagtacaatggaggaggtttggtcactcgactccgctatccagtttgctcctggagacaaaaagcccctgtcacagcagggctaagatatgggaagtgggtgatccaaccctcagagctaacgttcgtgcaggagattggcagcgggcagtttgggctggtgcatctcggctactggctcaacaaggacaaggtggccatcaagaccattcaggaaggggcgatgtcagaagaagactttatcgaggaggcggaagtcatgatgaaactctctcaccccaaactggtgcagctctatggggtgtgcctggagcaagcccccatctgcctggtgtttgagttcatggagcacggctgcctgtcggattaccttcgaagtcagcggggtctctttgctgcggagaccctgctgggcatgtgcctggatgtgtgtgagggcatggcctacctggaaaaagcttgtgtcatccacagagacctggcagccagaaactgtttggtgggagaaaaccaggtcatcaaggtgtccgactttgggatgacaagatttgtccttgatgatcaatataccagctccacgggcaccaaattcccagtgaagtgggcatccccagaggtgttctcctttagtcgctatagcagcaagtcagatgtgtggtcgtttggtgtactgatgtgggaagtcttcagtgaaggcaaaatcccatacgaaaaccgaagcaattccgaggtcgtggaagatatcagcactggctttcggttatacaagccccgcctggcctcctgtcatgtctaccagatcatgaatcattgctggaaagagaaaccagaagaccggccacccttctcccagctgttaagccagctggctgaaatcgcagaagctgggctttag

SEQ ID NO: 1351 - DNA, 92563 bp, Homo sapiens
gagtgagccactgtgattggcccagaagtgacctttgagcaaagacataaaggagatcagagaagaagccatgaagatgtctggggaaagagcttctcagtcagaggaagcagcaagggccaagaccctgatatgagagcatgcctggtatgtttaaggagctccaagcaagctacagtgatgaaagtagagtgaattaggaggagggtcgttggagatgaggctgagaggcaactggggtggtggtggatgagcagatcatgttggatagaccttgtagcgctctgagaggtctttggctttgctctgaatggtggatgatccaaaccataaatatagaagatgattctggtcaccatattaaaaagagattgtagaagtgcagggaagacagtagtagagacggggcaactcctgcaagagatgatttggggtaagacgtgtgtgatagcagtgagagtaatgagaagtgctcagccaccatgcatactttgaggcaactattaggtatgctgatttgaacaatttccaataaatattagcaagtaaaaaagcaagttgcttggcctgagatactgggcacacaaaaaagtatgtcgcaaaatagcatatgtggtacatcatatgttatttaatgagaaatttaaagtgtgcgtatgtgtgcgtatgagtgtgtgtgtgtgtgtgtgtgtgtgtgtttgaaaggaactggtagtaggagctaccttgggtcaacttgctctctcagggaagtagcaagatggagacttcatttctaggacattcccttcacagagtaagactttcatcagtcatggatagccttcttagggtgttgaaaatgttctaaaaattaaattgagagggctgtacaactctgtgaatatataccaaacattaccaaactatacactttcaatggatgaattttatggtcaatgaaacatatctcaataaagttattgaagataatagcaacacgtcagtcttgacttatagatccaatcccattgtcttccatcattctcttagataattaaataatccctgggcaggcatgttaaacaaggctttaatatgacatcagaagtacatattgcctgctttacttgatttttatttacaagttttgggtaatgtttcttgatgaggaatgtggtagagcatggataagctagaatccaaattttagagagcttacaatcagtagaacacacactgaaaaaacagaagaaaacaggagggcaagtaaatacacagtagagtgataacaaattggttgaatgaacggtgactctaataccctttaccattatattcaaaaccaacaataattgtttcttaagaagaaaaacaatcaaaatcacaattctaaggatagttttgcatacattttaagtgagcctaaggttgaagagctgtgaagagtgataacacaaaacagtatatacaaggcacagtatatgcagacatacaagattatagaaggctgaagtctaaacgtgcattgtgggaagtggtttcaagtcaataacttttattcttcatctatgattttgaaaagcaagggaagtagacagctatatatagccttttcaatgagtgtgcagcccaggggagcattgtgagctaggcaggatgtgagggtggggagatttccataccatacacagcatgtacaggctgggtaaatcccctggcctaaaatacaatccacagtgcttttatgtcaatgttgctcagcagaggtggcgtgggctgagctgcggtcagcctggggcacctaggacttcaggaagccaacctgatttctgccttatcttctggctctgaaaagactacagtcacctaactcttcccctgaggaccatatgcaaatcagcctgcctctctgccttgggttgaaaaggaaaatgaactggtatacatacaaaaaagaagtcagacaggggatcaaaataattttatttctcaacatgatgatccaactagcaccgcctgtcttccccctcctatctctcatcctgtcttgcttctttcctgctccctgctcagcatatttggccccactaccaagcggaatccttccctgctcacacaggcttaggacaacttcactgtctccactccctgttttgctctgtttacaaatcatgagatgtcctgcctccgtttacatattatttatttaatgttacattgaagaaacttgcagctaaattcacacacacagacacactcgcaccataataaaacacttaacattaaaaataaagatcaggctgggcgcggtcactgacacctgtaatcccagcactttgggaggcggagccgggtggatcacttgaggccaggagttcgagaccaacgagggcaacatggtgaaactccatctctaataaaaatacaaaaattagctgggtgtggtggtgcgcacctgtaatcccagctatctgggggccaaggcacgataatcacttgaacctgggaggcggaggttgcagtgagccgagatcacgccactgcactccagcctgggtgacagatcgagactctgtctcaaaaaaaaaagatcagaaactgtctacaggtagaaggaggtaactgatccagtagctgggataaaatgattattctaagtaaatattaaatttaactctgaaaaaatactggaagaatgtaaaataaatattaacattgattatttctgaaggatgagattagatgtaatttttatttatttgctggtctgctctttccaccaagaatatattttacttttgttaccagaaatatatatttcaaaaaattagctctaagtttactagccatttcagtcattattgtcttctacgaatcaaaccaatgatttttgacaaatgacatatttttcttttattttaaattggaaagtaaaaaatccttccattttatcatcttttaaattatgtaaattaaaaagcaaaacatttctttacctttccagttttatatgctggaattttgatatacaaacttcctgctatcaccatgtacatttaaacatacattaatataaacacaaaatatacctggaaaaggtatagaacaatatgtatggcttgtatgtaaaaacaaaacataaaaacatacaagccaaacatattgttctgcaccttttccatgttaacaatatatcctgaagttttttaggttgatacattatgaatatacattattggtttccataaccttgtagtgttccattgtaaggatgcaccatagattattttacttgtctctcattgatgcacagagaagtagtttccattacaaaaaaatactgcaatagccaggcgcggtggctcacccctgtaatcccagcacttcgggaggctgaggcaggcggatcacgaggtcatgagatcaaaaccatcctggctaaagcggtgaaaccccgtctctactaaaaatacaaaaaattagctgggcatgatggcacatgcctgtaatcccagctactcaggaggctgaggcaggagaatcacttgaatctgggaggcggaggttgcagtgagccacgatcacaccactgcactccagcctggcgacagagcaagactccgtctcaaaaaaagaaaaaaaaaaaacactgcaataaatatcttgtacagatacctctctgtgctcacgctatttttcccccttagaattgatagctctagcaaacgtaaggtgttgttgttgttgttgttttcagaagaaagaagttatgtaggtgccaaaatattctggatatgattcttaaatggatattaataaacctaattaagtttggatgggaaccacaaggaaattaaagggcttcaaagccacatccaaagaggacaattgaaggatgtctttggcctggacacaagagggccctggagttatccaaagggcaagtcctcggactagagaaggttggagttgtaggacttcaaaagataaagcaacaaagatgggttttaggtaacagtaagagagcaatcatttatctgatccagcagccattcccctacctctagtggcaacactctagtgttcctcagagaaccatccctcccccatctgtggatgggtaggtccatgtggctgggtagggctgactccaccccactcccagatccaggagtgtgtccaggcctggaaagggtcaaatgaatattccattgtcttggctctaatgattgaggtacctgcgagcatatcatgtgagctaggccaatgactcaaaattctgggacttttactagaactataaggaaagagatctagctccactggtaagatgttagcccagcagccattttgctgccatggaggacagcttgcccatgcatgaaaccagctcagaactaaagaatgaaaaccaaaacctctgatgtcgtcgttaaataccagcggacccagcagtgccaggttgaattgatttttcctttgttatagaaattgggttaaattaggttttttccaacccagtttcagttgcggccccaaagccctatattaatgtgataaagggaatgaagtacctccatccacacttgacgcattaagaggcaaaacagattctgccagtaatagcgttcgcccaccttcagcctttagaaaacaaggcatgaaaatgcaagagagagaatgttgggggctctgtgtttcctctcaccactagcccacaggggaaggtgggtgggtgcttatctaccagaagccaaccaaaagggactttaagagactcttcagggagcttggtgtgagtcccagagttttgcagctataaggactagtgtctaaatcccactggagaaacataatggtggaagtttgtggaagagctacttattcggtgtcagagggaaagggggctctacttggggcaaatggtatatccatcattggctgggacaggaggcccgagtcttccagtagaaccatgggagggaataagtggtatgtggttctgtttcttttttcttcatttgagacggggtctcattctgtcccccaggctggattgcagtggcatgatttcagcttactgcaacctccacctcccaggttcaagcaattctcctgcctcagcctcccaagtatctgggactacaggcgaatgctaccacacccaactaatttttgtatttttagtagagacaggatttcaccatgttggccaggctggtcttgaactcctgacctcaagtgatcagcccacctcagcctgctaaagtgctgggattacaggcatgagccaccttgcctggctcttttttctctttatttaatagaaatgagatttccctgtgttgcccaagctggtcttgaactcctgggtttaagggatcctcccacctcagtctcccaaagtgctgagattaccagcgtgagcccccatgcccagcctctgtggttcattttcaaggaaattttacccaagaggacaacctatgtcctgacaggacaaatgaatcccgacaggagctggaacagctaaagcccaagggctgagggttgggctccttggccaaggagagtggcaactcctacatcagggaaacagttgtcagaaccttcagctggaaaatctctgaaaacagcaaagcacatgaaacatgcaagaaaaagcagcaattgttcatccaccacatcccaaggacatcatccccagattactgctgcagcttcatgaacgttgcaccctttacccctcttcctcttttccctccagcctgagcttccgactcaggtgtgtcagaaaccaggcttgtgtgtgggaaaagagaggttaggacatggtggaaaagccaacatgcttcaaatcctgaagcaaacccatgcaaagttacggaaaagcatcaacttgaatacatgtttggagttttgattattaccttgaactgaactgggctttctttttcttttctttgtattgttgttgttgttgttgttttgagacagagttttgctcttgtcacccaggctggaatgcagtggttcaatcagctcactgcaacctccgcctcctgggtttaaagctattctcctgcctcagtatcccaagtagctgggactacagccacctgccaccatgcccagctaatttttgtattttcagtagagacggggtttcaccatgttggccaggctggtctcaaactcctgacctcaggtgatccacccgcctcggcctcccaaagtgctgagattacagacgtgagccaccgcgcccagcccctttttctttgcttaactttttattatggaaattttcaaacgtgcatcggtgcaaggagagtagaataatgatgtacccattagccagctttagcaattatcaagtcatggtcaaacagttttcatcccttcccctaccaatttctccccctccactggattatgatgaagcaaatcataaacattttattgttttatcaataagtcagtgtatgtttctatacaaaataaggactattttaacatgataatagtgccattattacatctttttttttttttttttttgagatggtgtcttgctctgttgctcaggctggagtgcagtggtaccatctcagctcactgcaacctccgccctccaggttcaagcgattctcctgcctcagtctcccaagtagctggaattacaggcacacagcacgacactccactgacttttgtatttttagtagagacaggatttcaccatgttggccaggctggtctcgaactcctgacctcacgtgatccgcccaccttagcctcccaaagtgctgggattataggtgtgagccaccacacccagcccattattacatcttaaaaaataacaagtttctcagtattatcaaacatctctttaacattcaaatttgtctaattgtctcataacgtctttatacagttgatttgcttaactcttaatccaaagtccaaacatgctcatatgtctcttaaagtctcttttaatctaagggttccccctttgatttatttgttgttttgttttgcttttgttttttgagacagagtctggctctgttacccaggctggagtacagtgctgcaatcccagctcactgcaacctccacccactgggctcaagtgatcctcccacttcagcctcccgagtaggcgggactacaggtgtgtgccaccatgcctggctaattttttgtagaaaaagggtttcaccatgttgttcaggctggtcttaagctcctgggctcaagcaatccacccccttgacctcccaaagtgctgggcttacaggcatgagccaccgtgccctgccctctatgacttatttgttactgatactgagtcatttgtccttagcatgttttgtattctggactcatccaattgcatctccacagtgtcatttgtcaggttcgtttatctcttgtatttcctgtaaactcgaatttatatctcgaagtttgattagatttgtgtttgattttgttttctcttggcaagactcccgagttgccagttttgtgtacttcctcttgcttcacctcaggagacatacaatgtctggttgtccttcttttaagattaatcagtgtgttacagtgttgtcagcttcatatgacagttatacattttcctattggctttttgcgtaataattttaacagccattgatgatcattgcctacatttattatttcattggcattgcaaaacgatagtattctgtcactccttcattgattagtttcttggaaaaaaagaacttcctcattaaatacttgatcactgaattgaaagataattcttcaagaaaagcaagcaatatgttttatttttttcctttgtttccagttttcagaaaaacaagttggttcttcagcatcctccaaaagtgatcaaaaggttgggatgcttttttcaattctcttttgaactcattgttttaacatttttgctgttcttcaattcatggcaattattattccttttgatactcaaattgttccatctttggcaagtgggaactccttgaatttggctcctatgaagtgaactttttaaaaccaaaacaaacaaagggactatttgtttttgtttatgttttccttaaagtgagaaaaaaatattgagcctcctaagtttgcatttaaaagttggcaaagatgagtctcagttagtgggtttgatggctctatgagaaagagaataaaattacttacgatgacactccatgtagactgagcaaacgaaagactcctaagtattgcaacagctactgatgatattttgttttcccggatgagaacactttgtgaagtctataactcttttcatctgaaccaagcaggtgtaaaatgtactttcctcagaggagtttgtagtctagtttgagaagatagcactgtattatctaggtttgctggtagtgacagaaacctcaaaataactgagacttagaaaatagatattaaaaaatgtaatccagggctggcatggaagatccatggtcaccagggtcccaggctctttctatcttatactccattgtcctcaacattcaatttccacctcatgatactagatagctgcttcagctccaactgttacctcaatattctagtcacaaggcaggaggaaaagggaaagaaaaggggatgacagatcccactaaggaaatttcctagaagttgtgcacacgacttctgctacattcagttgaccagaagacagtcatacaactacacctagctacaagggaggctaaaatttgtagtctttattcttgctggccagatgcccagataactgtcagggattctgttactctagtaagaaggagagagtagctatttgggaatagtagcaatccctacctcaagcccatactcagaaaaaaaaaatactatcttgtttgggcagtgtatttccacacatatgtcttaagaatctcagaatgggggaggtaatttaaaatataccagtaccgtaccctcctgggtgtcttgattatgctggggcatccagtatatgaaataaaattaggctgttgtctggtaatttacatttaaaaataaacattggagaatttcactcctatacagcaataattattatttcatttattatttatccctacccactacatgcaatatctgcttacactaaaatctcttgattattaacatagtagaggtaactgtcacacattatacttcaactatgtactaactctaaggtgacatgtatgactagcacctaccattcataagatgtatgggattcagtcctccaaaggaccctcacaaggaagctaaggatcagagaagtcatggcttgctcaaagagaaacagcatagtaagtgacagagctgggaatccaacacaagtttgtctgttttcaaagcccacatatactttgtttattatgccattctgaaggattcacttatttttcactcttccacaaaacgtcaggacagaaaggcagtcatctatatgtagcattgagaaatttctatgggctttaatttaaatcttaaaaactaataaacttcagcaacatatttcttcactttaatgtgtgagggttttgtgctcattacctcttttaattgtccaacccaatttggtgatgatccattcaacaaatttttcttgaacatctgttttatgtgtcaggtactgtgatggttgctgagtatatcatggtaagcaaaaccacacattgtccttactccttgtgctacatgatttaactgctggatggattaaaccaggaactataaagattaaactgtaatccttaccacaattttgagtttacagtttttcaaatatcatttcaagccattagcaaaggctgtatgtattttttacatatgcctcctcgttttgtgaattttgaaaggatgtggtttcggcctttgacatcagaggagaagctcagctatgttggctgaacgttgatagaaagataacgttgaaggcaagttgcccttgagcagctctctgaagatcaactgcctccacattgcattctttgccccaaaactctttcctttggttgtgctaagaggtgatgcccaaggtgcaccacctttcaagaactggatcatgaacaactttatcctcctggaagaacagctcatcaagaaatcccaacaaaagagaagaacttctccctcgaactttaaagtccgcttctttgtgttaaccaaagccagcctggcatactttgaagatcgtcatggggtatgtgagcagtttcatttgtcttttttcgcatagcattttatgtttggactgggctaatgcaaaaatatatacatagcataaaatagagcacaggaaacacaaacatgcttattgtaacaacataaaaagtacagtaaaagtaatcagaggagaatgcagagagcagtcaagaggtgaaatggtggtgctaggtgatttcagttctaaaaactgtaaatttaacattcatcagctttttccccctgcaaggttatgtttggtttttaaattatgaataacattttaggtagcaagtattatgattcgataaaacttgaactttctatgaaacatactaaatttaatgaaacatactaaatttaatgaaacatagattaatacaacactagcattcaatgggatgatctaccccagctttcttattttttagtggaagaaactggtgtttagaatggttaagttttgggttcagtgttaacgttttcatgaataactctgtttgtctcaatactcgtcgctagcctgatcttgaaataagatttcccaggcatttaattatctaaaagttgtaaggcacaatggcaaacctcttcatctcttgatagacttcttaggacaccagggttattaagaacaaagtttctgcagtgcagaccagcggttcttacccagaaggagtatggctgctttgctaggtcagtctatctctttatctaaaaatagtcttgtgcttcttaacatcactaataacaaaagcaacaggaataatcctaataatgtagtttggtagaaaaagcattggacaaagggtcaggagaccaaactctacttctcagtaggtgatccagtctgggcaaatgtctacctcctatttcaggttctttcttcataaaatgaaaaaactggaaataacaaccttcaagatccctttcttcttcaaaacttctttgctttatgcagtggctcttgtttagccctatgctgcaatttttcaaagcatgtttgatttcttactgtatggttatattatttttacatcattagtggggtaggacaaggattatcacttatattttactgaagggaaaataatattaggtgcctgatggtcacttagaaacaaaagtgctccagttctttgttggagtctgacttagtaggtggtggcatgagtttgggattctttggtgtgccagggtttaaagcacttcatgagatggagctccagaggaggtcaggctgggtatagagcctatggatgcctcactttttaaagttgcaggtgttgcatgtcttttgtgaattaaaaaaatacagaaaacaaaaaagttgcaggcgaaatagctctgcctctttagaagtgaaaagaattgcttgtcttattatcagactcttactgataacaatttaccagtcaatcagaaaacacatggaattacgtgcaagtcctctttgctaggtggccaggagcccagtttgtgaacttgggggatttatcatgtagagctaataaatcgcatggcattactcaatgcttttttgtgaatggaacatttaaagtttttgtttcatattgaaagaacagtcatgtacctttaaatatttttttcaaagtccattttgcagttttcaccagttcgtttttctgattcaacatagtatcatctcatttagttagtattaataattccttagcccaactgctatttgtgaactgattgtgaattcagctcaatattatttgtaagtaatcacaaaaccagatggccttaattcagaatattattggtcataatttgcatgtagacaaggttgtaaaatcaccctacttctttatctgagcattatggaaaatttcaagacaattacttcattctggggagccctaggctacagtttctaattcttccatgtgagatatagagaatacatgtccaaacatcaaatttcttgttttctaatgccttttttactcttataaataacattttaaaagtatttctttaattatttaattattatagaagtttattaattagaaatttatccaagttccctgaaaaaggtaatatatgtgaattattattgttcatgtcttaggtatactacatggtttcaggccaccaatttgcacacaaggctgcattaatattactcataagtaaataacattacacttatgggaagaacattttcatttttaaattaaaggcttcattttcaatctgtaaaatgggtgtgataatagtacccatttcataggaagatggcaaagactcagaggtataatgtctttaggctgaactttttgaaattatttggcagatcgaatatcagatattagaagtttcaaacaattcaacttaatatattaggtacttagcataggccctgtcatctggtaagcatctagtaaaaattaaccattatttgtatccctttcatgtctctacagaagctagcaggctgtcataacaattcattttcaaattatgggagatattcaaggattcttcaaagtcaagctaagatcagggtcctggattccttctattctgtggctaaatataagttttgtggggtagatatacatgcattatgagctgtttggccagttattgcccctcttagggtgtcgggtgtcagagcttctttttctcttttctcatgtgtaaaattatgattcttgcagttctcatattctatgaatttataacaccatatgaaaaataacccttctacatactcaagaacatattctgtaattctagaaatcaagtatgtttattctaacctaaaaaatcatgcctattgtcattataatactaattgattgaggttttactttaacatggttttagttctggtgttcgatgcctgtttttcctgttgagatgtgcaagtgttttcagaggggccaagaagcgccttcatcttgctggagcagtgggccagaaagaagcatagatttggcaggtggtagcttgcagacagacatgatttcagaggctctcctgtgcctgtcaatttttttccaagttgtccctgatgcctgaaattctatgacagaggacaatgagagataagggcacatggatgtcctggtaaatgcttaggaatccgagtacagggcttgttggagagccctgattcatagtgtttgccaattcctttggtgtaaatattcccatcatggcccattttaaactaccaatgtgatgtctgctggctcacagattcctgaaaacttaacaattagctacctcgggccagtacaagccgagtccagcacactgtcggcaagcctaagtacaaatgatccttggagaggtagccaccaactaaacagcatacttagttgcacgtgactgatatcggatccttttcagcggtaaagggaaaatggagagcctcaggcactttgagtaagcacaggatggaagaggcagcctaaatgggaataaagcatcatagattggtgtggctcacgtggccactttctagatgtgggatctcagaccagacacttgacctctttctgcctgtgtcctatttgtaaagtaaggaccccaacactacctacttcaagtgatgttgagtatttcatgagaaaagtatgttataagctttttaccaattgctacatggtaaggtgattattactcacaattttgcccaagcaccaccttggtcttctgaaagcccctctggagaactggaaaggttctcctattttgatgactctttgccccttagggatcaagtgtgctgtgctccttatgatgtgggaggcattatcatttacatggaacaagagaaacagtcaagatcaccattccagtaagcatctgggtgagggtctccactcctcatggccttttccctttagcctacagtcttatctagcaacagaaccatctcctgcttgcagcaagcatcctttctaaattaaagatggtaggtggggagatggtcccctttccttgcttttgaaagcattactgctagtgatcacaaacactgcttctggaatcagacagatctgggtcaaaaactagctcacatttgatctgtgtgattttgtataaattatataatgctgtgcaattctctaaaaagctatctttttttttttttttagacagagtcttgctgtgtcacccaggctggagcacagtggtgccaccttggttcactgcaacctctgcctcccaggttcaagtgattcctctgcctcagcctcttgagtagctggaactacgggtgcgcgccatcatgcttggctaatttttgtatttttttttagtagagacggggtttcaccatattggccagctggtctcgaactcctgacctcatggtctgcccacctcggcctcccaaagtgctgggattacagatgtgagccatcgcgcctggcctatgtttttaaaataattaagcaaggccagacacagagactcacgcctgcaatcccaacattttgggaggcctaggtgggcggatcacttgagcccaggaatttgaaaccagcctgggcaacatggtgagactccgtctccacaaaaaaaaaaaaaaagccagatgtggtgctgcatgcctgtagtcccagttacacaggagggtgaggtgggaggatcccttgagcccaggaggttgagactgcagtgagctgtgatcatgccactgtaatccagcctgggcaacaggctgattcctggtctcaaaaataaaataaaataattaaacattccttcatgatcttatttccttttaataagatggaggtcacctttattctcataagatagtaactaacatttactgagcacttactacatgtccaacactgtgcaaaaatgtgaattatttcacctaaccattataaccactctgtaagttaggaactgttattaccccaatttgtaggtcaagaaattgagacaaagagggtttaaacaacttgcctgatgtcccacgtctctagagtctacattactctctgataaatagtacttattaccatagttgttactcataggtaatcagggattccattgggttattacacagtatgcaatacattcttgctctgaagtccccagtgtaaaggacagtcctgaaaattggtaccccctgccaaatgggtcttctgcaatgaaatattttaggacctctacgttttccacaaatgccccaggacaaatccttgtctttattcacttcaagaagccccgctatgtgtcttaaaaaaaaaaaaaaagagagagagagaggcgggcacgatggcccatgcctgtaattccagcactttgggaggctggggcaggtggatcacctgagggcaggagttcacgagcagcctggctaatatggtaaaaccccatttctactaaaaacacaaaaagttagccaggcatggtggcagatgcctgtaatcccagctactcgggaggctgaagcaggagaattgcttgaacccaggaggcagaggttgcagagagccaagattgtgcgattgcactccagcctgggcaacaagagtgaaactccgtctcaaaaaaagagagagagagagagagagagagagagccttggcaagctttgcctcctaaagttctcctagaatctccccagattcccacaggatatctctcacctgggactgtcagcatatctatcacctgggactgctaccacctctcatgttgtccctgcacccgcttcacccctgcctgccacttcatcctccacatggcaaccagcaccagcttttcacatgtgactgtagtcaagtcctgatgaccttcatcagacgttgatgtgtccctacagcggctctccccattgccctaacgatggacaccagcagaatctaacacatggtctcgtctgtctcagctcatgtctcactttccctcatctctggaatccaaccacaccaggttttcttcaacgttaaagcctccgttttaagtgtcacttacttgggaaagccttccttgatgtccctagactaagtcatgtcctcctgtcctgttctaccacagcaccaggtgtcctttcttcacagcacatgctgaagttgtaactactcatttgttaatgtgatgatgtattaatgtaatttccccacctcaccctccattgaactatcagctttatgagagcaggcacccaagttgataaagatggccttgccagtgtctacaagagtgtctggcacacactattcactcatgcatcatttgtggagggaataaaaggagaaagggagaaaagaaaggagggagtaaggacataaggtatagattcagctggagaggttagagacacaaacgaagctcaaatagagaaggttcaatacccaaataatagagaccaaggcaagtgacataggacttcaaaagggagattactgggtgtagaaacaagtaacaaagactccctggaggtagtagtgtgtggcctatcgttgaacaaggaagaggaagattcagatattcaggtggttggaattttaagtgctgggtcagaaaggcacatgtaggaactagcaggagggccgggtcccagccctcaactctttttaggagaattaagcaactcttttctcctttttcctctgcctgtcttacccctccttccttgccttttacagctaaagcctccgtagataatattctttttttttttcttgacccagaaccttgctctgttgcccaggctggggtacagtggtgggatcacagctcactgtagcctcagcttcccaggctcaagtgatccttctgcctcaacctcctgagtttctgggactagaggcatgcaccatcatccttggctatttaaaaaaaaaatttatagagacagggtctcactatattgcccaggctgttctcaaattcctgggctcaagcaatcctcctgcctcagcctccaaaagtgctgggattacaggcatgagccaccatgcctcgccatgcagataatattcttaaaactacccaggcatttttacttgtgacattgagcagtcatgggctctcttctcttcattcccatgtcattcagttgccttccagctgggcttctgctggcatttgaagttttttacagtctgttatccacacaacacctagaatgaaccttaaaattttaaatcagatactactttctaccttaaaaccctccatggctatttagggtatttaaataaattctcaactatgcccttcaagacccttcatcctgtggtcccagcctgccttctttatttcacttcacaccacactccctttatgtgcttctgtcacatctgccttcttcctgaaccataagcactccaagctcaaggtctcagcagggcctttgtacagggccaggactagggtgagacaagtgagacacacacataaaatggcactcattctcaggatgcaggatctttgcattagctgtttccactgtctcaaacaccccagatttttgcaggagggtttgtttgtttgcttgtttgtctgaaacatggtcttgctctgttacccaggctagaatgcagtggcggaatcttgggtcactgcaacctctgcctttcagactcaagcgatcctctcgactagctgggactacagaagtgcatcaccacgcctggctaattctgttgttgatttatttcccatctcttcaaagcacatagataccttagtatctgcatttatttgttaggtttatggatctgcttccctgtttaatttctgtctgtccatctaatggaagggcagttccatgagagcagagatcttgactgtcttcttcatcacagtatcaccatcatctaaaacagttctgggcactggttagttgtagtaggtgatcagtaaatatccggggaatgaatgaaggtcacataactcatgttgcattcagaaaagcatctgaaagctaaaaatgtgggccttgtctagccacacagagacaagaaagggcccaagcaaagtactttgcaattgagacatgcacagtttgcatctgttttaatggagtgtcatcatgaattgatctttgcctgtgtaatgtgaggttaatgttttatggagataaccgttgtattgatattttcttttctcacaataaaattagatttgattcctactgttcagggactggtacacccattcatcagtttctgcagtagaaatagcccacagagaaatactataaacacgagagtttagattctgactcagtctgaaagaaagcagaagagctcagtttcaggctgggcacagtggcttatgcctgtaatcctcgcactttgggaggccaaggcgggcggattacctgaactcaggagtttgagacaagcctagccaacatggcgaaaccctatctctactaaaaatacaaaaaattagccaggcgtggtggcatatgcctgtaatctcagctacttgaaaggctgaagcaggagaattgcttgaacccaggaggcagaggttgcagtaggctgagatcgcaccactgcactccagcctgggcgacacagcaaggtgctgtcacaaaacagaaaaaaaggaaaagaagaagagctcagtttcttgaactacaagctccatgtaaaacaagacatgtaaatatcaaacgtggaaatcgtgtctacaaaaaactattttaaagctcttcgcaaatgttcatggaccaaatagtaaatcctcattccaccctcattttcttaacgaactaataatacattcctcccattcatcagtgaattatgaggcctactggaaaaagtagaccttccaggacataattttcatccagaggtcagtttgggtttggcttcatgacactcagaggcctcactaaaagtgatcctaaggagaaaacaggtctgtaatgccttcccatgcatataaaagtccccttttggatcaacagtcttctcagttccttgaaattcagtaaaagttttctgtattttaataaaataagagctagatacaggttcttatgtcttatgttgccatataattcctattaacctaaagttatttgtaagtaggcttctcattatatttttccttttctgatatttaaaaagtcacagaaattataactgtttgttataaaaattcaactatagggatttttccccccaaacttcatatattttgccatatctttattatgattattattggtttgtttgtttttattgactctgtatcaaggaaacgtttctgtgttggtacatttcaatttattcatttgttccgcaaacattttgtaaatagctgctctgtgccaggcaccacgctagatgtgaggaacgcagtggtaagtaatggaggcaggtgtcttaggttggtgcacaagtaactgaggtttttaattgaggtcaattacttgtgcaccaccctaatagcttgcattctaggggatgggacagacagcaagcaagtgtataactgcatagggcagatagagaatgtggtaggttctatggcaagaccaggcagccactctggctgaactgggaggtggggtggtcagagaaggaatttatagctaaactgaagtttgaggaaataactagttaaatgaagaaatgggaaagagcattctgggcagagggaacggcaagtacaaagaccctgaggaaggaaaaagcttggcttgcgtgaggaacagagatttgaacatgcagagttcaagagaggggcacaagacgaggggcagaagccaaactctgcaggcccttgtggatcatggcaaggagtttggatttgattccaactcccatgaaaagtttccaaggttgaagcagtgggtgtgagtccctccatctagaagtgaactgacagctatggggtcagcagattatacaatggccaagaatagaagccaggaagctgggtacagtctcctgcagtggtctcctgggccattgtgtagtgtcccatcctacgagttgttcttcagttgtcttatgtttttttatttatttatttatttattttatttttttatttttgagacggagtctcactctgtcacccaggctggagtgcagtggcacagtctcggctcactgcaacctccgcagtggtcttatgttttaacttttttgtggcatccttcttcctgggggtactttgtccagaatcatctcactccatgttttgatgggaaagtgcctggtgtataacctgcgtcaggatcaacactgagctcagatagacagtagcagcaaagactgaaaccaaattagaattgagttaaatcagctttgattaatctcaagacagagcaaggaatattctgatcctcatattgtcaaaaaaaattaatgaaccaagtacattcagaatgttttctataatttggtctgaagacatcaatttactatctgtgtcagcactggtcttttccctcatgcagatgtatcttttgcagagttataatcataatgcatgacaattttatattctacttttctatctattctttcatataaatgtatttccatatatctacaatgcctccaaagtaatcatttttcatatatatgattttttaatggttgagtcagttcattgcaagaacatgcttatctattttatatacgtggaggaataggtgaacttatctgttagctatggttcaacattcaggttgtttccaggtataatgaaaacaccaaaaaaaagcagtatacataatatagggctgtctcatttttaaaatcagcttcttaggatagagtgccccaaataggataattgtgtcacaggataagaacattttctggtcttgatcatttattgctacatcatcttccaaagagattgaagaagcagtgtgtgggccaccaaaagcggcaccatgtttgttttcagaaccattagagaagattatgtttctaaaaaggaactaatagaaacaaaagaatctcactgttgtgattttcaagtactccattttgaatgttttagtgagagagaggggaaaatacgtgatcttttatacataggtgagatggtttggtttaaagtcagtgtcacatgtatgtagatgaacccaccacctgcatagttggatttaaggggtgccaaaaggtctcctactctgcaaaacctgaatgcccgaactgactgtcacagagtaggggtggtctgaaaggttcccatgaatgagctctttgggttaggtcatgaaacaccttatcaaggagcaaatgaaatacaagaaggtgtcacaggagccacttttgactgttccgtagaagttagttttaattttagacagggcctatgacactgaaattctcaggctgtaattccagaaaagcggatgaggtgagcaaggaacaacagggcagcctaatagaaaagagatttggacccgggtcaccgggctaattctttactctctctgggatttagctttcttgtccataaaatcaaaggattcagctgatcaatgctttttcaaaatttaaaaaacattttaatataaaattatacaagccatcaccatccccacatataaaacagagagaagtggaagttctctgcttgaagcagggcagggaaactgcccagaaccctatgccccttggcctgtcccttactttcagggatcaacaagttatcttccaactctgtgacccttccccctggggtgtaaattgaatagtagaaatgaaaagacaaagccagtttagaaagtcaccttgaaacctcattgtcctcatctctaacattataaagttggactgaatgatttctaaagactcttccagttcaaaaacatggaaacttggctcacatttgtaataccaacactttgagaggttggcattacaggatctcttgacggcacgagtttgagaccagcctgggtaacatagtgagatcccatctccacaaaaacaaaaaataaaaaaattagctgggcatggttgtgcacacctatagtccagctatttgggaagctgagggaagaggattgcttaagcccaggagtttaaggttgcagtgagctatgattgcaccactgcactccagcctgggctacagagcgagaccctatctctctttgtttttaagtggaaattgtgtatctctgccaattatatcaggaattcacaaaaagtgatggagattagccaaacatggaaatctttccaggaagtaatacctttagggtgattaataactgtgtggctcatgagaaagcatgttgtcaaaatacaagcatgaccccaagaacgcaccctaaaaatgaagtcagacatttcatgtgtaaccaatacaaaatctgaaataataacagccaatatttaatgagttctcgctgtgtttcatagcatcaaggttaagtgttttatatgtcttatatcataaatattcacaataaccacattcattatgttatcctattgttatccccatgtcatttatgagaaggctgaggtttatagaaactaagtatctctatctaggttacacatataggacgaatattaaaagttggattaaatgttcttcaatggacattttcagatctaagcttgtttgggtctgataagtcttttaatagaagctgaaaaggcagagttggggcaaggatttgttggtgagtttctaacataatccaatagaggtgttgagtcgggaccagcaggcttgctccagattgcccagcagacttacccgaaagacagcagaaacatcatcaacagcaacaattttttttaaaaaaccacaatagttagcatcactacaagaagaggactgaacactttgttaagtattttctcatttcctccttacaattctttgaacaagataaaagtaaaattttgttttggtgaggaagcaatggagctacgaggacggtaagtaatttacccaaggaagcaaagtgaaaagtgtaaaggcaacagcatgccttaggacataaggattccctatactttgctcctacatacattagtgtgacctgtcctgatatctctgtggttacccaagtagaattacattttgcaagaaggtaattctacttaccttcacgactgcgagcatctcagccagtttctcgctgcgagtttgtgaattcgccagtctttggtgactttgcagagtgtgtttccattcacctgaactctatgggctgacaaacatgagttcctggacttgtaaacctgaggatctgttcctggggtggcctctgacaaggaaagatgctgtatccgcctcagcactatttaattttccagattaacaactaatagcagcattagccacttattgagccttttctgggaataacattctgggaaagctatatccaaagtggtaatacaaggagtaccaggaggaaagtattagcctagcgaagtgacccagaaagggagtttgagggagctaataccaaacctcacccttttccacaatccatgctgaggccatttccatgacaatgatccaatttggtgtttcccaaagtggggtactatcaggagcacacaagatggcacatggacaaatctggttttaacatgtctttaatagttatgtatctactataatttatgttagaaataagtgttttaaaatttatggtggtaatttaaagtttcctcctagaataaatttgtttatgtggaaaaaataagtcaattgaaagaatactattgagcagacaatactatttgagggaactagggtatggtagaaattgccaagctaagttggaaactgaagcctgggagcactgaatccttgggataacaacatgaatcataattcattataatttgcttttaagtagttccaagagtgaaatgtaataacctccactggacatttggagacgcagaggtgatccacagagtccagggcacttgaagatattgggttgctgcaaaagtaattgtggtttttgccattaatagatataagcacagaggagcagggaagatggtcaaaagagatcccaggcccccacgttctgccagagcacagtgagcaaatgagcctcctgccacaaactgaacccacatttctctcaatccaagaaaaggctgttctaattccaaacaagctcattgtaaacctcaataacatgaagttagtattgttcacgttgctttccaactgtgtttcagatttatataactggttcctaacacataattaactgctgttggaatgaatctttgtccccttgcctccgtgcctgctggacttcatatctgtgtattaatagtcacttttgtttggcgatcttgtgaaaaatgcagactaatttttaatccttaaagagataatacattcacataattttatttttattttttcagataatggcctttcgccatgtggcacatttcaataattttaaaaaaacagttgcaaaatgttatgcagtaacaaatctcccatctttgtcccaagtcacattgctgtcctacatcacagcaaccacgatagttaatttcttataagttcttccaataatactttatacatatacttgtaatactaataaacattcttcttttcttcctttttaaatagtagtaacatactctgcacacacttcttaacttttcttttagttggttaacaatgtatcctggagattgatccacactgatacacaaagatattcttcattctgtttatggttgcataatacttcattgtatgcatgaaaaatttcttttaatgaaggttggtctgtttccagtttttgttattatgcacaatgagaaatgaacagccttgtagatgtgtcattttccataaatacttttataacagtggttctcaaccaaaggtgattttgcccaccaggggacatttgacaaaacctggggaaatttttggttgttataagtggggaggagggtgccaccaacatctagtgggtagaagctgagggtgctgctaaatatcctacaattcacaggacagactcacaacaaaaaattattcagcccaaaatgtcaataatgctgaggctgagaagctccagtctgtagaaaacatttctagaagtggaattgctgagtcaaaggatatttgcatctgttattttgttgactatgagcaaattactctctacagaagttgtaccagtgaacattccccagggccacatgtgagaagcatgttttctcaaaacctcacaaacaccattatcttatgttttgatctttgctaatctgataggggtttaaaaaatagtacttaagtataatttatttgcatttctgttgttatagtgacattaagcatctttccatatgcttaaatatattccttttgttcattttcctataagtttattagtattttatttaatttgtaggagctctttaactaccagctaaacactttgggcagactagttttaacctacattttcattgtcaagagatttttatccacctgccaatttttctggaaatcttattccaaatcatttccattaaaagttttgtcatagggttcacaataatcactttctgctgcatacttggttttacttgctgttccttcaatcaattaacagatattaattgaacatcgcctcagtgcaagcagttatttcctgaaatgcaatgaagtttttatgcacttatgtattttggctactggtccttcagtgcttaaaaagaagacacaaaaaatacgttctttcaaactcatttaacatttcatatttcttattctgggaggaaggtctttgaaggaacattcacagctcagagatactgacagaaacaatacagaggatgccttgagaatctactttatgcttggaaaatatcacttagttcttgctcctaatttccacataagtccttttctctctgctcccttttgtaagaaaatctaaacacacatgttttcaacatgctaggatcatgttaccttgatctagtaagaatggggcttggacattattcctgagttatcatttcacttataagataaatatacccatataaaagcacactgaattactttattagaatctatgaagaaaaaggctatccctcaagaagaacatgagagagactgtcatgtacttgaacccccatggatacagatgagcaggtggcaggtgctctctagctgctgctcactgctaatggggttatgcggtttcaagggcgtgcatcatttcgcacacccagcatttgatgcataccccttattcctctcccataatcatctaagttgacactgtgatgtttttgaaacttctaactgtattaaaatattattttcatttctctgcttttcctcctgcttcacactctctgtaaaaacttcaaatatcataagaatatataactttgtgaaattctgccacagtggaacctacaacaaagaaccagtgttagcagcttggaatgtttttcttcttgtattatttctttggatattgcatatactaatacataatctcttcttccaaaaatgggatgatgctccatctgttgctttaaatctgctctttaacacttggtatatacttttgtccctctgtatagatgaactttattatctgttaatggttacagagtagtcattatgtatgatgacgaatttaaccatacacagatggatgtttaaccataactaatttaaccatttgtctattgatggatatttaagtttttccagtttattttagtgtaataaataatgcttctgtgaaaatcctttttattacatctttatatattttgaacaaatgtttccatagaataaatcagatcagggaaatgtatttattcattttagttaactgtttttaatattataaaagaaatacacattcatggcaaaatattcaaagagtacagaaggatacaaggtaaaaagaaaagctccttgggaggccaaggcgggtggattgcttgagaccaggagttcaaggccaatctggacaacagagcaagactctatctcttaagaaaaaaaaaaaaaggaaagaaagaaagctctcttcacactccctactcccaacccccaggaccacccacacaggtatctgctcttcatagtttcttatgagaaaacacattttaatagatgatcctaaattgccctctgaaaactgtatgtaagaataattctttttcttttcttttctttccttctttgttcctttccttctttccttttgaaaagtctcacttttttcatttgggtggccagggtgttactattttcaaatggcaggttttaaaggaagtgaaattgttttcctcatagcacatccagccacatggtaacccacagtgcgaaatgctgaggtggagaaagccagccaacggtgggccagtgatgagtaagaggtcttatggaaaagaagagagaaacgaaggcaggtgtgggatggatcagtttcctggctttaaggtggtccagggagccttgaaattaatggtcttagctccagactttcccagagctttagaatagagggaggttaggtctagctgaagatgggctggggagggaggaactaggaacagctcattgcaaattgctctggtgttttacaagatgctaatttttccatagagacagtaatgagcatatcttttttgttttgttttatcttgttttgtttgagacagtgtctcactctatcacccagagtgcagggacatgataatgactcactgcaacctcaaccccccaggctcaactgatcctcctgcctcagcctcctgagtggctggtactacgggcatgtgccaccacacctggctaacttttaaaatttttttgtagagacagggcctcactatgttacccagactgttgttgaactcctggcctcaggcgaccctccttctttggcctcccaaagtgttgggattataggcatgagccattgctactagcatttgctagtaggtttatgtaattttaaaaaattctcttaattaacttaatgattcagagactattcttatgtcgcttttgaaaaatgaggcaactgagaggttgagacacttgcctcaggttgcacagctgataaggaatgaggttaggatgcaaacctgagtctgccctacttgaaagctccagttctcccctactctgccttaccagaggagaaagctgaaaactgctatttttttagaaacgtggagatgtccttttcccatgggtagcagacacataacttctcatcgacacatttgctgggctagtccagcagcaaaagagccaatgttgttggagcaaagaggagtggctattctgaggaaccagggagtgtgttccacctttgcaatccagcataagcattgctcagtcaaatgggacagaaacaaagctctgcgagtccatggcttggtgaaatgggtcacacaattgattttccagcactgagttcagggaatgatagtcttctgtggaaagtcccagcaagtgctaagccaggaagcatagtagttaggttatcaggctctggagtcatagagtggagcttgtacgctgctcttctacgtattaagagggttggcctctgtgaacttcaattttctcatctataaaatggggagataatatgttgtaggatcgtgatgaaacaggatggaatgttgaatgcctggaatatagaaaatgttcaaaaatagtatcattttcatgttttttcctgcttctctctttgaaacttataatccaagctctatttcataaaaatattaacataaaaagccgccctgccccctcatctatctatcaagcaatgcacatttatgggaaacctgatgctgacccatttgtaaacaacctgtttctgggttggggttttgtacatagcagagcagctccttctctgtgagatctattgaaagtcagcccttaatacaagggtttgttaaaaaagagaaaaagaaaaagaaggaaagaaagagagaaaggaaagaagaaaggaaaggaaaggggaaaagagagagagaaatagtaacataaaaagaaaaaagatataaaagctgattgcacaagcttacccttgtgaagatttgtaagcatcagcatcttgaattgtgtctgacacgtgtcagatgcttgggatgaaacatcagactatgaggatggcatatctttgaacgtggccaagaaaagagacaagggtaagcaaggtcctgtgactttcgccccaagtaatgcagacagaataacaagtaagaatgagagcaggttgtacttggcctctccctttctctggtggcttttgtgtggtttccttggaaagttttaccctggcatttttcagaaatagcacagttgtttgggatgattataggcaatcaccctttcccagagactgaactgtgtcgggctcattgaccagccaccccccggggaccaactagggaggacatagctggtcctgctgtttaccaagtattggatcttgtgagatgccagaagaaccaacctcagggtctttggaaagactgaccaaccagtcaggatggattgtggtggtggatcccaagcactcatttgggaatgagagtgacgttgacggtggaacatgaaatccatcccaacagaagagcaagcctgagagcaagctcatctgacagcctgttaaggcacaggcacaaaggaggccatgtgagttggtaggagaactcctccttggaaatcttggagtctcgctgtccactaaggtaaccactagcacctgaagtctactggcataggggtctactgagcacctgaagtatggcaagtgcaaattgagatatgcacaaaatatacaatttcaaagacttaagtacaaaaaaaactcattaatttttgtgtggataacaatttttttaatatactacaaccaagtaagattttattttcacaaatgcaatgttggctcactatcctaaagtcaattaagataatatacaatattacttgaataaatgtcaaaaaagaacatttcaataaacaaagaaaaatatttgacaaatccaacactctttgtgataaaacccccagtacactaatagaaaaaaaattttgagtcttgcaaaaagtcatctatgaaaacctacaactaacattatacttaatggtgaaagactgagtgctttatctgtaagtctgggaacaagacataaatttccacttttttttttttttttttttatggagtcttgctctgtcacccaggctggagtacagtggcatgatcttggctcactgcaacctccacctcctgggttcaagggattctcctgcctcagcctcccgagcagctgggattacagatgcgtaccaccatgcctggctaatttttgtattttcttagagacaaaattttaccatgttggctaggctggtctcaaactcctgacctcaagtaatccacctgcctcaacctcccaaagtgctgggattacaggcatgagccactgtgcctggccaatttccacttttaacactctattcgacactgttctgcaagtactagccagataaattacactataaagtgaaatgaaattctccagattgagaaaaaaaagtagaactctttttcattgcacaccacataattttccacaaaaaaaaaaaaaaaaaaattgtaaggaacttcctaaaaacccactaggactattaaacaaattcatccatgtcaaaagatacaagatcaacatacaaattaatttttttaacttttattttaggttcagaggtacatgtgcaggttttcatataggtaaattgcatgttgcaggggtttggtgtacagattatttcatcacccaggtaataagcatagtacccagtaggtagattttcaattcccaccctccaccctcgagtaggtgccggtatctgtggtgcccttctttatacccatatgtgctcactttttagcccccacttacgagaacatgcagcatttggtttttagttcctgtgttagttcacttgggctaatggcctccaactctacccatgtcgctgcaaaggacacaatctcatacttttctatggctgcataattctccatggtgtatgtttaccacattttcttttcttttcttttctttttgagacagagtcttactctgtcacccaggctggaatgcagtggcacgatctcagctcactgaaacctctgcctcccgagttcaagcaattcttgtgcctcagccacccaagtgcctgagattacaggtgtgcaccatcatgcccagctaatttttatatttttagtagagatggggtttcaccatgttgcccaggctagtctcgaactcctggcctcaagtgatctgctgccttggactcccaaaatgctgggattacagatgtgagccaccacgcctggcctcacattttctttattcattcttttgttaatgggcatttaggttaattctatatctttgctattgtgattagtgctgtgatgaacatatgtgtatatgcgtctttatggtagaatagtgtatattcctctgggtatatacccaagaatgggattgctgggtcaaatggtaattctgttttaagttctgtcagaaatcacctaacaatttgaaatgataatattttagatattgggttaaacaaaatttattgttaaaattattacttgttatgttttgcatttttgaatgtgcctactggaaaaacttttaagttacatatatggctcatgttacatttctattggacactatcactttagaacttcacatagaatttttatccctgttcacaattccagttaatatttgcctccactgtctgccctcatcacaatgctgctaggctgttaacaagccagacttacccagtatttttctaccccaggattttgccctggctgcttgctctacctgggatgctcactcccctagaccttctcccagatggctcctgttcgactttttggtctcttcttagatgccctttctctctccagagaggtctgccttggccacagtttggtcacatcaactgttctattctctttccagcacttctttgttttgtctgccttcccaagtatactacgggctctgtgagagtctatcatgttcatcagttcatttcctgaactcagaatagcacctcactcatagctggccctccataaatatttcctgaatggctaaatgtactagccttaaatctgtttaagattgtttaaactgtgttccaacctgacaccctttgttttgagctaattaagctccactgagggccagccactgctgggcactgggtatatgggaagatgccctggtctctgaccttagggagctcaggacctagtaggttccaaagacaaaaatgtcagcaaatggagttgtcatatcacatgccatgagcctgttgtttttatttcactatgcatgccctaaagaaagaacccaacagaggtcaaaacacagcaacctcaagctcgtgcaccctgtttaccagtagctgcagacagttcttgaaaaggcagctccgctgtgctctactatttgtgaaaaaacaggttaaccattccaaagaactgtgattatgggcaggaccagagcttgcatttctaacagtaaatgagaagatagtttgagcccaaagggcacgtttgcagaggcttttgcgggaagacaaacctcctaatttagcattagactacaaaagcaagttctagactgatatgtagagcaagacactcattttcctttatatataccctataaaagtgcagggaaaagacaaatatactccaaatgattaactttggctacctcagggttatggggaagggtgggataataacacactataaatattttcttcacatgcctctgtagtattttgttttgtttgtttgcttgtttgaaacggtgtcctgctctgtcacccaggctggggtcgacggcaccatcactatcacagctcactgcagcctgaaacatatgggcccaagtgattctcccacttcaccctcccaagtagctgggactacaggtgcacaccatgaggcttggctaatttatgtaattttttgcattgtctcactatgttgcccaggctgctctcgaattcttgggctcaaatgacctcctacctcagcctctcaaagatctgggattggctgggcatgttggctcatgcctgtaatcccagcactttgggaggctgaggcgggcagattgcctgagctcaggagttccaagccaccctgggcaacatggtgaaaccccatctctactaaaatacaaaaaaaattggggaccagcgcagtgactcacgcctataatcccagcactttgggaggttgaggtgggtggaccacagggtcaggagatggagaccatcctggctatcacggtgaaaccccctctttactaaaaatacaaaaaattagctgggcgtggtggcacatgcctgtagtcccagctactcaggaggctgaggcaggagaatcgcttgaacccaggaggtggaggttgcggtgagccgagatcacaccactgcactccagcctgggcgacagagcaagactccatctcaaaaaaacaaaaaagagaaaaaaaaaagatctgggattacaggcattagccaccatactgagcctctacagtgttttcatttgtcacaaaaaacataaatagattttgtactttcaataatggataaagttgtttttacttaaaaaactaaaaaccagacaccacaaagctttcctgtatttgatagggtctgcttctcgcatcttgaattttttttatctcagttctgttcctcagctactaaatcaaagatcagcttccgggctgaggacccaaaaacaggaagtaaagactgaattcactttgggagaatttgatgatgtaatgggtccctggatatcaaccaagcacgctcatatatcacaaatctcttgcgatagttaaggcttccttaacttctttaattgggaaggtaccctttattgagggcatctgttataagccagttaatttgttgacatcatcctattttattccccaatcaactctcaaaaggtaggtattatccccacttatcagatgtaaaaaccagggttctgggaagtttaatgaattgcccaaagtcacagagctcttatagtaagaggcagagacctactttaaacatagctttcccaaacgtgtgctcatttcaccatcatttgctacctccttaaaaaaataaggtagaatggggtttgggccacaatcctgaacaccataatcccaaatattgaaatacaaaatgtaaaaatacccaaaaatataattctggaaaaaataattttaaaaacttttttaaaagacatttgtttacattttaaagtggatttatttgagaaacatatgaagacatgacgaaatgcttcataggccaccttgtgcaataaaataggcaataataatatacatatttttgcaaacataaacacccaagtatactaaggacagtcacatgggtataacagttatgagcagacaaactatattcctaaagaaatagctggtattcaaggggaacgccttcagctttcgcccattcagtatgatgttggctgtagtttgtcatagatggctcttattattttgacgtatgttcctttaatatctagtttattgatagtttttaacatgaagcaatgttgaattttattgaaagccttttctgcatctattgagataatcgtgatttctgcctttagttctatttacgtgatgaattacatttattgatttgcatatgttgaaccaaccttgcatccctaaagcctacttgatcatgtaaaaaaggattagccttttttttttttttttttttgagtcagtattgctctgtcacctatgctggagtgcagtgtcatgatcttggctcactgcaacttctgtccacctcagcctcccgagaagctgggactacaggtgtgcaccaccatatccagttaatttttgtaattttttgtagaaacagagtttcaccacgtttcccaggctggtctcgaacccctgggctcaagtgatccaccctcctcagcctcccaaagtgctaggattacaggcatgagccaccacgcctggctggattagcttttcgatgtgctgctggatttggtttgcaagtattttcttgagaatttttgcttcgatgttcatcaatattggcctgaagttttcttttttgttgtatctctgccaggttttggtatcaggatgatgctggcctcatagaataagttgtgggggagacgctcctcctcaatttcttggaatggtttcagtaggaattacattggctcttctttgtacatctggtagaattcggctgtgaatccatctggtcccaggctttttttgggtggtaggctatttattactgattcaatttgggagtttgttatggatttgttcagggaattaatttcctcctggttcagtcttgggagggtgtatgttgtccaggaatggattcatttttctaggttttctaatatgtgtgcatagaggtgttcatagtagtctctgattatttgtatttctgtggggttagtggtaacatcctctttgtcatttctagttgtgtttaattggatcttccttcttttcttctttatgagtatagctagtggcctatctatcctattaattttttcaaaaaaccaacccttggattcattgatcttttgaataattttttgtgtctcaatctcctttggttcagctctgattttggttatttcttttcctgtatcttaattacagagattatgacacaaatgtatacatttgtcaaaactcactgaaatgtacattggtaaattttattatatgtaaattatactttaataaagctgatttttaaaacaaaaaaactaatatgcaatatatttcacctttaaatttttttaaaaaagaaacagcttatataaccatggtcatctgaaatgctatgatagacaacctaagtcttttaatgagattaatcaaaaacagcagaagaaaattctgtcccaactctcagagacagactaatttgccttcagtatttgttctcttagggtccctggctgattcaatggtgtccaccaacactgagggcagatctcccccacctcgcccattctgatacacatactagtctactctggaaacaccctcacagacacaccccaaaataatgctttatcacgtatctagatacgtctctttttttttttttttttttttttttttgagtcttgctctgtcgccctggagtgcaatggtgcggtctccactcactgcaagctccgcctcccggattcacgccattctcctgcctcagcctccagagtagctgggattataggcgcccgccaccacacctggctaatttttgtatttttagtagaggtggggtttcaccatgttgggcaggctgtctcgaactcctgatctcaggtgatcttcccgtgtcggcctcccaaagggctaggattacaggcgtgagccaccatgtccagccttagatactccttaatccagtcaatttgacacctaaaattaagtctacaagtccatcccttgtctatttggcacccatacatatcttaaaccacacgtaatttccaaatgaagacaataacaaagtaatagttctgcctaacaagatgcaactaacataatgaggctatcctgtgtacaacagaaaattcactaatcgtgatttttgagattttagatgttaaggacttagacttcagggatttttatcattcaggatttcagcattcaggactatgacattcagaatcgtgtcttttgggattgattggtagtgggtataatgacgtattttgcaactggttccatagctgaattccatagctgaattctcaatggcagctcaattctaggtacctgtgagaggcttcttccatccagaagcactttcctaactatctttccttggagcctgatagaccaccaatggaatttgttccattggctaaagcatcaaatcccctgagatccattctccaagcacaaggatccttagaaataggtaacatgtaacatcattataaatcacaaataccatcatgtgaattagttatcagggaaatacagctagcaagtttccaaggaaatgagacacaggcccagtagtatttgatggggaggttggggaggacatggagaagggatagttatagatcagagtcaggaatgtcctttgggagtgtcattgtgggactgcggataattaaaggacatggagaagccagaggcagaaaaaaaaaggtgccactaagggtatgcaccacaatccaggtcgggtccgagctcaattactatgctaatatggtcatggatagacacagagaagagaaaattgtcatatgtgtgtccatggatttctctacgcatctcagctacaagttctgccaatgctgccatttgtcacaagggcagtggggtacatgaccccgtgtctcactgagtggaaacctgtcaccaagaagaagactctaaaggcatgtgtccccaggagtctgctcagagtgtttatcccacacttagggccaggaggcagttttggatatttggtttggagggttggaataggtttaaaaagccaatggatcttatctagcagtagatttctggagcaatctggacaaaaatattgtcttctttcttacatgaatgggatgttcttctctccccacagaagaagcgcacgctgaaggggtccattgagctctcccgaatcaaatgtgttgagattgtgaaaagtgacatcagcatcccatgccactataaatacccgtttcaggtaagtccatcaggtgggtagttccccattccctggactgtggttaaaatcttcagtcacagccgggtgcagtggttcaagcctgtaatcctagcactttgggaggttgaggcaggcagatcacgaggtcaggagttcaagaccagcctggccaacatgaaaccccatctctactaaaaatacaaaaaattagctgggcgtactggcgggcgcctgttatcccagctactcgggaggctgagacaggagaattgtttgaacccaggaggcagagttttcagtgagccaagatcgtgccattcactccagcccaggcaacagagtgagactccgtcaaaaaaaaaaaaaaaaaatcctcagtcactgtgagagagggtggacacggatgactctctgcctctctgctccaaggttaggacttagacaaatcccattaggaaacgtatgtgttccttccatcagtgacatttatttgttaattctttcacttattgaacaaaaattaagcacaaaatcttgaaaaggtggttattccttatacccctttccctcatgtcttctcttcctcaaggaaagtcctaattagtgaaggaagaaataaagctgctatcaggggcccgaaacctaatgtgctttaagtgcagtttactcatgatttgaggcaacatattgcaattgctgggtatgaattgcttggagattctgaggcaaaaagattcagattttataatctgaggactatctggaatcgcactgtctagtacagtagccactagccacacatggatgttcacatttaaatgtattaaatgatattaaaaattcagcttcttagtcacattgggcacatttcacatgttcaatagcaggacatggctggcagctactgtactgaaacagcactggttatagaatgttcctatcactgcagaaatttttttttttttttttgagacagagtctcactctgtcacccaggctggagtgcagtggcgcaatcccggctcactgcaacctccacctccctggttcaagtgattctcctgcctcagcctactgaatagctgggactacgggcgtgtgccaccactcccggctaatttttgtatttttagtagagatggggtttcaccatgttggtcagactagtctcaaactcctgacctcgtgatcgacccgcctcggcctcccaaagttctactgaacagagctggtggagggtatctttaaagtccttgtatatgaatcttggcacttctggcttcaaaggcatggatatctccttgcacatcccagggtaccattcctgcttgccaacctgagggatgaacatatttttaacacggcatagaaaagaactttttttctactagaaaagtgaccctcatgagttggaattttgaggactgaaaataaaaggaatagcatgtatttttcagttgttcaaaatctcaatgataatgagtgcctaaaagagaggtgaaatataaagaagactgcagtttagttaacagtattgtaccaatgacaatctcttggtttttttttttttttaatttttttttattatactttaagttttagggtacatgtgcacattgtgcaggttagttacatatgtatacatgtgccgtgctggtgcgctgcacccactaactcgtcatctagcattgggtatatctcccaatgctatccctcccccctccccccaccccaccacagtccccagagtgtgatattccccttcctgtgtccatgtgatctcattgttcaattcccacctatgagtgagttttgaaagatgtgttgtggttacgtaagatgtcatcagtggagaaaagtaggtgaaaagtacacaggaactctgtactatttctggaacttcttgtgagtcttaaactatttcaaaataagaagttttcaaaactctcattgcacatttgtcatataatatctttctcttccatgtgccagaaatatttttttaatcactaaaaacttaagatgagaaataaatgtggtttctagtcaagaggagaactttctcctgctgtcttagtttagtgattgctctcttggggcatggaatctgagacgagcagctgaaactgcttaccctgtgtttttgtagcacccaaacacctggataaaaaggatactggccccctaattacccaaatgtttgcctatatgacgataaacacccgagaccccactctcggctcagtaggtctgctgtcagtcaactatctccatgcacgctgctcaccttgaactctgtgtgtgtgtctccaggtggtgcatgacaactacctcctatatgtgtttgctccagatcgtgagagccggcagcgctgggtgctggcccttaaagaaggtaattaaactcctttgccattgaatcactgacactcttgatcctatagtagggttgggttccacaatagaatagagtgtggtgtgagagcagctgatggctgatttctcttttggggttggtggaagttcccaagttttcatcctgggcccaggaagcaataactggtatcattcagggattgaccaaatccagcctgctgtctgttcttgtcaggctctgagcaatatttgtatataactcatttcaaatagtttaataagtacctacataagatgcttgattttgtctcatggtcagtaaaacctaaaatatttactgtctggccttttaagaacaaatttgccaactcctcgtatagtatgaagaagcagagcataggccctcatgtgagatgacctgggtttaaatcccagtctgtcacttgctatgtacacttgggcgagttccttaattgcctgtgcttcagtttcccatctgtttaaaaggaagaaaaggaagggataacagcacctgcctttggagctgatgtgagcaaagtcctagaaactaggttggcccatagacagcatgcaataaatatcagctagctttcaagcttttcagaccattggtaagggtatttcttaagccttaccttcctgatggcacagttagaggcagcagtgtttaagcacatgggatgtggagccaggcatgaaggtgaaaatcccagctctgccaatgattagcatgtgaccctgggtaagttccttgaccttcgtgtgtctctataaattttgactaaaaacagtcatggagctgttgtgagaattgaatgattgaggacttagaaaaatacccatcccaaagaaagccctggatcaatgttaccattattgttctttagcctgaagcactggatgtgtcagaagatctgggttcaaatactaatctgcctctacgaagctgtgaggaccaaggataagcaaactatttgttatctctggagctgcaattcctctatctgaaaaaaatgagaatagaaatacaagttgtatcttatcccgaggttgttgtgagccttaaatcggttatgagcagacaagtgctgggtgaatggggaagtgctctccgttcttacagtcttgggacatacagcaaacacaaaagtaagaagtaatcaaaatgggctgggcgcagtggctgacacttgtaatcccagcactttgggcagccaaggtgggaggatcacttgagctcaggagttcaaggctacagtgagccatgctcatgccactgcacttcagcctgagcaacatagtgagatctcatctctactaaaaataaaaacattaggcaggcatggtggcacatgcctgtgctcccagctacccgggaggctgaggtgggagaatcacctgagcctgggaggtcaaggctgcagtgagccaagtgagccgagcctgggtcacagagcaagaccctgttcttaccccaccaaaaaaaaaagaagaaaaaaaaggaatcaaaagggccccagctatggtcattggccatttgccctctgtgaagggattttatacacagggtgttaaaactggaaggaatattagagattagatatctagttctgtggttggttcatttatttatttattcattgagacagtgtattagtccattttcacactgctataaagatatgcccgagagtgggtaatgtataatgaaaagaggtttaattgactcacagttccgtatggctgggaggcctcaggaaacttacaatcatggtggaaggtgaaggggaggcaatcaccttattcacaaggtggcaggagagagaatgacagaaggaggaacttgccaaatacttataaaaccatcaggtctcatgagaactcacgtattatcacaagaacagcatgggggaaaatatccccgtgatccaattaccaccacctggtctctccctcaacacgcaggaatcatggagattacaattcaagatgagatttgggtggggacacagagccaaacgatatcagacagggtctcactctgttacccaggctggagtgcagtagcacaagcatggctcactgcagcctcgacctattgggctcaagtgatcctcccacttcagcctcctgagtagctgggactacaggtgcatgacaccatgcccagctaacttttttctttttttttggtagaaaaggggtctcgctatgttgcctaggctaatctagaactcctggactcaagtgatcctcttgcctcggcctacgaaagtactgggattacaagcatgagccactacacccaactctgttctgtgccttatgtatgtatttgtttcagtagcagaccccccttttttttccaaccaaaatcttacttcaaagccacaaacctagaagggagaaaaccaaagtggctgtggttaaaggtaggagaggtggggggtggtaattccaccttctcaaccttctcattacccttaaggcacctttgtagagcccagtgtttaacaatctcattgcatagtgggggaaactgaggctcagataagggtttgcccaacttaagaacacataactaatgcaaggcagagccagacgcaagcctagatgtgctgatgcctaaatgtaacatgaactaccccagtaaatagcacagtgcatttatgcgctcagatcaacccatgcttctgagtggtctgggcaatactcattcaggctcactcagccaggtctaatctcgaggtgttataaaattggtagcccttgatagactgacctggaaataactcttctgttggtgccaacctgtttcagaaacgaggaataataacagtttggtgcctaaatatcatcctaatttctggatggatgggaagtggaggtgctgttctcagctggagaagcttgcaacaggctgtgcccaatatgatccaaccaagaatggtaagagactgggaattccctctagtttttgtgaaatgaccataaaaaagtaaaagcttttggcctttaatcattgagggtgtcaggaacagaatgcaaaattctacattttcagaattttccaagaggaatcatctgtctttcctaccagcctgttggtgcttccatctcaaagctgatgtctacagctcctaaccacttgaagtgtgctctttggaccagcagcatcaacatctcctaggagttagttagaaatgcaaatgatctggccccactcatgacctactagatcagaattttcattttaacaagatcccaggagacttatgtgcacagtacagtttgaggagccctgctataacctgcatttgaatggcatggtctatttaaatcttaattaaagaggcagccttaagagatataaaatatttatgtcttacagtgacatcatgtcacacataaatttaattacacaaattcaactctatacccttaaaggtgagaggaattttttttcttttacattttactctgtgatttctccttgcctcctcttcaaacttgcccttgacctccacagtctcagagaggagaaggccgcagtctaaatgcaaagtgaaaacaaaaaaagctgtttttttgcctttgacagtaaaggctcaggtccaggggattgggctgcaactggattttattgatgactttggaaccttaacctccagtcgagtacaactccactcgaatgcatttcacatttattatgctcttgttcctctcaaccatctggggtacatggcgtgatgttaagggaatgggctgccttgagcaattcagtatgctccgggtcacaccgctggaagtgctctgcaaatccattgtcgaataggaataatggcccatgtggattgttttccttccattttcctctcttctcaacctcttttgccatagtttccctttctcatttattcttttgtgcgctaaaacttaatactgaaaattggcaacccaaggcggatgtaacacatggctaggttttctgtggcttcctgattcataggccctctcattgccactttaaaaaccaccacttttcaccctgcaccttggggaaaaaagctcttagacataatcgatccctgggcccagaagaacaatacttaacaagttttagaaattggtaactattcaagtgatcctacacattagtcctgtttaccatattcatgcgggccaatatttaataaaaatgaaatggaaagttttctctggataggatccaccataataacagaacggcatgggcttacctctgtgagtgaaagccctttccaaagtcagtgatctggtctccaaatttctgccaatgccttgctgtgggccctcagatgagtcacgtggccatcaagggccccaatgtcctcatctcaaaaatggcagggagttctgaggggcttaggatgaaataatacctaagcccttttccaattctgaaattctttgacttggtatttccattttgtaattttcaccatgcatgctgcagctattcctcttcggggcgcaagtatttccctcctccaagtgatacacatgtgactgaggtgctagggacatctgaatgactcaccagaatgccagtgcgggaggactggtcatgccgagctgttccccatgtgaaaccagggcctgagcactcttggggtcctgctgtggttgtcatgcagtcactgtgctaatggttttgcttttgcattgcaacccattgccatatcctcctctgagcatctcctcactctaccctcttctgatttggttaaataacttcatggatctgagttttgcacagttgagagcagagttttcaagaagcacactgcactgtgaacgcagcttatggtcatcaccctggatgaaggctcacaggattcctggtaccgagcacattggcagtgcgggtctatgagcactgggctttggataatccctctgagcctctaagagcattttctcacctgcaatatggggataatgataataggtagctatgtgtaaggctgggagattcagtggtgttgtggaaagcagtacagctgccaacatttacagagttcttgataaatggtaattgtgtctacttgtcttccttattggtggatgaaagaatctgaggctgagatatagcctcagaacttgtatgggtctgggaagcagcagaagtggatgagtaaaaacagacccagccacacccaacccatagtaacacccatttctgcaaccagaactggccctgatctccccactgtggggagggaaaggaaggaagggaaaagcaaggccagaggacgaagaaagagagaccagtcatagaatgtccagggctggaagtggccaaggctcacagctagtattggtgaagccagagttagaacaccagtctcccagctccaagttgagttctaaataggaaccatacttcctattacaggggttttccttcttctgtggtcattgtatacccaggtcactatcccagcctactctttcttggcaagtctgcacgggactgggctccagtgtcaatgtgtgactctcctctaccacatccctgatgtgagctgtccaacttcaagtcaacctcatacagaaatgaggaactcatcgtctacctatgcagcccattctcttcccatctctcgttattaaggacgtctttgtattagcctgaagtctgtgcagtgcctcccgtaccacagagagccccagacacagccacacacctttgattcattgagtccaggaatggcctttgcagagctacaaaggagaaatagtgagagatgcatatgaagagatgagaggaaggagagagagaaagagaaagagagaggagaagagaagagaaaggaggaaagagggaagagagaggagagctaaacagacggagacatggaaacagagataagcagaaagacaaagacagagagatgctggggttggtatagtttgaaagaggcagaaagaacacatattcagatgccttaaggcaactaaaagtggatcccagcccactcaaaaagcagcacaatgacctcccacctcagccaccccctcctcaagcccacaaccatatcaggaagctagtgagtcactgtccccctgagtcaccaattcccactcctgagcttagcaggtggcagagacattcccggaagtctctatgcctacagggaagggtgcaagtctaaccccactggcaggcttttcctgggaatacagaaagagagggcccccgaatatggacttctggaagcttctggtgtgtactagaaaagggaatcagaaaccagcaggcccaaggagataaaagacagcttctgacaaggccaagtcaggtttcactgtgtcttattgctccttctggccccctttcttctgttgttttccctgggccctttttctcagaaaaaccccctggctgctcacttccggttgggtccattagttttcatgctcattttttcttttcctgtttttctcttttcagcttcaaagaagcctcttcctcctactcctgaagacaacagggtgagtgagagcgctagctccgggtgcaggtgggcccacaggctacctgattggcatgttcctatttgcatgtccccctctccccatagttttcaaaccctggctgcatgcagcaggctgtcatgattcagcagaactcaacacattgggtatttttgggcttgaactctcttggggggtctgtccacttaaaggaccattcagctgctaaatctccatctcactttatttattcaacaaatactgatatcaaattgggtggccattcacctgaccactttggagtatagtagcagctcactctacataaaagtgtgtctggcatggtggctcacgtctgtaatcccagcactttgggaggccaaagtgggaggatcgcttgagcccaggagttcgagaccagcctggacaacaaagtgagacccccatctctagaaaaaatttttaaaaattagctggtgtggtggtgcacacctgtagtcacagctacttagcaagctgaggtgggaggatcacttactcccaggaggtcgagactgcagtgagccatgactgtgtgccactgcacttcaacccgggtgacagagcaagaccccgtctccagaaaaaaaaaaaaaaaaacaaggtgcacatctactcttcgcaagcattttggagacatacatttgttgatattttatatatttcaaagcacttccacccctttattatctattttaaaacttactatccgttctatccacttcagagggttttagttttattctcattgtaaagcttgggaaatcaaatcccaagacaggtcttgaggcttttccaaggccattcagcaacttagtaggatgcaaggtttctggcgtggtggtctttaactcgagtggtggttctcaaagtatagtccatggaccagaagcatctgcatcacctgggagcatgttagaaatacaaattcttaggccccacccccagacctgctgtgtccaaaacgctgggggaggggcccaggaatctgcattttaataagcctcctcactgatctataatatactgacttacaagtcttagatggcatagtacctactctagggcagcttattttgttaaggagatgaaaaaaaaaagatgggggaaaggatcatgacctttaggtagggaatatgaccctgaccttatgataatattaacaccaatatccacttttctttcttttttttttttttttgagatagagtcttgctcttgtcacccaggctggagtgcaatggcgtgatctcggctcactgcaacctccgcctcccaggttcaagcgattctcctgcctcagcctcctgagtagctgggattacaggcgctcaccatcatgcccggctaatttttgtatttttaatagagaccgacttttaccatgttggccaggcaggtcttgaactcctgtcctcaggcgatcaacccacttcaacctcccaaagtgctggaattacaggcgtgagccactgtgcctgaccaatacccacatttgagtactcgctcttcattccagagcaagttctttaacaagagctttcagattccatttcctcatgcttcttcctgaagaatgagctctgccttttttcccttcagccaaaatggtgacatttcaaaactggcagcgtccccataaaggaagctctaaatcctcaaagccccagcctggtgtttagatctgtcatcagcctactccctcacaacatgagagaaatgtactgaaactgtagcagagaatgagctctctctccttttctttcactgaccttctgcagactatttcaccatcccctttgaaggcctggttcggaaccctactgccctcccttgcagacggttccctcaacagtcccgcctaaacccacacctcccatcttaagtgaggctgctcttgtgtctttatttttggtatcaatgaaggtgaaagccagaaaacactgctggtccttctctccctacactctgccatttggcttttcagccttcttggaggagcatcgtggatactgttttgagtgttctgaccacaaaggttttggaatcattgttctagtttcaaccgcatgtctaaatccaatgcaacggttctcttgtctgagccacttgaaatcatttctctcctcaccttcttgttctgctgcctgagtggtaatgacatctcgggttgtcatacagagaaactgtttttaatccagtctgagccaacaggtctcatgctctatgtgagaaacactgtgagcagggccagtcctccggggactggccagtcctctgggggttgggggatggctattttggttcaagatgtaaaatatccatggtcagagtgaaggacaatcctaggcctcttttgcctatggatacaaacaaggtcgtatatcacattgaagtacaaattccgattcctcttggccccctgcatccatgggaactcaactcttcctcttacagtccctcccagtcaacccagggcttgctgaggggccactagaatgtgtctgcatgtgtcctttcttgctggctgcctactaaggcaccctatccctgccactgctacctgggctctctgtgagggcccctcagccccgtggagctcttcccacctggggccagcagaggtcctggggggtcaggttgtgctgaggcctgcagcagagtggccaggaggcaggatcctcattcctttcatgcctcaccacatcatggaggctcccaaacaacccttcctgagcccacagactcagtttctccaaatgccatcccttgattttctcactcaaatctaatggttcccaaccttatcaaactcaatcctgccttttaatgacagatattttgtaaggctccttttgttatcctgaaaagaaatttataactaatataacatatatatacacaattttttaaaattaaagtacttaattaaaattttttgttgctttgagacagggtgtcactctgttgcccaggctggaatgcagtggtgcaatcatagctcactgcaccatctgtctcttgggctcaagccatcctccctcctcagcctccgcagttgctgggactacaggcacttgccaccacacctggctaacttttgtattaaacatactttttaaaaagaatcaacaaatgttctaactgtaatatttaaaaaggaaagaaaaataatatatataacaaaatatgtgtttctatataaatattgggacatgactgcactggaagacagaatgaaatagtcgaattcttgcactggcaggtaggatccattggatttggcatctcgaatgcaactgatacaaaatgtggtattgggactcaactacagcattaccaccagtgatataattttccaaaatgatgaacaactcttagtaaacttctgaaccaaagcatagtcttccctcaaagtacaaggtagttgcattcttgggaaatccagtactttggatagggtacagctaggatctaggctcaggatgttcttatataattactgtataagctggtttctcaccacatgaatgtttaccaggatattcgaaagttgtggggaatgtgggactctacagagcattttgcattaaaggcctatagcatacctcaaactgtgatgttcaaaataacccccatattccaagcttgcatgattattagaaaaaaaaatacatgtccagtgtgcccctacagaaaggtactatcataatttgagggccctgctctgacctttctcttcacagctattaaccaatgagttgacctgcagtgggatgaatgccatagctctgtttcttcttcaaacatccttgaacactattcctccctccataagctcttagagcaaaagcctcaggccatccactcttgtccatagcaccccatttacacatcctcacaagctccacaaatatctagatttcaaattccaatctgcagccgggcacagtggctcattcctgtactcccagcactttgggaggccgaggcaggagggtcacttgagcccaggagtttgagaccagtctgggcaacatagtgagaccctgtctctcttaaaaaaaaaaatccgatctgggctcagctgagatgacatactacatcaaaatgacgagactcttttttcagctccagtatttttatgccactaaatgcttcaatgtactcagagaacttgtgacttcctaacactaaaccacattctagtgaggaacttaatatttccctacatttactctcacaaagtctgctaacccatagcaggcgtgcccatcctgaactctggcgactatgcgctttgtggtcttttcttcatgtcctcaatatggacatgaagaaagggactgaggaacagagacatcagcaatagagcctacaggagaaggaagggagacaggtgctagagtagagagagtcttagggctaattcaagtggtagattggccaggtccatttctccatctgggcctcagtttcctcatcctaaatgaaaaagtgtattaagtgatctgttagaggaattccagctccaataacctatgattccgtagatctagataaacccacaaatcatattagtaaagcacaaactgaaagatttcatgttgactgcatctcctttgccaagggcatgatgcatccagcagagaggctgctgcatataacatagtgcagatagagaaaccagcagacttttgtgaaaatcacgtggctgcttggaattcactgtggtcagaatttacctcatagaatgagcaatgtgatgaattccaagcactgatgtctttgtgtcatgttcagcgctgtaactctaactcataaagaaagtctaccagaggaaggcagactgtctccccagacaccccgatgaaaggaggcattttacctccttttttatgtctttgcttggttttgttgtctctcttccccagcgaccactttgggaacctgaagaaactgtggtcattgccttatatgactaccaaaccaatgatcctcaggaactcgcactgcggcgcaacgaagagtactgcctgctggacagttctgagattcactggtggagagtccaggacaggaatgggtaagtcatctttgtggctgctgtccccgtgtttgaggtgtggtgcgaacaaataaaataccaggatgatttgtcctatctcccacagtgtaaccacagcactgaggtgggagaagagagcagaggcagaaggaagagggaggaagaggaagtagttgaggctcatttttcctcttctcagaagtggctctgaggcagtcacttgctatgcttgttccctgcaccccatctcaggcactccagacccaaactcatctaaaaaaccccctggatttttccactgacatctacaatttgggagcttggcaatttgttctgcaaagtgctattgttcctgagtgttaagtgaggctgaaggtacatcccattaggaagtgcttatttttggtgaaaagaaaatgtgtgtatagagatggtacagattgatagttatgttaggacgcatcagaaagaagacactaaagatttagttacaatcgcagtcattgaactagccatccacatgactcagggagaaaataaggttgtacaaatactactttcccactatgcaacttttgaatgaaaaaaataccgagcatgagattcacactgccttttaaggttttttttttcctcttaatatatccgatgtattaacccatgctctggaatattttccagaatctgagttcaatagttgcatcaatccagccataaatgtactctaaattgcaaattcccttgttgaacacttaggttatctccaatattttgcaaatattaacaacactgcaacgaacatctttgtatattaatattaagggtttaaatgttttcaaggtatgaggttattattaattttaaagtataaaaaagaaaactgtccttgcaacatatagatcatttatgtcaacattttacttaactaacagtagagagaaatatacataaaaaataagccaccctccatttgcccccacgtcaagtccaaaagtaatcactatttggccgggtgcactggctcacgcctgtaatcccagcagtttgggaggccaaggtgagtgcatcacttgaggccaggagtttgagaccagcctggccaacatggtgaaaccctgtctctactaaaaatacaaaaattagcatggtgtggtggctcaagcctgtaatcccagctactccactggctgaagcatgaaaatcacttgaacccaggagggagaggttgcagtgagccaagatggtgccacttcactctagcctgagcgacagagcaagactctgtctcaaaaaaaaaaaaaaagtgatcactattaataccttcttgtgtatcataaataaaagttatacctgtgcaaatgcatccttttttcacttgtaccaagtggatccattctgttctgcatcttgcttttaatttttaatgatattaatacacattgaagatcttttcataccagcacatgcaaatctacctcatttttaaaatagttgcatgggccggccgcagtggctcaggcctgtaatcccagcactttgattgggaggccaaggtgggctgatcacctgaggtcaggagttcaagaccaacctggccaacatggtgaaaccccatctctactaaaaatacaagaaattagctgggtgtggtggcaggcgcctgtgattccagctactcgggaggctggggcaggagaatcgcttgaacctgggaggtggaggttgcagtgggccaagctcacaccactgcactccagcctgggagacagaatgagaatccatctcaaaaataatcataataataataattgcacaatcttagaatgtatgattgtattattagtatttaaataatcctttatggtgagacatttagttgccagtttatttgtttcctctgctgtttcaaacaaggctttaatgaagatcttgtattcatgtatcttggccatctttggaatacaaacatatatatatgatatatatttatcacattagttttccttttcttttttttgagacagggtcttgctctgtcacccaggttggagcacagtggcactctcacagttcactgcagccttgacctctcaggctcaagtgatcctcccatctcagacccctacagagctgagactataggcacgcaccaccatgcccagataatttttgaattttttgtagaaatggggtctcattatgttgcccgggcttgtctcaaactactgtactcgagaaattctcccgctttagcctcccaaagtagttgggattacaggcatgagccaccatacctggcctatatgtcacatttctaactgtgcaacagttaagtcagagtatgtgatatcttaattttgccacataatttcctcacaaagcttgccaaatttaccttcctgctaacagagttatggaagtgccaagactgggtatcattgaacttttaaaaaaagtcaatctgatgggttaaaaaaaaaaaagaggggcacaaatatctttaaggataagactttaccttttacatacaccagaatttacattttcaaggtgccttctctttaagtaggcttatcaaccccattacagggggaggaaagacagaagtgagacagggtaaaacgtgatgagattcagaaccatggtttgagaggcagtgtggtttgctagctaagaacagaccccaactcccctcgtctggaacctccctttctagttgattcatgaagacaattgagctagtcacatcaccttctctctgtccattatagacaggcccatatccgaaataggttcaagactgtctacagggtctacaaacaccgaagggacctagaaattcattagttcaatcaactgactttacttagcacacctaatgtaccaggaaatttgttctcctaggccttacttccccaaatgacagttaaacccttcatttggtgacctgtggaaaggcttaactatgcacttcaaagggcatcaaagaggacaccccagcagccagtcagcattatgggaatttccccagtttgctttgtgatagtgtggtatagtggaaagcacacaagatggggagacagaggacttggactttatcagctactcttgtcatatgcagctgaggattcacagatgaccatgtcatatgtgtgaccatgtcattcacagatgaccaagtcacttttcctctgtgaatccatttcgtgaactgtaaaatgcagctgataatgtcagctttgtctacgtcacagtgttgagaaaatcaatgagataatggaagtgaaagagctttggaaattctacatatccacatacaactatgagagttaccatttgtgtagatgacccagctttgggtggcatatgctattcaaaagcaaaatattatttgatgcattaatataattgtaaaagtatagtatggcaaaagtagacataattaagggaattccaagagtgatacagaaggaatggcaaatttcagaataagctgactttcttccgttggaatggctgccttgagcactgtatgaaggatgattctgagggcagatgtccaattctccaaagaaagtatgccatgattgattagcaatgtctgccagaggagtaaaatataagatgatcatcctgtatttggcacctacagtcttgatttcttcactcttcacaactctgaactgattacacatttcccataaacataatcactagattgaaaattggccttattataagaaaattaaaacatgttatggaataaagagcaataaactatcaggcatctttttttgttttgttttgtttttttgtttttttgagacagagtcttgctctgtcacccaggccagagtgcagtggcacgatctcagctcatggcaacctccacaccactgcccccacccgccaccacccaggttaggtgagtctcatgcctcaatctcccaagtagctgagactacaggtgcatgccaccacacctggctaatttttatatattttctagagacagggtttcaccatgttgcccaggtttgtctcaaactcctgagctcaagtgatccacccacctcagcctcccaaagtactaggattacaggtgtgagccaccacacccagcctatcagtcatctttttacagattgacagagtatggagtatctacttaaactagattttaagtataatctagtttaagcccttcatttgacgggtataaagtcagaggtccagagagtagaagggatgccgctttcaccctgtggtattaaatgagataatgaatgtgaaagtgctttgaaaactacaaagttatacacaaatgtaaagaagtttgatattcttattttgtttattatgttttttgtttatgcacaattattaattcttgctcaaaagtgactcctgatccccaaatctagcctggctttatcctttttttctcgtgtttataccgttcatatctgaagaagctcaattagggaggccttaaattaaaaagcttacaatgccaactggtagtgtcttttagaatctgtggttggaaagtcatcttttatattttaattattttggtttcctgactataaaatgatagtactaaagtggaaaaaatgttgattatcacacaaaaatgtttccttatagaaaatagacactgaatattaatctttttttccagtagaggaaatttcacaatgaggagaacagcaaacagagctttttaagtaaaatcgccacttctttttttattatgtttcatatttcagtagtgaaatcaacctgcctttaacagacaagttgctattattttttaccaattcctttttttttttttttttttttttttgagacagagtctcgctctgttgcccaggctggagagcagtggcacgatctcggctcactgcaccctccacctcctgggttcaagcgattcttgtgcctcagcctcccgagtagctgggactacaggcatgtaccaccacacccggctaatttttttttgtgtgtgtagttttagtagagacagggtttcagcatattggccaggctggtctcaaactcttgacctcgtgatccacctgcctcggcctccaaaagtgctgggattacaggcatgagccaccgcccccggcctaccaattcttgtattctaaactttaaaatgtcttatcgcaaatgccaaataatgtgatattccccaatctttaaatgacttttaatggattaaacctataaaatgatataaaacttagttctatgtaagtctaaacattaattttccttttaacaggcatgaaggatatgtaccaagcagttatctggtggaaaaatctccaaataatctggaaacctatgagtaagatattttatttgtttttggaaaatacagtcctaaggaatcctccttaagttaggaataaattattggttgactgtaaaaataccagatgatccctactgcaacagcaatgttcacacataccatccagctcttgatacctaaataaggctttccactaaaaaaaccaggactttctggagaaaaggcttggggtagggatagaacaaaaaggaacttggaacatctttttgtgccagaaagtaaagaagtacttaaaaagaaatttttcttctttaatttttttttttgagacagggtctcactgtcacccaggctggagtgcaatagtgtgatctcggctcatcgcaacctcaacctactgggctcaagcaatcctcagcctcccaagtagctggaactacaggcacatgccaccatgtccagctaatttgtaaattttttgtagagacaggatctcactaggttgcccaggctggtctttaacttccgggctctagtgatcctcccattatggcctcccaaactgctgggatcacaggtatgaaccgctgtgcccagacaaaaagatgtgggcgtgtcagatgagcacagaagttggctctaacaggctccatttgatgaaatctgggacaatttgagtatcaaaataaataatgactattaaaataagtaatagactacaaaccattgaataatataagaatctgtaataaatagatagactgatagataaataaagaagtaaataaataaaaaggaaagggttttttcttatagtagaatgccaactaatgaatgataaagtttaaaaatcatcattttgtaacccagagtatcaactgattcaggcaagaatcctcaatgaatgtcaccactagcaagttaaagtttgatgagctgtggcatatttacatagtctcaaagtatctcctcacaaatcacttgtaattacaaagtggaggtaactagcaggcccgtctgaaacagtcaatccaaatgcacataaataatggagcaaaaaggtatcttgtgtctccttatgtgatgcactgagaagggcacacatcacttctgtgatattcctgctcaaaaaatgcacaacatgaatttacttataaggatatattcataaggatatattagacaaatccaaattagggaatattctctaaaattaatgtcctgggctcttcaaaaaaaaatgttaatatcaggaaagacacaacaggctgagaaattggtccacattaaaaaagactaaagaggtcgggcgcagtggcccacacctgtagtctcaacactttgggaggctgaggcaggtggatcacctgagatcaggagtttgagaccaggctgaccaacatggtgaaaccaccgtctctactaaaaatacagaattatccgggtgtgatggcacacgcctgtagtcccagatacttgggaggctgaggcaggagaattgcttgaacccaggaggcagaggttgctgtgagccaagattgcaccattgaactccagcctgggcaacaagagcgaaactccatctcaaaaaaaataatagtaatagattaaagacacatggtaactaaatacagtggtgatcctgggctggatcttgacccatacaaaaaaatattttttgttataatatacattattgggacaaccgatacaatttgaataagatctgcagttaagtaatagtgttatgtagatcttaaatctcatgacttcggtaattgtactgtggttagataagtgtatactctgtgtcttaggaaatagacacagaagtacttaggaataaaagtcaattctcaaatagttcagaagaaaagtcaatctatgtctatctaaagagaatagtaaagcaaatgtataaaatatcagcaattggctcatctgggttatgtgtatatgatggttcttttacactattttacagcttttctgtaagtttgaaattatttaaaaattttaaaaaattaattactcactaaatataagataccaggcctaaagaataaagctaatgaggacacctattaacgcattagggttcttaattcaaatgtggtcgtgttatttgttgctgaaattctagtagattctttagtgaagaaccgtcattttctggagtctctcaaccttgtttgttttgataaagtatgtgtgagtagcccttccctcagtgaacagaagggtcatcagttctaagaatttttgagctgaaataaaacatatagggtatatgcttaaataaaataaaaaatctttataggcaatacctttgaagaaaaaacaataagcatttatttcaaatgaccactaggctatgtagttttgtttgttcaactttgcttttaatcagaatctctttgtttatgatcaaaggagcaaactcaaaattccaacaggataagcaataggaaatggtgaggtctggagcaaataaaaaaagtcattcacccacctaaaggtattttaagccattttaaaaataaaacactataccatgcaaacaaaacaatctagttatactgtgcactttcagtttgcattctccagattatgaatctcagctggaaaataacatgacttacaagcaaacattcagatatttagtatataactggatatatgaaagattccagtatgataactttttattcgtgaacttagtgttgtctagtttcaggtgagatctgcctaagtacttaaaaatgtaccacctggtaacatagtcatgggttggtaaattgaatggattcaggtctcctgccttggtttgcagccatgaccttgggcaagttacctcaccctatttgagttctgatcccttctccataaaatgaatgctcagacaagatgaaggaaggcaaatcatgactctcttgctggcattcccttcccatgcactgaactcaggcagacatcaccctttgatagtgaagctatttacccaccatgctggtgacaaccttttcaatgcacagctctaggcagccactactatcgctgatggcctgtgtgtgagatgaagcctatattttcccaatcctcgattagataatctctaagagcccatgttggtgtcatgtactgttctgtcttataatgttcaaaacctctaacgaatccatgaattcctttagtcatggctactctcaagtagccaaacaagtttgttaagtggtattccttccctacccagaacttctctcctcctgcatttattaattttcaaaactgattattaaccgatgatcagtctgcctcctcttacctaaaaagcagccagagaggttaggatgtggctaaatattgttaacaacataaaaaaaaaacttcatccctaaaaatcatttatattcttctttaccattttatagttgtttttcaccagacaacaaaattataaaaataatgcaattacttggcagaatgtctggaagagcagtcttaaagaggaaaatactacagttgttttaaaaggatatttgctaaactttcaaactggtattacaattttatagctgcactagcaccctcctccttataacgaactgtctactgacttatgaaacgaagaggaaaattaatgttttctaaaactttattttagaaaatttccaatgtatacaaaagtaaagataataatataatgaatatccatgttccccaaacctagcatcaacaatgatcagtattttgccaattctgtttcatatgtttctttccaattaaacattttaatacctggaaatgaatcatgcatttgcttttgagtttaaacgcactggtagaaacatacgtgtgcagacttgttaaataaataaaatacacttaaaatttttttaaagcactggtagaaatagaaaatgaccatatgattttctagcattgtcttttataagtaaataatgaaactttaaaatatgtcattgacatatgacttttccttgctttcaggtggtacaataagagtatcagccgagacaaagctgaaaaacttcttttggacacagtaagtctccttaacctgtcttttgacataaaataaaatgaattaagtgcactgtctcatgtctggaatcccagcgatttggcaggccaaggtgggaggatcacttgagcccaggagttcaaggttacagtgagctatcattgtaccactgcacttcagcctgggcaagatcaagaccctgtcaaaagaagaaagagaggaagggagggagggagggagggaagaaaggtaaaaatgaaagaaagaaagaattgtactgttttttcagctttgctgcgttttatgccaatgcagtgggttgacatgttggattaacgatagttttcatgtctggtgaaaatattctgggaatttacaggactagcaaaccacaggataagaaacctgggcttggcattgacatggagacatcatcaccgctgcagcagtctttgtgagtggtgatggctggccatggggtgccatcagggctggtcagtcatgccttcttctcagtgtgggtcagagatgtctgtgactctgattcggcctgactcagctgtgagtccagaggaaacatagcacttgttttaacttacatttcatcaacagttatcctctaaagccatgcagtgtgcatagcaggaccgattttactcagggatgtcaagattaagggcgaaagggaagagaaaagtagaaaagatggtatggtggggcaggtactgggctctagttcctgttatgtcaccaactcattgggtgactttggggacctctcttcttccttctgggcctcggtttctcagtgagtagaagggcagaattggattaagtcagggatcacagttacccagccctcatcctgccactttctgctccttgtcctgtgaccaacacagctgatctcagtccatggcattgggactttattgggaaacaagacaaatgcagaaaaaagagcaagggaataatctaaaataaactaaggtaaactccagaggagttgggaaagattccatgaagaaaaagaagttgagctgagtccttactgaactctggtctctccttggctctacatcaactcagcacttaattatttcctgtgggttccccaaaaaaacacacattagaattgctgggaaatgttcaaaaatacagattcccaggtcccaccccagatccacagaatcagagtctctagtgttagttcccgggaatctgtactttctcaagttaaatttacaatgcaaatgtagccaactcaaacctggcgctgccaggctgtgttattggataacaaagtagaacttgattaatatgaactaattgagtggagtgcaaaattagctaaaactctgaattacactgtgtttaaacaagtatagttttgttatattaatcacacatcagttaatgacgtctatggagcacttcaaacagcccacattaatgacttctaaaagatgattcctgtattacagcagttcttgtgaggtgctaagtgctaagtacattttgcttgctctggcagttgaaacattcctccttactgatacatatatatatatatatatatatatatatatatttatatatatatatatattttttttttttttttttttttttgagacagagtctccctctgtcacccaggctagcatgtagtggcatgatctcggcttactgcaacctccgctgcctgggttcgagtgattctcctgcctcagcctcctaagtagctgggattacaggcatgtgccatcacacctaactcatttttgtatttttactagagacggggtgtcgccctgttggccagactggtctcaaaactcctgacctcaggtgatccgcctgccttggcctcccagagtgctgggattacaggcatgagccaccacgcccagcctccttactaatattttgagctactttaccaaattctcttctcctccttaggtaaatatgagggcaaacatcaatgggtccctgtcagactcagcccagattctggatagaattgaatgacattttcttgctatttttcactttttttgtgtgctgtttttgaaacaatagctgtattatttctaggtgtatttagagtctttttatctaataagtataggacctttaagagatgaattcctgcatagtattccatggcgtatatgtgccacattttctttgtccagtctatcattgatgggaatttgggttggtaaaaggatgagttcatgtcctttgcagggacatggataaagctggaaaacatcattctcagcaaactaacacaggaatagaaaaccaaacactgcatgttctcactcataagtgggagatgaacaacaagaacacatggacacatcacacaccaggaacatggatacatcacacaccagggtctgtcagtgggtggggggctaggggagagataggattaggagaaatacctaatgtagatgacaggtttatgggtgcagcaaaccaccatggcacatgtatacccatgtaacaaaccttcatgttctgcacatgtaccccagaacttcaagtataataataataaaaaaagagatgaattgattcattacacctttttatgaactaaaactcctggtgtactgccccatacatatttcgccactagactataaacaatttatcttgttcctgctgtacttaggcacccaaaagtgtatctagcaccttgtagttgttcaataaatatttgttgaatgaatgaatgaatacactgaaggcttaataaatgtttttaaactaacaactccacttaagggggacctgggtgatcataagcatcactgcaggagctttttaaaaatacaaattcctggactccaggcctatccagtcagaacctcaagaggtggcacccaagttattctgggacttacctacatttgggagccactaaaaagcatctcctaatgtgccatatcagttcttccaatgttgcctcctcccagaagtctctcatgccttccctcgccctagctatggaacgtggtttttcttgtctttgaacctttatgggtcaaatgttattatcagtattattacttctccagtggctctgttctcactctgcctccaatctcagcagtttctcttctgtctttacccatctaggtagatggtaaattccttgcaagtgggtaactctcttagaacaccttacaacatctcacacatagggtgacctgaagttcagacattctaaagtgtcattgaagactcaatgttgacttaataattggtttgtttcaagagaagaaaagcaccacctccagaatgaaagatggctgtatttcagagacactcttaaagtataatgcagcataacaagactatgaattatcagtccatctgttcacaataacttaccctgtgtgttgagattatcttctgaaaggtcaccttcaaattatatgaacagaaagaaagaaaaatactcctaacacaaccaacatgtctcagatggagactgacaatggaataattacttccaataagtagcaaacttagcatgtgataataatggccaataatactctaatagttcttgtcctagtattgtattccaggagcaattctaggcacattacctcagttctcccatcaaccttccaaaggtcattttacagatgaggaaactgaagctcatacagttactcatctttataagttccttttaaggccaggcacggtggctcatgcttgtaatcccagcactttgggaggccgaggcaggcggatcactggaggtcaggagttcaagaccagcctggacatcatagtgaaacctcatctctactaaaaatacaaaaaattagccaggcgtggtggcgggcacctgtaattccagctacttggaaagttgaaggaagacagtcacttgaacccaggaagtggaggttacagtgagctgagattgtgcaactgcactccagcctgggtgacagaatgagactccatcttaaaaaaaaaaaaaaatccttttaaacccagagattctggaattcaaacaaatagcatgggccactgtctgtgtgtgtacacagatatgtgcccacaggcaaaccatcattttagttgtgggatagaaggatttgtgttgttgtagtttctatatactttgttccttatactccaagtgtatgccctccgcacaaggatcttgtctaactctgacctttacttagggccctcattgtgactaagttaagtgaatcataatatttggcttaacaaatgttaccagtgcaagtttacagcggggtaggaacagagtgttagataggaagtacttaaaatagacttcagattttttaatttccaccaagaatgaataaaatggtatgtccatttattagtgcttatttcatcagtgctggcaaaactgtcagggtggcgaaagttacattctcagggcactcccttcttcccacctctctcatgaaaccaggagcttaatgttctttttccttccgccctgcagccaaattctcattctggaaagggcctaagaaatatattatcattaagagaatccttatacactgttggtaggaatgttcattagttcagcccctgtggaaagcagtttggtgatttctcaaaaaactaaaaataaaattattattcaacccagcaatcctattacagggtatatacccaaaggataataaattattctacctaaaagacacctgcactattcataatagcaaagacatggaatcaacctaggtgcctatcaacagtggactggataaagaaaatttggcacatgtacaccatggggtaacatgcgccctgaaaaagaacaaaattgtgcattctgcagcaacatagatgcacctggaggaattatcctaagtgaattaacacaaaaatggaaaaccaaacaccacatgttctcacttataagtgagagctaaacagacatcaagatagtaacaatagacagtggggactccaaaagttggaaggaatggagagtggcaaggatagaaaaactacctattgggtaatatgttcactatctagcaaatgggttcaatagaaacccaaatctcagcaacacgcaatatgtccatgtaacaaacctgcacacatactccctgaatctaaaaaatttttaaaagttatatattcccattaagacactgatgaagttttcaggacagttttgtgcctttgtagggaaatggagaagcagcttctaacattctttgaaaggaggcatcctggagtagtagaccaaggctgggctttgctcacataccagagttcaaatccgaattctgtcactttctagttgtgggtcgtgggaatgccacttaagctctctggcactcagtgtcattggcggttaaggataccaatatccagatggcaatattgtggtaagagttggaaaatatctgtaaagagtctgatacatggggagctctaaaagggcagagcttatgtctctgtctccattcatggttcatgtcagcatgagaacagtctgggatccatgtaggagaccaagaaatatctacggaaggacaggagtaaatgaaacggtagccattcttactgaaatctgctctatgccaagtgggcctacagtatttcctccttctgtgggcaagaaagtggagctggaggcataagcctggtttcctgagatcactaactttccattctttctaaccattccagggcaaagaaggagccttcatggtaagggattccaggactgcaggaacatacaccgtgtctgttttcaccaaggctgttgtaaggtatggagctaactctgctcagcaaagtggagagaaacacttctgaagtgtgtgagcactggggaaaagacaacaaagttagacagtgcaagaggtagaggctcactagaaatggtctgttttccctctttactccgagaaaaccaaagccatggagatcaaggatagaacttaagagacttagaaagtgacagagctgggagtggatgccaggtcctctttcaattagcatctccaattttagagttctaaagacataaaatacttggcactgtattggatgagtatataatttaatacatagaataacagaagagatatttctatctggaagcaaaaatatatgaactccagttctggctctgctcataaaactacctaccattaactgagtctttattatgtgccagaaaatatgcagaccatttccaatcctaagaagccctgaaggcaggtattactatgctcatttcacacagaagaaaccgaggttcaggagctgatggtgcctccctatggccgtgggtctgaaggggccaagccacatccaggctccagccaactggactgcaagatccttcctgcttttctgcccctctgtacctgtttcttctctgtaaaacaatgcctaagaacctatctaggtctcaaattcccttctaattagaacatttgttagaactaagctgtttgacaatgaccaaagtgcagtcagaattaagagaagagacaaataatttttaaggtgtcttcggaaaatttttttggaagactgaggatgtgagcaggacgtggagcaagggcaggtggcaaagaggaagggcccgatccagggatgggagggaacacagtgtacatcacagaggggccgtgcctctaccatggctgggagacagtaaggaggtgacctgcaaccccacaggtatgacggagaagggatgaaacaaagtctgtgtcgaggctccccacaactacccccagcttcagggattcactaggaggccttccaggacaaagacttattgagatttaatacagcaaagtgatacaaagcaaaatcagcaacgggaaaagacacatgggacaaaatctagaggaaacaaaacacaagcttccaagagtcctctcccactggagccaaacaggacgtgcttaattccgccagcaacaagttgtaaccacacgttagcagtctaccaggggagctcattagagactcagtacccaaggcttttattggaggctgtttccacagacagcccctgcctagcacatgccaaagttccagatacccaaaaggaaaacaagcgttcaccataaaacacattgtttctagcagacggtttaggtacagctcgccacccttatcagttagggaaagagccctcccgaaatccaagttcccaaacaccagccaagggttaaccatgcaagcaggtctttctaaggagggtagtcaggcctgttatgttcatcctctgcagcttatttgacttatgaagtcaaataagggtgaaggggtcagagaggctttctcaatgtatgctgacaatcagttaaattcatagaataggcaaggcaaacacatagcaaatatttccattccctcattttgtggcaatggaagaaccatcaccaatccatcacagcattgctgtccactgggtccagacacaacctcagagtcctttttaacacagtactgcagcacccaggcccaatctgtcaagacagacttataagttgaacaatatctgccaccttgtgagaggttataagacaaagataataagaacttaatactcgtagacttttttgtgtctcaacattgcttcttaataatcattacatttgtgtttcatttgtttaagtgagaacaatccctgtataaagcattatcacatcaaggaaacaaatgacaatcctaagcgatactatgtggctgaaaagtatgtgttcgattccatccctcttctcatcaactatcaccaacataatggaggaggtaagctctagagcaggggtggacccgggccgcccagcaggaggtgagcagcaggtgagcaagcattactgcctgagctctgccttctgtcagatcagcgtcattagattctcataagagtgcaagccctattgtgaacagcacttgtgggatctaggttgtgtgctccttataagaatcaaatgcctgatgatctgagatggaacagtttcatcctgaaagcaaccccctgccacatccatccatggataaactgtcttccacaaagccgatccctggtgccaaaaaggttggggactgctgctctagaggacaaagccagagggcacctgggttagacttttttgaattgctatcaaggaatacctgaggctgggtaatttataaagaaaagaggtttaattggtccatggttgtataggaagcatggtgccggcatcttcttggcttttagggagccctcaggaagctttcagtcatggcagaaggcaaaaggggagcaggagtatcacatggcaggagcaggagcgaggagggagaagatgccacagacatttaaacaaccaggtcttgcatgaactcagagtgataactcatttattatcacaaggacagtgacagcaccaaggcatttgtgatggatcccacctaatgacccaaacaccacctcccatcccaccaggccccacctccaacatagggcttttcttttcttttctttcttttcctttcttttcttttctttctttttttttttttttgagacagagtttcgctctgttgcccaggctggagtgcagtggctcaatcttggctcactgcaacctccacctcccaggttcaagcaattctcctgcctcagcctcctgattagctgggattacaggcatgtgccaccacatcccgctaattttggtattttttgtagagacagggtttcaccgcattggccaggctggtcttgaactcctgacctcaggtaatctgcccgcctcagcctcccatactgctgggattacaggtgtaagccacagtgcccagccagggattacatttcaacatgagatttggaggggacaaacatccaaactatatcagcacccacacaggagacttaatgaaaactggcaaaagctcgccctggcttctttttgactataaataataaataaatatacaaatagaaaaatatgacaaatatttaattatattatatatcttctattagcaagctatcttgtggaaataatggaattttaccacttgcccatctgtgcttatgatgttttcaaggaggatatgatatcaataattaggctttgggatttgttttccagaataaaattagcttttgcgtctgatgatgattattattttttttagtgatttaagttagatggttgctagagcaaagccctaaccactgcttcttggcttttcaatcaacccaggcctggtgactcgactccggtatccagtttgttttgggaggcagaaagccccagttacagcagggctgagatacggtgagcagtacaatcaggaatgtaaactcatgtccctaaaggtctggggcaaattctgaataaactggccatgagcctacctgttcctcagactacaaatcaccattaaaacaagtgtattatatatctagagatgatggcactaatgaatatttacattgtgtgtaagagaagtacatatacaagcacatttctctaggtcaaaccagtggccattggttttagtgaagagttcattaatgaagtgtttattaagcacctactttgtacagagcaccctactaaatgctattagaaaaatattagaaaaccatgccttagcactgtgtttccacctatcttctagaacttttatatcatctagttggttgagtagcagactattgccagaactgcaagttgagagcatctagaagtgtttctctgcataagagagtgttaaaattctttggaatacctttaggcgtggcatgatctccagtgctgcagcccctactatgttttcttgccctacggaattgcttcactcacttgggattacctgcctggactctgaaggcatttggctttgcatcccttggtcccaactgtgtgctgcctgtggagaaggctggtctaattttcatttcttatctcctagcttggtggttctcaaatttcagtgtgcatcaaagtcttctagaatgcttattaaaaatgttgactcctggctcctatccaaacactcaccaaaacacaatccttgatagggtcctggagtctacttttttttctggcatgatctccctctgtcacccaggctggagatgcagtggcgtaatcatggctcactgctgccttgacctcctgggctcaagcgatcctcccacctcagcctcccaagtagctactatgcctggctaatttttaaaaattttttgtagagacagggtctcactatgttgccctggctggtcttaaactcctgggctcaggcaatcctcctgcctcagcctcccaaagtgttgggattacaggcatgagccactgtgcccagctgagtctacattttaaacaagcatgctaggtgattttgatacaagtggtcagagggcaatactttgagaaccactgccacgcatgggcttctttatccctaaccagcaccgtgtccggcacacagtaggtgctcaatactgcctgctgttgagtctctgcctcaaagcagtggaaatctggctgtttaggtaccagaccaagcactggggaaagagtgcctctttagcctccttatgaaaataagggtattctaataaatgtagaatcttgatgtgtccgtgctggatgggatttcagatattacctggtcagcctactcattttgttggtgaggaaattgagcctcggaatctcgtatttgtttgttaaacatttcttgagagcctcccatgtgccagacactgtgctagcttgtgcctctgcacaaattctctttaaatctttctctttaactgcccctctgccccagtaaggcctaatagggttatgtgtatatagcaggtgctcttaatagatgaatgaatgaaagaatgatcagctcaatgaaatttacttagtgtgaaaaatgacatagaaaaatgggacattgcaagaaccctttctttaatattttgattaatatggtttctttaatatcttcattaatgccactctccttctttccatgttaccttcccacacatattttcatagttttctagcatatcctatgttattatgtgggaaaaagataatttatttgccatctttgaattatattaacaataggctaaaattctagttagggctttatagtcccctggtatcccaataccttatatctactgcttgctgaccccagagaactctctctctctcttccagggaaatgggtgatcgacccctcagagctcacttttgtgcaagagattggcagtgggcaatttgggttggtgcatctgggctactggctcaacaaggacaaggtggctatcaaaaccattcgggaaggggctatgtcagaagaggacttcatagaggaggctgaagtaatgatgtgagtgctcagaacaaggatatgcagaaactctggggggaacatcggttcagtgttcttgaaatgccattcaaacgccagggggtactatctccctgcgcaaactcccagcagtggcttcctattgcacagagaatacaatcaaactcttcacagtggtctccaaggcccaccataatctgatcatgcccacctcccccttctcagctcctacccatctctcctccagtccatgacatgccagccacactggcctctgctcatcttcacacacacagctgactccttgccatttttcaggtctcagctccaatgacatgtttttgttttggggagggaatgaatattattttcatccaaaccataaattagacaaaatgaccattggctattttggtaccataatattttcggcatttttgggagactgagtttaggccatctcaccccttgtctttttcctccaggaaactctctcatcccaaactggtgcagctgtatggggtgtgcctggagcaggcccccatctgcctggtgtttgagttcatggagcacggctgcctgtcagattatctacgcacccagcggggactttttgctgcagagaccctgctgggcatgtgtctggatgtgtgtgagggcatggcctacctggaagaggcatgtgtcatccacagagacttggtatgagcatgcagggtgaacacccacaggtccagggtaaagggacagttctcactgaaatgactgggaacgcattaataaataatacattacagataatctcctttcctttctcaacttctcccttccttcacctactttgggtggtcctagtggaaagggcttcatgaggacttacttctgggctctgatcccagcccaaactctttcacctcctgcatttcagtttatattcttccaaaatggagataactgccactccttcttaacctctctgtgactcaatttcctcctggtaaattgaggaaactgagtttgtctgaaggtattattcaagggtctaccagaatcacactggggaagcccttaagctactctcagaatctctggtggctgggactcaggaatattcattttaacacattccccatatgatttgtatgcacattaaaatttgagatatgcagctgggtgcggtggctcatgcctgtactcccagcactttgggaggccgaggtgggcgaatcacgaggtcaggagttcgagaccaccctggccaacatggtgaaaccccatctctactgaaaattcaaaaaattagctgagcttactggcgggcacctgtaaccctagctacttgggaggctgaggcaggagaatcacttgaacccaggaggcagaggttgcagtgagctgagatcaagccactacactccagcctgggtgacacagtaagactccatctaaaaaaaaaaaaaaaaaaaattgagacacactggagtgttatctccaatggctttttcaatgcaacagtctataatactaattaggggtcaggtactctccctattgaagaacagttttaagaggattaacaacatcaaaacattcttaatttagtcaactgggagatgctttcttcctgttatccctgatgttaacatttcctatcacatcaggttgcattagagcctatctttggttagacaacaccaaggatttctaattagaactcaagaatgaagataaacttactcatcttgatagtggatcttacacattcaactttccagttaacttccagcggcatttgtgaggcttaattaacatttgtaaagctccatgatgcccttgtatgacagcactgcagtaaagcaaaggactgtgattataggagactccttaactactgatgactcatcaacagttttcctctccgcctttgtttgcctgtctcctctccaggctgccagaaattgtttggtgggagaaaaccaagtcatcaaggtgtctgactttgggatgacaaggtaaaagagggatgtggtgccggtgaagtctcaggaatgggactgaggcccccggaacattctgaccttctccctccactctcttcccaggttcgttctggatgatcagtacaccagttccacaggcaccaaattcccggtgaagtgggcatccccagaggttttctctttcagtcgctatagcagcaagtccgatgtgtggtcatttggtgagtgtcatgctgggccccactgccccatgatctgggcttcaggccagctgtttcctttatcaaatgcagacaaccctacccacactgaaccctgtatcatatcatgagggtgtcccactggagggttgtgtaagaaaggccccgaaaactatgaaagggccttcatcattttgtttgtttttagagatactggacatggtggtgggagttaactaaaagtggaaacaagagttctggtgccagctgctgtgaagtcaaaagctggagaagtcaggagattcaaatatgagccccttgaaggcagggaccatgttttgtccaacactacatttccatacttatctctcaataagtattaatatttattcattcattcaacaacaattaactgatcatctattctatgccaagggctaatctaggtgctgaggatgcagtggttcatagaacagaaaagacttctgttcttttggaactaaatttgagatgggaggggagacagaaaatcacaaaagatcataataacagtcataaacaataataataataaacaagctaagggatagaagataaagccaggcaatcataagtaggtgctatgaataaaataaaacagtaatggggcagagtgactaggatagagagagggtctgctttgaatagtgtggtgtgggaaggcctttctcagaaggtaattcttcagcagagacttgaatgataggagggagctgtcaccatttgaagagccagggaacagtgtccctgacagagggaccagcaagtgcaaaaacttggtgcatccaaagaacaaggggtactgacttattgggagaacaacaggcaatgaagctggtaggccatcataaggaattagaatttctaaaaagtgcaaatggccatgaagggatgaatgatgttggtattgcaggatgtgccaaatgttcttgctggatttgccatgtcacctgaagtcatagtttgtgcatactaaagtgtgcaaaaaaatataccagacaacctctttgatttggattacaagaattatactgtggacagaaactacttgaagattgatttttgccattcggtatgaaggaagggtttgacaagggcttactagtagtagaaaccaggggggagtttggctaggtaaatcttttaggagaagaatgagtgttaaaaatcttctgcagcattttagtctatccatctctaggagccaagtggtttgttcattatgagtcctacctatttcttaaaacagtaccctattaaccaacccttgcagctactttgttaaccaggtttaagttacagaatggacttgaaagaaattgtactaacagcatttttggatgactcccctctccccagtgtgtataactaggaaggttggggctgatgtgcagtcatctcactatgggtgatgaaactgatcacactgcaccaagcaagcaagggccccacaatgagacatttggagcaatggccactttagcacattcaccttctgactctgaatggggtttattcagccaaagggtgtcagcctgggaatttcctggggcatattaccattacagggttgggctgaaattagtccctgtctaggatatattatctgaagagagtccagaaatgaggttgatggatggatgcagaattgagagatcaatggaaaaaagtgtgaaaaaactgggggtaccagcctaagcaacagaaacctggatgagctgaaaactccatgcctgcatcagcccattggactttgtcctacgttttaagtttctttgccctaattagcagtgtgctattcagaacaagtcaacctctttgtactttgctcaatttttttatctatacatttctcatctgtgtattaaagcaatcattctgaaaccatgtttcagcatcggcacattttcaaaaaaattttcactaaaaattatggtgtcttggggtgataagcattcttatttagggtcaggttctgaatttccaactcctgaggcacctctgagtaacatctagagattctgatccactgggtttgggctagggcccaggaatctgccatttgaacaagactctgagatgatttttattcaggtgttttggggatcatgctttgggaatgtctactctaagattctctggaacaacctttgaaaagctctgaattagctgatttgcaagcagccttcttgctctgacaacctgtgaatatatcagcacatgataaagacaaagctaggtgtcacatttctaccaagggcagaagaggaaaagaaagggattaaatcagaggtcaaaaatagacaagcaaaagatgtgttttgcttggtctacatggcattttttaaattcaagaagttcaactcttaatttttgacgtcttttttaaaaaaatcagaaaatgtgccaattctgatccctcattttcatgtgccatactttggttggagtcaaatcatagctgtctccttaagacagaactgtttatctcattttccacaatcctccccaatcccaatagtgtcacacctcctgcactccattcatttacatcctgcatcttggcatttgagtctacaactcttagttgtagcatttgagtttggtacaacaaagggtccatcttgaaaatccttctccactacaaaggttgggaaatttcagttctttaaaaataggacaggcctaataagcctcaggtagacttgatgcacttctggaggtagcacatgaatcctaatgcaaggagtctgtaatttctagaggcaggttggtttgtttgctgtctgtgggctttgtcattcactgtgctgtgctcaccatttcttgtaggtgtgctgatgtgggaagttttcagtgaaggcaaaatcccgtatgaaaaccgaagcaactcagaggtggtggaagacatcagtaccggatttcggttgtacaagccccggctggcctccacacacgtctaccagattatgaatcactgctggaaagaggtcagtggaggaagtgcttccccatgcattgtcgtatacaatttgaggacctccctccttccctagagaaaggaaccctctcagaaggatgaggcaggagggataactaatatagattagcaacaacatgactttgaggatctgttaacgggatagatcccccatccctaaaggagctgaaggcgaccttaaatattatttggtttgctacataatgtcacaagctataagcatagcttcagagaggaggatggggtgtggcctatgccagcttccttctcgattttctgagaagagaaaaaaagtctgtaacatcataaaaccattaaaagcacaggaagttagttctataacttggggaacaaagttcacttgcactatgaaaatattaaaatggcttaatttgagttcattttattcattctgcatttaaaatggggagccaattcctctgtacccgcccaggtggctcatttaccccaaccttggattgcaggccatggcttgagccccatcactatgagtcttagtctttgctgtctttgctgagttagaaaatcatacatttcagccaaagtggaaagttgctgaaacagagaattaataaaaattctgatcattgtacgacaacaaggtggaatacaaaaaatttggaacactaggattttgtctcagctttaccatttatttgccattaatctttgacaattctctgaacttcctttttcttactgttaagagaattaaataatgcttggtctgtgagttcatagagcttttataatcagaaacaaagaaacaatagagacataaaggagggcataaaacaaatcttatccacttcataaggattagctacaataataataatgatggctgacattcagttggcactttttccctcttttaaccatcatttattgatttttttaaattaatagtctttattttttaacaaagagtacagagttctcatatgcccacctcacctgaacagtttccctgttcactaacatttggcatgagtgtgatacatttgttacaattagtgaacctctattcatacattaactaaagttcatagtttacattaaggttcagtctttgtgctgtagagttctgtaggttttcacaaattcatgtatccatcattatagtatcagacagaatagttttactgcactaaaaatctcctgtgcttcacccatttatccctctcctcatccccaaaccactggcaactactgatcttttcactgtcttcatagttttgcctttctcagaatgccatatattggcatcatacagcatgtaggcttttcggactggtttctttcatttagtaatatgctttaaggtccctccatgtcttttcgtggcttaatagctcatttctttttgttgccaaataatattccattgtatggatatatcatagtttatttatttacctaccaaaggaaatcttggttgttttcagtttttgtgtttgtttgtttgggtttgtggggttttgtttttttttttgagatggggtcttactctgttacccaggctggagtgcagtggtgcaatctcagctcactgcaacctctgcctcccagtctcaagcgatcctcctacctcagcctcccaagtagctgggaccacagacatgtgccactaggcccagctaattttttgtatttttggtagaaacagggttttgccatgctgcccaggtgagttcaggcaatcaatccacctcaggcctcccgtagtgctgggattataagtgtgagtgctcaggcagactggtttccttcacttagtaatatgcctttaaggtccctccatgtctttttggcttgatagctcatttctttttattgctaaataatattccattgtatggatatgccacagtttgtttatctatttacctgccaaaggaaatcttgcttgctttcagttttaaacaattatgaatacagctgctataaatgtttatgtgcagatttttgtatataaattttcaactcaattgggtaaatgcctaagagtatgcttgctgaatcatatggtaagactatgtttaactttttaagaaactgccagaatgtcttccaaagtagctgtattattttacattcccaccagcaatgagagttccttattagcattcattgttttggatttcagtggttctaatagatgtgtagtcatattacattgttgttttaacttgcattttcctaatgacatatgatgttaagaacattttcatatgcttatttgccacctgtatatcttcttggtaatatctattcagatcttttgcccatttctcaatcaggttgtttgtttacttattgttgagttttaagagttctttgtatattttggatacaagtcctttatcagatatgtgttttgcaaaattttctcctagtctgtggcatgtcttctcattctcttgacagtgtctttcacagagaagacttttcaaatattttaacaaagctcaacatcaacttatttattcatgaattgtgcttttgatttacatctaaaaactcattgccaagcccaatgtcacccaaattttctcctatgttactttttattttatggaagttttataattttgcattttacatttaggtctatgatccactttgagttaattttcctgaaaggtgtcaggtctgtgactagagtcattgttttacatatggatgtccaattattacagccctgtttgttgaaaagactataccctttctcctctgttcctttgttaaatgttagtttactatatttatatggatctatatctgggctgatccattaatctgtttgtttattctttcactagcaccatcctctcccattactgtagctttagagtaagtcctaaagtcaggtagggtcagtcttctagctttgttgttcttcttcattattgtattggctctctgggtcttttgcctctccgtataaatgttacagtcagtttgtcaatatctaaaaaaaataacttgctgaatttttattaggattatattgaatctataagtcaagttgggaagaactaatattttaacactatagtgtcttcctgtccatgaacatggaatatctgtccatttatttagatcttctttgctttcttttattagaatttttaattttttctcatttagatcatgtagatattttctgagatttatacccagatatttcattttttggtgttctttagcattaatttcttgatatatttttatatgtgatttattgaattctcaaaacaatttcatgaggtagatactattattatctccattttacaaatgacaaaactgaggttcaaagaggttaaataacctgctgaatgtcacacagctaattagtggtaaaactgagattaaacactagtcccttggattccagaatacctgctgttaacaactaggacaatgtatatggaatacagtcaacatggaagcacatacaaaaatccacaggggatgctgctattaaattctggtttgttttggatttacctatgacgcacaagtacaaggaacttacagagttcttttttccctctccagagaccagaagatcggccagccttctccagactgctgcgtcaactggctgaaattgcagaatcaggactttagtagagactgagtaccaggccacgggctgcagatcctgaatggaggaaggatatgtcctcattccatagagcattagaagctgccaccagcccaggaccctccagaggcagcctggcctgtggcatcagtccctgagtcaccatggaagcagcatcctgaccacagctggcagtcaagccacagctggagggtcagccaccaagctgggagctgagccagaacaggagtgatgtctctgcccttcctctagcctcttgtcacatgtggtgcacaaacctcaacctgacagctttcagacagcattcttgcacttcttagcaacagagagagacatgagtaagacccagattgctatttttattgttatttttaacatgaatctaaagtttatggttccagggactttttatttgacccaacaacacagtatcccaggatatggaggcaaggggaacaaagagcatgagtctttttccaagaaaactggtgagttaagtaagattagagtgagtgtgctctgttgctgtgatgctgtcagccacagcttcctgccgtagagaatgatagagcagctgctcacacaggaggccggatattctgagaagcagctttatgaggttttacagagtatgctgctacctctctccttgaagggagcatggcgagacccattggatggattggggtgaacagttcaggtcccatgcttggagcattgggtatctgatgtctgcaccagaacaagagaacctctgacggtggagaaccatgtggtgcaagaagagatcttaggtctcttcttttataccaagctcatcttttataccaagctgtgcaggtgactatgcctcctcttctgcacagaatgcttccaccagcatcctgagaagaaatgattacttctgaaaaacatccttttttccagcctctgggaatcagccccccctctctgcactatccgatcctcatcaacagagggcagcattgtgttggtcagtgttcccttggcgagcaattgaaacttgtttaggccctagggttgagcaattttaaggttgagactccaagtctcctaaaattctaggagagaaataaagagtctgtttttgctcaaaccatcaggatggaaacagtcaggcactgactggggtgcttccaagaggcatgagagtgcctactctggcttgagcacttctatatgcaaggtgaatatgtactgagctaggagacttccctgcaaaatctctgttcaccctgggttcacatccccatgaggtaatattattattcccattttacaaataatgtaactgaggctttaaaaagccaagacatctgcccaaagtgatggaactagaaagtctagagctggtattctagcccaaatctgtctgaccgcaatacacagattctttattcctattcgacactggcttctactgaaaatgaaacggattgcagagggaataaatacaaagatggaaagccagtaaagaagtcagtatagaaccactagcgaatagtgttgctctggcacagaccactgtggttgatggcatggccctccaacttggaataggattttccttttcctattctgtatccttaccttggtcatgttaatgactttggagttattcagttaatgaccctttaattctcacaaccaaccagtcatgttgcttgaagccatttatagacgagcttcaaagcaactttaaaagattcttctgtagaagtatgagttcttcctttaattatcattccaactttcagctgtagtcttcttgaacacttcatgaggagggacattccctgatataagagaggatggtgttgcaattggctctttctaaatcatgtgacgttttgactggcttgagattcagatgcataatttttaattataattattgtgaagtggagagcctcaagataaaactctgtcattcagaagatgattttactcagcttatccaaaattatctctgtttactttttagaattttgtacattatcttttgggatccttaattagagatgatttctggaacattcagtctagaaagaaaacattggaattgactgatctctgtggtttggtttagaaaattcccctgtgcatggtattacctttttcaagctcagattcatctaatcctcaactgtacatgtgtacattcttcacctcctggtgccctatcccgcaaaatgggcttcctgcctggtttttctcttctcacattttttaaatggtcccctgtgtttgtagagaactcccttatacagagttttggttctagttttatttcgtagattttgcattttgtaccttttgagactatgtatttatatttggatcagatgcatatttattaatgtacagtcactgctagtgttcaaaataaaaatgttacaaatacctgttatcctttgtagagcacacagagttaaaagttgaatatagcaatattaaagctgcattttaataaatatggtgcatagggcctcggttccatatttatttaaatcgcaaactctcagaacttttccttaagtaaaaatggttacattgtttcattttccacagacaattaaagattacatatcattgaacaacattcattcaacaagtaaatatcaaacgttcctatggttcatgcacacagttcagtgtatgcatcctcatgaaaacaaagatggaaaagtcatagtctttacttctaaaaaattcctagtctgattgaaaaggaaaacatatgaagaaataaaattataatagaacaattagggcaacaacaaaaaactgtggtcaaagaagagaagagcccagaataagtgatggaatctatcagggaaaggatgacatcaagggaaacttcttagagccctgctactcaaagtgtggtccctggaccagcagcaatagcatcaccatgttgtgaaaaattcagattctcaggcttcttcctcacctaccgagcaagaattgtcattttaacaagatctgcaggtaatcgtatacacattaaagtttaagaagcactgtcgcgaggatatactgtctaagccagttttgaagataaatttatgagttataaggtaagtaagtgggcagaagtaagagacatactttccaggtagagagagaacaggaagtattgggaagctattgtcagttcactattgctggagcatgcgcgcatgcgcgtgcgcgctgtgtgtgtgtgtgtgtgtgtgtgtgtgtgtgtgtgtgtgtctattttctcagcaagggtaaggatgatagaagaggtgggtaaattgaaactgaatctataaatctatgaaagaactatactttaaaagaccaagaagttggaatttcaccctataggtagaaaagatgtcattgcacaggaagagaaggtcaaatttgcgatgtgtttaagaatatattctggcagcagcatagtgaatggatttgagaaaggcaaagccaatggaaaagaaactaatttggagattatctttgccttgttcacagtaccatattatttttcctaatcattcactgtcatctgttgtgtgggtgacatatggaaattgtaatttggagtacgtcattcactttagatagcaataaaatagctttccttcttaaaaccccagtaatataaaggctgggtggttatagttttggtgtgctgagcactctgtgcctttcagtccaccaaatgcccagctccattgcaggagccaggtcatgcgccagtcaaccactgagcatggaagagaaagcccaaggcttccatgcagtccttcctagaactcacctctgtgcttgaatcccactgccaaatcatccacatgagaaagtcaaaagcagattggaggaacagatctgcttctcagaggatttttcctgcagaccctgctcttctcagaatctcccaacacctaaggccacccttttgaggaaaagacagaaatacctcattcagcaagacagggagtatgtgcatcatcaggtgcagaaagagctgcagattcccaattagagggcttgggaaggtggcctggtcaggaacagagggctaggggtggaagctgcatttgaacagtaagcacatggttttactttagaatagatattaatttgcgtgggctttaatggggaaggtgctgaaattttggtgcactgaggctcacttcccagagccaccccttggtaccagcactaggggtgtgtgtatggttgtgtaagagtgtgtctgcaatgactttgagattctccccaaggtacaatgtatagttggcttgtagtataacagagtcatacagacaatgagtggtagacggagttttagagttcatttacttatttcataaatggttaccattcatctactatggctctttgttaggtacatgatctaaaaagatgactaagatatctcatcagttagggaccaagcacgtcacaatcaaattagtataattcgaggagagctttttgacaaaaggactatttaaaactgtgtggttcagtttaggagaaccttagaaagtggtacagaggaaaaccacagcggggcactcatgctatggtttgaatgtttgtgttcctccaaaattcctattgaaacgatctccagtgcaatagtattaagtggtggggcctttaggagatgatcaggccgtgagggctctgcccttatgaatgagattactgcccttatgaaaaggtttgaggaggtagtccctttttgccctttacccttctgccatatgagaacacagcaacaaggtgtcatctatggagcggagagcaaaccctgaccagatactgaatctgctggcgccatggtcttgagcttcccagtccccagaactgtgagaaataaatttctgtggtttataaattacccagtctaaggtattttgttatagcagcttgagtagcttgaaacaagtagttatcaccccctaggcctgaagggataacaagggagagtggtcatttaaatatggaaggagaatattggagagtgctgccttaaaggagaagacctttagtaagggacagaggaaacccaaggcaacatcacagggaggaagccaggggcatcaatactctgcctcactctccttcctttctcccatcaactgggtcttctattggtcaaatcccactgaacgcagaggacaagggagccctagtagggtagtccatagaggtcagtctccaggaccagagtgcagggtgagagagtggagtggatctggggagacaaagagaagatacctagtacagacaccaatccttcctataagagggctcagcctagtgaaaaagctcaacacataaaccaatgcaatcgattctcattgcttgtagattctgtattggtaaatttgtctactggataaaatttgtttataaccctaaaatcaatcctggaggcttttcctgcagtcattcatgacatgccaaagtgtggagcagtaaaaattttgcgttgctccatatacacattcccaactgaggtcaaacagagtggcgttcagctctcatgctgcaaacaagtggcttttctcagtctatttagtgacacattttctgcatttctgtactttttttctggtgattttgctgtttaaaatggcccccagccaggcacagtggctcacaactataatcccagcactttgaggggctaaggtgggtggatcacctgaggtcaggaatttgagaccagcctggccaacatatagtgaaaccctgtctctacttaaaaaatacaaaaattagttgggtgtagtggtgcatgcctgtagtcgcagctatttgggaagctgaggcaggagaatcgcttgaccctgggaggcggatgttgcagtgagacaagatcccgccactgtgctccagcctgggcgacagggcaagacttcatataaataaataaataaataaataaataaataaataaataaataaataaaacggcccccaaatgtagtgctgacatgctgtctagtgttcctaactgcaagaaagctgttagttcaataagtttaatgagggatgagttatagtactgttgactgtgagttcaatgttaataaatcaataatatatataaataagggttttttttaacagaaacatgcataaaacaaggttatgtattgattagttgacaaaagcgtggtgagcaggggcttgtaggaacctaaccctttatttcccctagaagcaatggttcagtatttgttaacttagtgttcacagcaactttatagaacataattactgaataataagaaccaactataattgcaaagagctgttgtaggttatgcgatgtagctatagtcacagcacagcaagagcacagagaattaagtaaacacatctaagggatcaggaagggcctcacaggggaagtgaagtttgagatgtgcattgaagggtaaataagagttcccaaaaaggagagggtctagaaggacatttcaggtggagaaatcagcaggcataaaaatgcatcttattccaacttcttctcctgcattattttcatgttacgtctaggacccttgaggcccaaaccaagtgctggccacaatcacgagagacaactgaaggagtcaagcacagttgaccttgaacaacatggaggttagcgatctcaaccccttgcactgtcgaaaatccacgtataattttttaatgctccaaaaacttaactgctaatagcctactgttgactgtatgccttactgataatgcaaactgttgattaacacaattttgcatcttatatttattatatactgtattcttataacaaacaaaatagctacagaaaagaaaatgttatttagaatatcaaatggaagagaaaatatatttagtattcattaaatggaggtggatcatcataaaggtcttcatcctcatcgtcttcacattgaaaaggttgaggagaaggaggaaaaggagagttggtcttgctatctcaaggctaatagaagcagaagaggtggaagcggaggcaggagaggcaggtacactcaatgtaactttacagaaatacatcgtaatttctgtctgaatttttgccttctcatttctctaaaaatgtttctgtataatacaaatccttctttcactatttgccttagtttcagtgcccacatcatagaagggtcatgtcataaaagaagtcgaaagtcatcttgagtaaccaaaaccctttgccagattgtctaacatcaatttgtgttctgatattgcctcttctacatcttcctcattgtctggcactggttcagtagcactcatctccatcaagttgtcatcttctgttaatccctctggagtggcatctattagctcttgatttctccaagatccatatgttgagacgcttcacacacacccctcacccacctttttgccatatgctcaatctctttcatgattttcttgattgactctgctgtaaatcctgtgaagttatgcacaacatctgaacacagttttctccagcagaaacttgttgttttgagattgatgactttaatagcttttcctgtaacaatgtggcatcttcaacagtgtaatccttccagactttcttgatgttctatcagggttctctttcatagcattgacaatcttttccaaagagtaccatatataatgggcattaaaggtccttatgacccccttatctagaggctggattagagatgtgtttgggggcaagtagaccactttgatgccttcagtgttgaactcatggggttctagataaccgaggggcatccttcaatatcaaaagaaccttgaaaggcagacctttagtggcaaggtacttcccgacttcagggacaaaacatcaatggaactgatccagaaagagttctcgttgtccaggccttcttgttgtacaaccaaaagactggcagctggtgtttaacattttccttcaaggcttgggggttttcagctttataggtaagggcagtcctgatgataagcttaactgcattgcacaaaacagcagagttagcctatcctttcctgtcttaaatcctggtgctcgcttcttttccttactaagcaatgttctttgtggcttttttttccccccagaatagggtactttcatccaaattaaaaacctgttcaggcaattagttatcctttctcctccatgattttgttaatggcatctgataacttgtctgctatctcttggtcagcagaagctgcttctcctgttatcgtgacattttttaagccaaacctctttctaaaattatcaaaccatctttgctggcattaaattcttcagctttagatccttcacctttcttttgctttaaattgtcatataatgacttcactttttcctgacttatattagagtctatgggtacgtctttcttatagcaatctttatagcaacgcacccacctaaaacctgcattttcaatatgagctaaaatggtatttaacaaaaagtgcaaggttttcatacctgctgggagccgcagctacggcttcatgaattttctttccttctttctctctttctctttctttctttctttttacagtggtccttatgctaaattcattcatcttaaaatgatggacaactgcagctgcagacctcaatctatggtacatatcaagaaaattcagcttttttcttgtaatgttatgacttttctctgctttttgggaacactttcagcatcactagtgtcacttcatgtgggttccatggtgttattcaaggtttgctgtattacactaaacatgatgaaaaatgtttcatcatgagagatgaattgctcactcagagatgattagcatcacacagcacttgaagtggatactggcaacacttgagttcaccacaatagcaacaagagatggccacaggccaggcgtggtggcacacacctgtaatcctggcactttgggaggccgagacgggaggatcacctgagatcaggagttcgagaccagcctggctaacatggtgaaactacatctttactaaaaatacaaaaattagccaggtgtaggggcacatgcccataatcccagctactcgggaggctgaggcaggagaatcacttgaacctgggaggcggaggttgcagtgagccaagatcatgccactgcactccagcctgggcgacagagtgagactctgtctcaaaaagaaaatcataataataatcccatttttgagcatttattatgtaccagactctgcttagtgtgttacattatcatttcatataaccttcacaagaatctaagggatatacttttttgttttgttttgttttgctttgttttgatacagtgttttgctctgttgcccaggctggaatgcagccgcaccatctttgctcactgcaacctccacctcctgggctcaagcaattctcttgcctataaaatgaggcaattttgagcaagtggtcaggttctatctacagaatggccaatgtaaattctgtaactgaccatcaagtttatcttttcctgccacccacataaatacttagaaccaaatgtgttagcaagctcatagcaggtagagctgtgattgatttttgttttgtttacattttggtcttatgtacattcgattctccatctcatctctctactcttttccttctttttaaaaaatttcttgctgatttttaattttttaacataatgtattcctgtaacttacatttaatatgtttttagaataaggtagcatattagtaaacaaatggacttagcttggaagagggaaagtgaggctgtatgagattgtggtaaaaagcatgggtttgacttcactaccttgggcaaattattaaaccttaattgcctcaattataaaaatgggaaaaatgattgtattttccttatagaaaaattacgaaaaattaaatgaggtaatgtacttggtaaatgttagccattattattattatcattatttatgttttcccttcatgcccattccagatacttcattactggtgtctataaagcagggtctcctgatagttttaaaatacatatatatatatattttttttttttttttgagacagagttttgctcttgttgcccaggctggagtgcaacagtgtgatctcggctcactacaacttccacctcccgggttcaagcaattctgcctcaccctcctgagtagctgggattacaggcgctcgccaccatgcccagctaattttttgtatttttagtagaaactgggtttcactatgttggccaggctggtctcgaactcctgacctcaggcaatccacctgcctcggcctcccaaagtgctgggattataacttgaagcttttctaaaacacaaggtaatgttgccacatggacaacacgtgggccacagctttgcaagtaccaaagcaattcttattgatatcctctaccatttcattgctgatgcacagcttggggttggatgtgaaggaaatctgaaggcagtagacagacagctatacatttcagtggcaaagtttaaaaatgtcacctatgggtgttcattccatccatttttactgaactcctgttaagtaccaggctccaaggatgcaatgggaaagcaagacagacatatccctgctcccttagattttatggtctcatggtggaatacagggaagtgtgttgacaattataatgc

SEQ ID NO: 1352 - DNA, 4366 bp, Homo sapiens
  misc_feature (2332)..(2332): n = a, g, c, or t.
tgcattctttgccccaaaactctttcctttggttgtgctaagaggtgatgcccaaggtgcaccacctttcaagaactggatcatgaacaactttatcctcctggaagaacagctcatcaagaaatcccaacaaaagagaagaacttctccctcgaactttaaagtccgcttcttcgtgttaaccaaagccagcctggcatactttgaagatcgtcatgggaagaagcgcacgctgaaggggtccattgagctctcccgaatcaaatgtgttgagattgtgaaaagtgacatcagcatcccatgccactataaatacccgtttcaggtggtgcatgacaactacctcctatatgtgtttgctccagatcgtgagagccggcagcgctgggtgctggcccttaaagaagaaacgaggaataataacagtttggtgcctaaatatcatcctaatttctggatggatgggaagtggaggtgctgttctcagctggagaagcttgcaacaggctgtgcccaatatgatccaaccaagaatgcttcaaagaagcctcttcctcctactcctgaagacaacaggcgaccactttgggaacctgaagaaactgtggtcattgccttatatgactaccaaaccaatgatcctcaggaactcgcactgcggcgcaacgaagagtactgcctgctggacagttctgagattcactggtggagagtccaggacaggaatgggcatgaaggatatgtaccaagcagttatctggtggaaaaatctccaaataatctggaaacctatgagtggtacaataagagtatcagccgagacaaagctgaaaaacttcttttggacacaggcaaagaaggagccttcatggtaagggattccaggactgcaggaacatacaccgtgtctgttttcaccaaggctgttgtaagtgagaacaatccctgtataaagcattatcacatcaaggaaacaaatgacaatcctaagcgatactatgtggctgaaaagtatgtgttcgattccatccctcttctcatcaactatcaccaacataatggaggaggcctggtgactcgactccggtatccagtttgttttgggaggcagaaagccccagttacagcagggctgagatacgggaaatgggtgatcgacccctcagagctcacttttgtgcaagagattggcagtgggcaatttgggttggtgcatctgggctactggctcaacaaggacaaggtggctatcaaaaccattcgggaaggggctatgtcagaagaggacttcatagaggaggctgaagtaatgatgaaactctctcatcccaaactggtgcagctgtatggggtgtgcctggagcaggcccccatctgcctggtgtttgagttcatggagcacggctgcctgtcagattatctacgcacccagcggggactttttgctgcagagaccctgctgggcatgtgtctggatgtgtgtgagggcatggcctacctggaagaggcatgtgtcatccacagagacttggctgccagaaattgtttggtgggagaaaaccaagtcatcaaggtgtctgactttgggatgacaaggttcgttctggatgatcagtacaccagttccacaggcaccaaattcccggtgaagtgggcatccccagaggttttctctttcagtcgctatagcagcaagtccgatgtgtggtcatttggtgtgctgatgtgggaagttttcagtgaaggcaaaatcccgtatgaaaaccgaagcaactcagaggtggtggaagacatcagtaccggatttcggttgtacaagccccggctggcctccacacacgtctaccagattatgaatcactgctggaaagagagaccagaagatcggccagccttctccagactgctgcgtcaactggctgaaattgcagaatcaggactttagtagagactgagtaccaggccacgggctgcagatcctgaatggaggaaggatatgtcctcattccatagagcattagaagctgccaccagcccaggaccctccagaggcagcctggcctgtggcatcagtccctgagtcaccatggaagcagcatcctgaccacagctggcagtcaagccacagctggagggtcagccaccaagctgggagctgagccagaacaggagtgatgtctctgcccttcctctagcctcttgtcacatgtggtgcacaaacctcaacctgacagctttcagacagcattcttgcacttcttagcaacagagagagacatgagtaagacccagattgctatttttattgttatttttaacatgaatctaaagnttatggttccagggactttttatttgacccaacaacacagtatcccaggatatggaggcaaggggaacaaagagcatgagtctttttccaagaaaactggtgagttaagtaagattagagtgagtgtgctctgttgctgtgatgctgtcagccacagcttcctgccgtagagaatgatagagcagctgctcacacaggaggccggatattctgagaagcagctttatgaggttttacagagtatgctgctacctctctccttgaagggagcatggcgagacccattggatggattggggtgaacagttcaggtcccatgcttggagcattgggtatctgatgtctgcaccagaacaagagaacctctgacggtggagaaccatgtggtgcaagaagagatcttaggtctcttcttttataccaagctcatcttttataccaagctgtgcaggtgactatgcctcctcttctgcacagaatgcttccaccagcatcctgagaagaaatgattacttctgaaaaacatccttttttccagcctctgggaatcagccccccctctctgcactatccgatcctcatcaacagagggcagcattgtgttggtcaatgttcccttggcgagcaattgaaacttgtttaggccctagggttgagcaattttaaggttgagactccaagtctcctaaaattctaggagagaaataaagagtctgtttttgctcaaaccatcaggatggaaacagtcaggcactgactggggtgcttccaagaggcatgagagtgcctactctggcttgagcacttctatatgcaaggtgaatatgtactgagctaggagacttccctgcaaaatctctgttcaccctgggttcacatccccatgaggtaatattattattcccattttacaaataatgtaactgaggctttaaaaagccaagacatctgcccaaagtgatggaactagaaagtctagagctggtattctagcccaaatctgtctgaccgcaatacacagattctttattcctattcgacactggcttctactgaaaatgaaacggattgcagagggaataaatacaaagatggaaagccagtaaagaagtcagtatagaaccactagcgaatagtgttgctctggcacagaccactgtggttgatggcatggccctccaacttggaataggattttccttttcctattctgtatccttaccttggtcatgttaatgactttggagttattcagttaatgaccctttaattctcacaaccaaccagtcatgttgcttgaagccatttatagacgagcttcaaagcaactttaaaagattcttctgtagaagtatgagttcttcctttaattatcattccaactttcagctgtagtcttcttgaacacttcatgaggagggacattccctgatataagagaggatggtgttgcaattggctctttctaaatcatgtgacgttttgactggcttgagattcagatgcataatttttaattataattattgtgaagtggagagcctcaagataaaactctgtcattcagaagatgattttactcagcttatccaaaattatctctgtttactttttagaattttgtacattatcttttgggatccttaattagagatgatttctggaacattcagtctagaaagaaaacattggaattgactgatctctgtggtttggtttagaaaattcccctgtgcatggtattacctttttcaagctcagattcatctaatcctcaactgtacatgtgtacattcttcacctcctggtgccctatcccgcaaaatgggcttcctgcctggtttttctcttctcacattttttaaatggtcccctgtgtttgtagagaactcccttatacagagttttggttctagttttatttcgtagattttgcattttgtaccttttgagactatgtatttatatttggatcagatgcatatttattaatgtacagtcactgctagtgttcaaaataaaaatgttacaaat

SEQ ID NO: 1353 - DNA, 1863 bp, Homo sapiens
atgaacaactttatcctcctggaagaacagctcatcaagaaatcccaacaaaagagaagaacttctccctcgaactttaaagtccgcttcttcgtgttaaccaaagccagcctggcatactttgaagatcgtcatgggaagaagcgcacgctgaaggggtccattgagctctcccgaatcaaatgtgttgagattgtgaaaagtgacatcagcatcccatgccactataaatacccgtttcaggtggtgcatgacaactacctcctatatgtgtttgctccagatcgtgagagccggcagcgctgggtgctggcccttaaagaagaaacgaggaataataacagtttggtgcctaaatatcatcctaatttctggatggatgggaagtggaggtgctgttctcagctggagaagcttgcaacaggctgtgcccaatatgatccaaccaagaatgcttcaaagaagcctcttcctcctactcctgaagacaacaggcgaccactttgggaacctgaagaaactgtggtcattgccttatatgactaccaaaccaatgatcctcaggaactcgcactgcggcgcaacgaagagtactgcctgctggacagttctgagattcactggtggagagtccaggacaggaatgggcatgaaggatatgtaccaagcagttatctggtggaaaaatctccaaataatctggaaacctatgagtggtacaataagagtatcagccgagacaaagctgaaaaacttcttttggacacaggcaaagaaggagccttcatggtaagggattccaggactgcaggaacatacaccgtgtctgttttcaccaaggctgttgtaagtgagaacaatccctgtataaagcattatcacatcaaggaaacaaatgacaatcctaagcgatactatgtggctgaaaagtatgtgttcgattccatccctcttctcatcaactatcaccaacataatggaggaggcctggtgactcgactccggtatccagtttgttttgggaggcagaaagccccagttacagcagggctgagatacgggaaatgggtgatcgacccctcagagctcacttttgtgcaagagattggcagtgggcaatttgggttggtgcatctgggctactggctcaacaaggacaaggtggctatcaaaaccattcgggaaggggctatgtcagaagaggacttcatagaggaggctgaagtaatgatgaaactctctcatcccaaactggtgcagctgtatggggtgtgcctggagcaggcccccatctgcctggtgtttgagttcatggagcacggctgcctgtcagattatctacgcacccagcggggactttttgctgcagagaccctgctgggcatgtgtctggatgtgtgtgagggcatggcctacctggaagaggcatgtgtcatccacagagacttggctgccagaaattgtttggtgggagaaaaccaagtcatcaaggtgtctgactttgggatgacaaggttcgttctggatgatcagtacaccagttccacaggcaccaaattcccggtgaagtgggcatccccagaggttttctctttcagtcgctatagcagcaagtccgatgtgtggtcatttggtgtgctgatgtgggaagttttcagtgaaggcaaaatcccgtatgaaaaccgaagcaactcagaggtggtggaagacatcagtaccggatttcggttgtacaagccccggctggcctccacacacgtctaccagattatgaatcactgctggaaagagagaccagaagatcggccagccttctccagactgctgcgtcaactggctgaaattgcagaatcaggactttag

SEQ ID NO: 1354 - DNA, 96597 bp, Mus musculus
  misc_feature (2986)..(3005): n = a, g, c, or t.
  misc_feature (7486)..(10000): n = a, g, c, or t.
  misc_feature (17313)..(17398): n = a, g, c, or t.
  misc_feature (22084)..(22138): n = a, g, c, or t.
  misc_feature (36130)..(36149): n = a, g, c, or t.
  misc_feature (51795)..(51825): n = a, g, c, or t.
  misc_feature (72322)..(72480): n = a, g, c, or t.
  misc_feature (95799)..(95818): n = a, g, c, or t.
agaaagagagacagagacagacagacagacacacacacacatggagcaggggaaagagggaaatatatccaaaaataatgaactaaaaacaatagcaacagtaatccccccgccccttaaaacatctttcaggacttataagcttgaaaccatgatcagaaaccatgatcaagagcttcgattgttcttatcaccagaatttccacggtcccaccaaacaggccgttctgcaggtacagttccctgcattcttcatcaagaccatgatcaaagtccaagctgggtgacctgcaaaacctcagatctctccctgccaaccaggcacctgtgttgagaaacaacccaccccatctttcatttctacaaatgtgcattgtgggattggtggtgaggtttttagtttacatctttaaatcttttaaaacatagaactttccattctcatccctgaaagtttacactttggtctctgcttaaatgacatgcaccactattataattgtgtatctacttttatgactttttagtgtgcataggcatgtcttgccttcattggtgcaaagagatgctagaagagattattgtaattccctgggaatgaggacggatgtgagccaccatatgagtgttgggaattgaacctgggtcctctggaagagtagcctgtgctcttaaccactgagccatctctccagcctccctgtatggtacttttgaacaatgcttatcttctacaacagccatacagttcttaaatggcgatttgcccttgactgctgccccagttcctagtagagtgggtgtcttgtgttgataacgtaagaaaactttttagtgaataaataaataatcaggatggggagactgctgagtaagtggagatgcccgctgccaagcccgctgccctgatttccatcccaagaccacatggcaggagagaactgactcccacaagctgtccatgccccacccttaataaatgaatgcaaaacaattagttaattaatcaacgaggtcctctaaaaagtgaagagcagtttagtagctatacttaggctgtatgagtctcttccctctaattaattcgctaatcagtttgcttctgatgaaatttcttccacctaactcaacctgatgacatttgcttgggtccagacacatgacccaacctgagccaatcagattcttccttcctagtaaacttggaactggactccagaggcaagcaatgagccttagatgtatctggatgaggggttggcggatgcttatgcagaggcggggcggggggagggggagagggttcccattctctctgtaaagaaaatcaacagtcagaaagtaaaacaaaagcctggtgtaacaacagtctccaatgctagctcttggaaggcagaaaaaggaggttcataggaacacatgcacccaggggggaaaatgtaaagcagacaatagtactaaatagagacaagagatattgcttgtattctcagagatttgctgcttcattcaagatgtccagttgtctgtgactccatgagaaactgctactatatgttataaatatatagagagccggtggtggtttcagtaaaaatatcccctgtagacccagggagtggcacttactaggtgtagccttgttggaagaagtgtgtcattgtggggacaggctttgaggtgtcagatgctcaaaccatgctcagtgtggtcctctcttcctactgcctgcctatcccgatatagaactctcagctccttctccagcaccacctctgcctgcatgctgccacgcttctcaccatgatgatgatggactgaacctctgagctgcaaaccagtcccaatgaaatgttttcctgtatagaagctgccatggtcttagtgtctcatcacaccaataataccctaactaaaacagagccccaccccatcctcttttagacaacggcagtcaacgtcaacctgagtcctggtgaagacacgcactgtgcctacttcaggaaggaagattagccaggttgattcatcaggttgatcacacacctttggcagattagttactgatgacagcccagctctcagccagatcaggtctgatgctaagcctttctatgactttgttacccattgggccagctctggagagacctcctgctttataaggaggaggcttatgctgaagtcagacttgaccttgaacccttgagtgtctcaactcttgtacctgaaaacaaacaaactcatgggttcaaacaggataaagaacagtgatttcaaaaataattctgaatagagacatgaaagaaaatggatggatgtggagttaaagttatccacccctttattaagtttgtaacctcaggctatatttttttaaaggaaaaaattgcttttgaattccccagtggactttttcctcccctgccccccccccctttttaatttgtcattcagtggccaagtcagggtttgctggcttctggaaaatccaggggattttgaaaatgaaaatctaaggtgtggctaaaagtatacagagtaatcttttatgccaaggggatgctgggcatctcctatgttagttaaggttcctattgctacaatgaaactccatgacctaaaggcactggggaaggagagggtttatttgattcggatgtccacatcagagatcatcactagaagaagtcagggcaggaatttaaacaggacaggaacctgaaggcaggagctgacacagaggccacttaggagtgctgcttactggcttgctctccatggcttgcttggcctgttcttctttctctctctctctttctttctctctctctctttctttctttctttctttctttctttctttctttctttctttctttctttctttcttcctttctttctttctttctttctttcttccttccttccttcctttccttccttccttccttccttcctttcctcctttctctctctctgtctnnnnnnnnnnnnnnnnnnnnttcctcctttctctctctctgtctctccctcccccctccctcccttcctttctttcttccttccttccttccttccatcccttccttcctttcttctttctttattctttaaaattttatttatttattatatgtaagtacactgtagctctcttcagacacaccagaagagggcatccaatctcattacagatggttgtgagccaccatgtggttgctggaatttgaactcaggacctctggaagagcagtcagtgctcttaactgctaagccatctctccagccacttggcctgttttcttaaggaacccaagaccactggcccagggatggtactacccataaagggctgggccctccctgtcaatcatcaattaagaaagtacctcactgccagttcttccctccattcagatggctctagcctagccaacactgttgagtagctaagatcagatactatggaatcttccacatcttcatttctgaaggccttaaaacagaacgcactagtctggggaccagatgtctgggcgggattagggatgctgcctagagttacagaacaatatttcttttcctctatgaatctaactgtgtttttggcttctttggttgttcaagctaccagatttccttctggtattctgggagcctggtcattttctaagactagaattccaagtgattctatcaaaaaacaaaacaaaacaaaacaaacaaacaaacaaacaaacaaacaaaacccaaaaaaacctgcaccataactcttaccagggtagagcaggaggttggggccctccctaggactgtgtgaagcagcagcaggggacctgcctgatgaaagttctatgtggggcatcagggagaggtggctttcaccggctgacggcttggcatacagccacaccttgttatcatgtctacaattagctgtggggccgtgtagacagggaaactctgctgccctgtctttttccacatccagcaaccaagagagaagaagcttatgaaggcaaatcttatacaccactgataggaattcaaggtagtgtaaccactgtggaagtcagcatggaagttcttcaaaaaaaactaaaactagaccttccagtgcaactcagccatattccatttctggatagtttacccataggactccaagcaagttcacagaggtggtcacccatcgatgtttaccgtagcattcttctcaaaagctagtttattaaagcaacgtatgtatccaggatcaaaggaaggaacaaagaaagcacggtgcttatgcaaggttcgtgccacttgcaggggatggaggcaactggggattgttttgacaaacaagtaaagacaaatattgtgtgctttctctcatatgtgattcctagatcttatatagtgtgatggtttgtatatgcttggcccagggagtagcagaaggtgtggccctgttggagtaggtgtggccttgttggagtaggtgtgtcaccgtgggagtaggtgtggccttggagtgggtgtgtcactgtgggaatgggctttaagaccctcttcctagctgcctggaagccagtattctcctaacaaccttcagatgaacacatagaactctcagctcctcctgcaccatgcctgcctgaacgctgccatgttcccgccttgatgataatggactgaacctctgaacctgtaagccagccccaattaaatgttgttcttataagatttgccttggtcatggtgtctgttcacagcagtaaaaccctaactaagacatatagatatataaaatcacacacatatacatatgtctacatagaactaaaactatctagggcagtgcctctcaacctgtgggtcgtatatcagacaccttgcttatcattatttacattacaattcataactagcaaaatcacagttatgaggtagcagtaataattttatggtggggggggttcaccacaacatggagaactgtattaaagagtcacagtattaggaaggttgagaaccactggtctaggggaacaaagagctttgggattatagggggaacactcaacatcaaatacatatttgtatgagaatgtccttgtgtaacataggaccatgtataatgaatagacacagtgaaaaatattttaatttaaaaaattgtgtgtgtgggcccatgaattgactcatgtgtctctgtgtgtgtctcatgtagctaagactagccttgaactcttgatccttctgtctgtacccctcccaagtgctagcattaagggctgtaccagaacatcagctgggtatggtagtgcataccttcaattccagcaactgggagcccgaggcagatgagtctctgtgagtttgaaattagtctgatcgatctacaaggtgagttctaggagagccagggctacctactgagaccttgtcagagggttggagagatggatcagtgtgcaagagcactggctgctcttgcagaggacccaggtttgaatcccagcattcacacggcagctaacaactgtatgtaaccaaagttccgggggattcgatgatcttcaggccttcctgtgcactcatgtggtgtgcagacacacaggcagacaaaacacccacacaaattaaataaataagtgtgtgttgtttttaaaaaaagaaagaaaggaaaggaaaaagaaaaaaatcaaactagcaaacgactttcctgagaagttgacgtcactttctactccgatccagggagccgggggcatcctctgggtacgccctaaacacaagttagtgggcagggccagttccaagatgaacttgcaagaaggggagggggagaaactgagcaagaagtatgaaccctggcagttttttcatgccaggccccgtatgtccccaccaggggtcagccagggtctggaaggcagatgttgccctggccagctgttggaattaacagagtcaacgtcactttggtctggagggagccccaaaatttcactcagatttgcacatctctatttaagaccttattccgcagagcagttatccaccgtcattgaatatgtctagaaggggactgactagaaagatcggcacggtgctccatacactgtcttactgggggtgggtgggggggcaggcagcaggagtcaagggggcagaaatgcttcagttgagggtagggagagaccgagctggaagtatgatgtttttgtgcaccatggaaaggttatcctgtgttatttgaatgttgattttttggccctcatatctaagtttccatcctgacatagcattgaaatgcttaggtggagaatcgcctctctcactgcgcagtggtggcacacacctttaatcccagcatttgggaggtagaggcaggcagatttctgagtttgaggccagcctgatctacagcatgagttccaggacagccagggctacagagagaaaccctgtcttgaaaaaccaaaataaataaataaataataaaaataaataataaaaagaatctcccatctcaagtttgtgtaagcaagtcttatcatttattccctgccttgttgataaatgctgatgaagtatcaaagatgacttggggctggactggcatccttcggcaagcagctcagggctgagcatatatcctgggtgagcaagccttgttcaggaagtcaggctcagctctgacattccctgttaaccaaatacccctgccccgggggagtgccttcttgccttccatcagcactgcaactgtctttgaggtagagaaaccctgtgtctggtgtcaatactcttgcatccatccagtttgtgagtgtttaggtgtgtatgtgtctatgtccatgtgtatgtgtatcctttagtgcaagatgtctgatatccaccttattccttgagacaggatctctcactgaacccacaacttattgtttctgagctagctggctggccatcaagacctggaatcctcgtcctaactctgtcccatatagtgctaaggtcacaggctcgtggccacacctggcttttaccttagtactgaggaatctaaactctggtagtcatgtgtgctcaccggcactctttaaacttttatgtgtataagtgttttgcctgcgtgtatgtatgtacaccacgctgggtgcccaaagaggtcagaagagggcgtctgatcccgtgagttatgggtggttgtgaatcattggggaactggactcagagctgtcttttctccagccccctccgccagtgctcttcctgaagaaaatgcagaagtctcagagtggcccagggcttctgacaagggggaaaaaagtcactaaatcctttgcccacatttcggatgctttccactagacgcaagcacaaaacacaaaacattactgtattgtgaaacaattggattcgttttgaaaacacctactccgttaaatatttgaaagtagaacaggaaaaaaaagatgaaatcggtgtgtgnnnnnnnnnnnnnnnnnnnnnnnnnnnnnnnnnnnnnnnnnnnnnnnnnnnnnnnnnnnnnnnnnnnnnnnnnnnnnnnnnnnnnnnnnnnnnnnnnnnnnnnnnnnnnnnnnnnnnnnnnnnnnnnnnnnnnnnnnnnnnnnnnnnnnnnnnnnnnnnnnnnnnnnnnnnnnnnnnnnnnnnnnnnnnnnnnnnnnnnnnnnnnnnnnnnnnnnnnnnnnnnnnnnnnnnnnnnnnnnnnnnnnnnnnnnnnnnnnnnnnnnnnnnnnnnnnnnnnnnnnnnnnnnnnnnnnnnnnnnnnnnnnnnnnnnnnnnnnnnnnnnnnnnnnnnnnnnnnnnnnnnnnnnnnnnnnnnnnnnnnnnnnnnnnnnnnnnnnnnnnnnnnnnnnnnnnnnnnnnnnnnnnnnnnnnnnnnnnnnnnnnnnnnnnnnnnnnnnnnnnnnnnnnnnnnnnnnnnnnnnnnnnnnnnnnnnnnnnnnnnnnnnnnnnnnnnnnnnnnnnnnnnnnnnnnnnnnnnnnnnnnnnnnnnnnnnnnnnnnnnnnnnnnnnnnnnnnnnnnnnnnnnnnnnnnnnnnnnnnnnnnnnnnnnnnnnnnnnnnnnnnnnnnnnnnnnnnnnnnnnnnnnnnnnnnnnnnnnnnnnnnnnnnnnnnnnnnnnnnnnnnnnnnnnnnnnnnnnnnnnnnnnnnnnnnnnnnnnnnnnnnnnnnnnnnnnnnnnnnnnnnnnnnnnnnnnnnnnnnnnnnnnnnnnnnnnnnnnnnnnnnnnnnnnnnnnnnnnnnnnnnnnnnnnnnnnnnnnnnnnnnnnnnnnnnnnnnnnnnnnnnnnnnnnnnnnnnnnnnnnnnnnnnnnnnnnnnnnnnnnnnnnnnnnnnnnnnnnnnnnnnnnnnnnnnnnnnnnnnnnnnnnnnnnnnnnnnnnnnnnnnnnnnnnnnnnnnnnnnnnnnnnnnnnnnnnnnnnnnnnnnnnnnnnnnnnnnnnnnnnnnnnnnnnnnnnnnnnnnnnnnnnnnnnnnnnnnnnnnnnnnnnnnnnnnnnnnnnnnnnnnnnnnnnnnnnnnnnnnnnnnnnnnnnnnnnnnnnnnnnnnnnnnnnnnnnnnnnnnnnnnnnnnnnnnnnnnnnnnnnnnnnnnnnnnnnnnnnnnnnnnnnnnnnnnnnnnnnnnnnnnnnnnnnnnnnnnnnnnnnnnnnnnnnnnnnnnnnnnnnnnnnnnnnnnnnnnnnnnnnnnnnnnnnnnnnnnnnnnnnnnnnnnnnnnnnnnnnnnnnnnnnnnnnnnnnnnnnnnnnnnnnnnnnnnnnnnnnnnnnnnnnnnnnnnnnnnnnnnnnnnnnnnnnnnnnnnnnnnnnnnnnnnnnnnnnnnnnnnnnnnnnnnnnnnnnnnnnnnnnnnnnnnnnnnnnnnnnnnnnnnnnnnnnnnnnnnnnnnnnnnnnnnnnnnnnnnnnnnnnnnnnnnnnnnnnnnnnnnnnnnnnnnnnnnnnnnnnnnnnnnnnnnnnnnnnnnnnnnnnnnnnnnnnnnnnnnnnnnnnnnnnnnnnnnnnnnnnnnnnnnnnnnnnnnnnnnnnnnnnnnnnnnnnnnnnnnnnnnnnnnnnnnnnnnnnnnnnnnnnnnnnnnnnnnnnnnnnnnnnnnnnnnnnnnnnnnnnnnnnnnnnnnnnnnnnnnnnnnnnnnnnnnnnnnnnnnnnnnnnnnnnnnnnnnnnnnnnnnnnnnnnnnnnnnnnnnnnnnnnnnnnnnnnnnnnnnnnnnnnnnnnnnnnnnnnnnnnnnnnnnnnnnnnnnnnnnnnnnnnnnnnnnnnnnnnnnnnnnnnnnnnnnnnnnnnnnnnnnnnnnnnnnnnnnnnnnnnnnnnnnnnnnnnnnnnnnnnnnnnnnnnnnnnnnnnnnnnnnnnnnnnnnnnnnnnnnnnnnnnnnnnnnnnnnnnnnnnnnnnnnnnnnnnnnnnnnnnnnnnnnnnnnnnnnnnnnnnnnnnnnnnnnnnnnnnnnnnnnnnnnnnnnnnnnnnnnnnnnnnnnnnnnnnnnnnnnnnnnnnnnnnnnnnnnnnnnnnnnnnnnnnnnnnnnnnnnnnnnnnnnnnnnnnnnnnnnnnnnnnnnnnnnnnnnnnnnnnnnnnnnnnnnnnnnnnnnnnnnnnnnnnnnnnnnnnnnnnnnnnnnnnnnnnnnnnnnnnnnnnnnnnnnnnnnnnnnnnnnnnnnnnnnnnnnnnnnnnnnnnnnnnnnnnnnnnnnnnnnnnnnnnnnnnnnnnnnnnnnnnnnnnnnnnnnnnnnnnnnnnnnnnnnnnnnnnnnnnnnnnnnnnnnnnnnnnnnnnnnnnnnnnnnnnnnnnnnnnnnnnnnnnnnnnnnnnnnnnnnnnnnnnnnnnnnnnnnnnnnnnnnnnnnnnnnnnnnnnnnnnnnnnnnnnnnnnnnnnnnnnnnnnnnnnnnnnnnnnnnnnnnnnnnnnnnnnnnnnnnnnnnnnnnnnnnnnnnnnnnnnnnnnnnnnnnnnnnnnnnnnnnnnnnnnnnnnnnnnnnnnnnnnnnnnnnnnnngcaggcgagcggagcgcggcggcgcgggtagggaaggggcgcgcggcaggcccacgggaccagcctgggacgcacggagccctcgtgccctccgggacagtcgcctgccccggagcctcagctgtaggcgcccggagcctcggcggcgagtagcgcgtggggcaggggtggcgtgtaactgcaggaaccggggcaaccggagaaggagccggaacccggccgggatgagaaggtgacgccgccggggggcgccactcgctttgtggggaagatgctcgcctactgcgtgcaagatgccaccgtggtggacgtggagaagcggaggagcccctctaaacactatgtgagtactgcttccaccgaccccggcggggggctggccagtcccggagattcacgcccccaggggcagcctttgactccagagtttgttcgcagggctgtgatctctagggaagccttttctgcccttcttccactcccctgtcccgggtttctttttttggcattgcaattggcaagtggctgcccttgtctgttacaacggtgaagtcatgtgtccgcccgctgcttggatggttggtgggggaagctttcgtcagccccttgcagagcatttagttcctttgggaaggagcatctttgccgcgctccctaggggagccgggcactcacgctcactcggcccggaatgctttccgttgctttgaccagagacccacacttctctttctgctttccacgtttgctgttctgcctgcaccggctggggacagaggaagcgctttgccccctgccccctccactcttcgtttcgagctttgatttccttcttaaaaccattgtgttccgcggtgtgaggagaattgtggcttttccttttatccctcctctggacgtgacccttcgctggggtcatttcctcgtgtaagtgatgctctgactccagacacgagtaggcaaatgtggtctgtggtctccgaggcacggttgactggcccgccgcccctcccccttctttacccaaacttaatgagaagaggctaaggttgaccagctgggctttagagtgtgtgacagtactctttcatctcagccggtcctgtctcccagtcctttacacctttggaagtaaacattgtgtccttgttgctttaggatgacttgccgagctctgctcctggagatagaagagactcacagtaaagaacccaaaacacagaaaacatggagacagtaagggcagcctcttatttgcaaattaggcatttaaaggcgtatttagaatgctcaaagcattaattttaacaattaaaacgggctgttggtggctgccctagattgcacattagtctccaaagtgccttctatttcactgttggaaggaggctggggctggtggtgtcataccagccggaggctactctttctgtcaggatcacagcagacttgaaggcagagttctctgcagttgactagtggggctggactcaggttgggaagaaggtaagagtggtcagaccggagagacggatctgtggggggcattccctgacacagtcagagatcctttccaattgtgtagtctagtgtcgaaagcctctacagccgttgcaaaaacaaaacaaaaaatcccagatttcctccaggagctgtggaggcagctaagtaggagagcccttgactagcgagtttggagagagagagagagagagagagagagagagagagagagagagagagagagagagagacggagagacggagagggagaaagaaagaagagaagagaagagaagagaagagaagagaagagagtgtgtgtggttggagggcttcgatcagcaggtggccactctgctctaaggacaggtatccatttgtacaactctgggttatgtatgctgccaaccatcttgacaactttggggggcactgcaggctgtcttaaggattgttttatatatattttttcagccttcagttgaggctggtactgctttcaatgatggcagactctgccctgagaccctagcaggcgactttccaggtctgggttttacatgaaacatccaatttaactttgagcagctaagcccaaggttacaatgtaagatacactggcagcaaagtagcagccaacaggaccaagacctgctgttggaagtatggaaaggcaggtcaggctactgtttgatctttttaaaaggcttacccactgcacaacatggtacacattctttaaaactccactggggcacagtttccttgtattgaaaacaaaattaaattcttttatgtgtacaggtgttttgcttgcatgtatgtctgtgctccacttgcatgcagtacctgcagaaagccaggagagggtgtaggtttccctggagctagaattacagacaggtgtgaatgattgggtgggtgccgagaattgaaccgggtcccctggaagagctgccagtgcttataaccgctgagccatctctcaggctctagttcctcacttttaaagtgagggtaataatagcgtgtacttcatagggctgtcaagagacttaaatgacatcacccctgggaaggacttagcccagttctgggtacatagtgagtgctcatcaaatattagctaactgttggcgagactctgacaaagaaagtttctgacctaaaggaagagagacttggcgttttaagattgataataacgtgtactgtgtggaaaatacaaaagaagtcctgttcacttcccttgaaatggtcatttcctccctttctgcagacagagtgtttcctgggtcatctccacttccgtgtgagaatgaatggatgatgtgattcttggggcggagagtgacgtcacccagcagatgggatcacgcagagttctagaaaacaatgaacggagtgtgctatatgttgtggccttgtggagctggccgggggcagatggctcatctggtgcaaccttttacttaacagataaggggatgacagagaagcaggtgtgttagctagtcacagcactggggctaacggacggacttccagcctgtggtgtgggtgaagataccccaaatctggttgaagttgacaaagaagagagatacactgctacacagtttgagcactgatatataatacactggtgcccaataattgaaagagttcaggagggctctcgggcagttttgttttttttttttctatacctcttgtatagtagataccccatcctggaagggcaagtgttgtgaaagaggcattccagcatggttagccggcaggacaccttgtacatatgtgtggtaaaccccacactgggaaagcatgtctccttccatgcctgcttcgatggagtgccgagcctgtgctttggcaaatcgcagagcagagtttttttttttttttttttttttttttaatggatgtgcacattagccagagcttgcagatgagggaggcttggagcccatgcaggagggacagcactggctccagaacactggggaacacatgaaaaggttctctcaggacaccaaccggagggtgtgcacatccccacaaggagggggagctaaagaggtgggggggtgtatttctgtgctttgggtctgtttataaaaggcagacaaatagcctccatcttccatgctgttcgtagtgcaggcagcactccacttccttcctctctgccagcccctgccccgggtggggctgggaaggatgagcacccgctgcttgggtcagcctccctgcttgggagaccttaggtaaacgggcgttggcctcagaccctgtttctttaagatggctctgcagatgccagatgcaaaccatagccacctccgtcggagggcttgccggtgtaagttggaaagcagacttctttgcgcgcacaggtgtgtataggtgtgtttggagccatatggtggcggggagacgcttgtttatctgaagcaaaggagacatcatgtctgtttggatttgggaggtgttttgctttcacggtcatttccttccctgagtgtttatttcagacaaataccagtcgtgaatgctctgatcctccacaggactctagggaatgcaaataagagccagtgtcagcagctacttccatggtgccggatgctaacaggcatgctctccagggagcctgatgcttcatttactgtactggcgtgtctgtgtgtgtgtgtgtgtgtgtgtgtctgtgtgttgctctgatccttattacagatggattgaccaaagcttggtgaagttaaagttgcttaggattccactcagcttcagtgggatctaggtaaacacaggttagtttactgcccaaggagaagcccaagacagggctcttcccactcggacggtgagtgagtccaggctcagacccgtgtgacggtgagagagtggtgatacagggtggcatttgagggctgtctttctggaaaggttgctcatcatgtgtcatgaaactgggcttgactggtggacggagaggttcctgggagaacagggtctgtctccagtgagtgctggaaagatagatgcagggcagacctgtgagactaatgcattttccctgatttccatcatggcagattgtgtttgctgtcccaggagtggtgcgtttaggaatcggtatcaaaccccttcatgcctctgctcttcatttttatttcctgagcccgagattatggttccagcctcactggagcgagaagggcagcctcacagttggaaagagccttcttttttagggccttgaatcatggaagaagtgagagcaggcagattggggttcaaataccgcctctggcactcccaaacagtacaagcttggatccctgactccaggctcagcatcctcacctgtaactaggcagagaagaaggcccagctgttgagggtctgatgggacggacactgggccgcctgcctcgtggaaagcacccagtgtacatgacaccagagcacagaggacagctgtccagacctggagggggtgctggcctagtgttggggcctagtgtgagattgttagatttctgataagctgaggagagaaagaaggtgggctggtgggctggtagagaaggggaggctccaggtaaggacaaggaggctcctagctaggagatgagcgccacacagagcctgctccccatctgcctgcttctgggagtgtgactctcttacacacacacacacacacacacacacacacacacacacacacacacgaatgggaaccgtttcttctctatagagggaagtgatctggtggtgaatcacagggctgatgaggttccccgttcatggaacaaccaaccacatccttcaagaccgttgggacagggagcagagccagccgtccctcatggctcactctgttcagggttgagtgtgagggatattttgaggggagagggcaagccagggttggagtcaccgtgtgtggtggcaggcggaggggaagggaagggaaaaataaacctatttgatgtcaagtaagaccggctccagcttcagaaatatgagcgccagctattgcgttttccaaagagctattctggggccagctgagttaatgggcagtgggggctgtggactaggggatggatgctggggaacttctgacttagggtttgcctggccatccctggaaattgccttctaatttcctcatcctgagtcacagagtccttggccagaaaagcctaacaggcaactctgttctcttttgcctcctaattaaagaaaataaaacgactaacggagttatccgtacagcagtcacgcttactcgtcattagtgctgagaatccaggaaagagatcatgggccgggacagaactccagggacaggaaggacaaggggtgtgtgtgggaaacgaggtggagattctggctttggaaataggttctgagtgagggccagcggtgttctctgtcctgacaattgccaaaaataatggaagcttccaacagggtggtcagtgtttggacaggctggtccccagagtgcgagctgcctccagcctggttgggctggggggacaggagctgtaggcaagcaggtgaatggagagggtcaggggcttggactagtgggcaggccactgagaggcctcagataacctcaggcaagtcgccatggtagcagcagggactaagccctgttatatacacagggctgaccagagtccagccaggaccttgcaaagcacagcaaacgggttaggaactgacctgaggatctatgagggccagacacggcaacagtgctgacactgagggcgcttcacgatccccgtgtgggggaggtggttttgtgcctattttataggtgtcgaaatggaagttacacacccttagggtggttctgaggcagggctgtgattctcacctcgacccctaacaagttggccagctgccactagattctccagctgagatgagccagggagagatgacaggccaatccaggcagagtgtcctaaggagtgagaggcactccagtgctgggtcacctggcctgtcgtcatcactcactgccatgccgtgtctcggtttccacatctgcaaacagtgaaacagtgtaggtgaaaagaggacccagttccagggtcccaggagaaatcagatgagtttatcctgacaagggttctagaacggtgcccgcaggtcagacgtacgagattagaatctgcctgactggttcagtcccaaagcaggaagacctctccgtgaactggagttcccaggggaggcaggtggatggagaaggcggcggccgctttggtggtggggcttgggtgtgatgagcgttggctgggagaggaggaatggaatgaccagaagacagtccaggggagggaaagtgacgccctacaggaaacatttatgcgggacccaggatggactcacccaccatgaccgtgggtgagaaggagaacggagcatatgaggaaggtcaggtcctcaggtggcagccaaagagattcagtgcgccaagcactggggaggtggagacgcggggcccttggagtttgctagtgacctagtctagccaacgtgaggattttttttttttttgaggacaagatgcctgccgccaactctgacagcctcattttggtccctgagactcacatggagatggaggggattgatttctgtaagttgtctatgacttacacccgagtgcgtgtacatgtacacacaaactcacacactcacacacacagagacacaaatacatacatacacacacacacacacacacacacacacacacacacacacannnnnnnnnnnnnnnnnnnnnnnnnnnnnnnnnnnnnnnnnnnnnnnnnnnnnnnnnnnnnnnnnnnnnnnnnnnnnnnnnnnnnnggagggagggatggagagagggaggaagggagggaggggaagaacgcattctgactgcagggctgtgttggtcagtgctagggcttctaggtgtgccttgggggtcttgagttcgctggatcccagcccctttagttcatagcctttactcctagtggccggactgccatttcaaagttgattgcacccagtgctcttggggaaacagggctgcagaggagaaggggacgctcccaggagtgaggcagtggctgcttcagatctcaacagtgcatggctgggggtgggggtggggcaggggcagcagcgtttcagaggaatcctttccacccaagctgtctggtgtccagacaaagacagggcttgccttcgattctgaatagctcaatgggagatatccacccctctggactcaaagttttatgtacagtgcttcatactatctcttcagtcttttgatcccctacagtacactcctatatcccagtaccctgcttctttgggggtgattgtcctaatagaaataacagctcctggttaggatactctcttttcaaaaccatttaaaactgcttctttgacagcttcatacacgtatacaaagtatcgtgatcaacccccctcctctcctccatcctccctccctccttccctgccagtatgtctcccccaccttcttgccccgtttccttccataactcagtgtctaatgaaccacttactcactggtgagtcgatgtggggccatccattggagcatgagcaacttgccacactgagaaaactgactctctgtttccaggagttaccaacggtcagtagcatttcagctagggtgtgggggggtctcctgagcccccgccccatccatgttggaatgtctactggtttgatcttgtgcaggtcttattcaggtaaccccaactgttatgaattcatgattgccctggccctgtaacatccagaaggtgttctctctctccctctctctctctctctctctctctctctctcacacacacacacacacacacacacacacacacacacagcactcctccctgacttttagctcttagtattctctctgccttgtcttctttgtatgatggtgatagccttgtgtgtaatactttctatgtgccaaaggatattctccaaacagcttcacactttataaagctgctgccggcatccacagggtacaggtgagaatgtctaacctcatagctgcaccaggtcccaagactcccgaacgtgccttgtctgtagattcggttgcttccaagtagcacatttcactcccagaaggactagatggtcgtaggccattcagtctgaggccttggttgcttggctttccacgaacaagtcaccttttccccctttacagtccccttgcctatctagaatggctgctgccctttggatctgcctcatagagggatgcgtcaggtatgaaaggggccccctggcttcccaagctgtatcttcctaagttggtacaggcaatattatggcagaaagctcttctggatgtctggagactctctcagcaaggctcacctgaccagtttcttcctgagaaggttcacagccagggctgtcctgggcacacattgggtcctcagtggagatcttctatggcacaacccttcgactacttttctatttccgtgcctccacccttacctgagggggaagtgacacccaggtggctgagttagcagagaggaaacagctgcgcttctgctcctcctctgggctttctttggccccttccctgtcacttccctttgtccagtaaggaaaccaccctccccaggcctgggcggaggtacacacgggatggggcagagtcctttcctctgtgtgcactaagtcagagagggcctctgaaccagcgctgggatccctaaagtgtgggtgaccttcagatgtggcggaaagtgatcgctcttatcaatccgaccataactccggggaggaaggggtggtgataatgagtgtacctcctaggtggggtaaggaaccgaggggctgtgcactgggttgaacctctgtccttttattgtacagcgcctggtagagcatcctccactctcaagtaatctacttagttgatggagaattcgccctgtattacgtcaccgccattcactgctgccatttagtctgtgccaggcacctccagacctctgatttataatcagagttgcctttctaatgccattggacttacggctgcagtttagagagtagcagtctcattgtcagtaaaggacatatttgggcatatttgtcccttcccctggcctgtgcctggtctctgtcaccttacttcacacacttggactctctccagggctgccccaggggtcatggggacttcgaagcccaatgtgctgtcctaaggagcctgccccttgttggaaaccctgcctcatggctttgcctacctaggggttctgagtgaataggggctgtccctgtcctttgaagtaactcctttgtaaacctttcagggtaggtccagttctgatccagctttagtctgtttcctggtggctggaacccaaaaagctattttaagggactcgcctgtgtgggagaatttctctgagtgacagcagagaggaggcctagccgactggcacaggcctggcgtgaggctccgagaggggagctctctcctgaattctacctcccaggcaggggctgatggggcgctttggcacagactgcctcttggaggggacaccagctcttactggtgagattggggtatgcagggatggctgctggttcatccccagtgggttggtccaccaatccttctcacacacagttaaagtcacccagaacaatgtctgagctttgctttcaagctgggattaattatgtcagtcatttctcattggcagctagagcaaaagagcttcgcttcccactgtgctttctgagggtcagacccgggaagtgggtgcaccgagacaagaggaagtttatgggggagccctgcaaagcacagccactgagctagggggcttacgtccaggagaccctggccattgctgaagatagggcatctttcttctgtccctggtgcttacgtggtagaagtcaaggcttaaacccagatctctgcagtgacagaggagtgagttttctgctgtacaccagagagttggtggactgccctggacagtgggcccttacgtgagagtgtgccatccaacttctctatcccctgtcactaggctggaagcatccacagcagggtcaaacctagcagcattcggcctttctcatctctggactcttgttctggtccttgtggatgctccctggtgtgttcccaaggccatctcctccctactgtgcggtctactgagtacagaacagggtggtgtcctggtctcatagggaatggagtgacgagaaaagggatatcctgccgtgggtgccctacggctcttaagatgtcccttctggtggcttcccaggaggcaggagcctaagggactcatcacatggaccccagacagaattcccagggtcatggatgaccgctgcaattcacctgcccgctctgatctctgagcccctgcattaacaccgtgtggttgcagctggcaattgagataaacttcaaagtggtccagagccacttttgaatccggctgccaggggctctctgtctttcctttcttttcctttcttttcctttcctttcctttcctttcctttcctttcctttcctttcctttcctttcctttcctttccttttctttcttttcttttcttttcttttttttttggtttttcgagacagggtttctctgtgtagctctggctatcctagaactcactttgtaggccaggctggcctcgaactcagaaatctgcctgcctctgcctcccgagtgctgggattaaaggcgtgcgccaccacacccagctctctgtcctttctttagagatgatgactctcgtggcattgtggttgggatcaggggacagtttaagtcattaagtcattctcatcctgacgcttgctaaggtaaatccaagctctaggacctagagtgacctccggagagacttgggtggcagccagcagaagcagggagccagaggatgtaggacgggtgctgacagcctcttccacgtgggctgaggtgaggacttggaaaatcagtcctgagttgtggccttggctctctctgccttgctggtttcacgtggtcacctttgttcaagcccatgggcttccgtttctgctgaaatgatgataatcatcctaatacttagctcatgtggtttgtgactctttatgatgatcagaggttcgataggtgtcagctgttgttattaccaccgttatcatccttcatgatttttttttaattaccttctagaagcttctctgacctcacatcttaggaatatttcctgcgaggtattagcgttttgagtgacctgaggttggtcagctcttagcaagctgtaaacttacaggtcgtccatttgtccagtatttggaatgtttcctaggctccaggcagggtgaacacaatggggtggcctggctctgtgccctcgatattctcatgggaaagggaaacactacacaaacaatcagataaaaatatattgtacacgaggtgcgggataaacactgnnnnnnnnnnnnnnnnnnnnnnnnnnnnnnnnnnnnnnnnnnnnnnnnnnnnnnntaggtgaggcggttattggaggagggttggtgtcctagtgtacagagaggtggcaggtatggccctaaggagaggtgacttttgaataggacttgagagttgaggcagtgaggcattatgggtatgtgagagaaagtagttgtggggcgtgggggaccaacaagtgctaaggccctgaggtagagtggcagccgtcctttccaagatggagcaagggggctggggtgtttatgttttggtgtgagagtgtgtgtgtacacgcatgagagggcaggatggagtccctgtccctcccatcctgggagtggcctcctctgctctgcagtgccagcttcctgatgtcttgtggaagactcagactggccactacactgcttggggtttgatcctgactccctaggaagacacagtctccatcagcagtgacgtgggtggggacccccggaccccagaagcattggcatctgtagggagatgtatgggctggaagttaatcttcaacctactgcgtgccaggtgctgcagtaaaagccaagatgtcagctgtgcgtgaccacagcagtctttctctttcatgtcccttattccatccagcagaggtcatggtgggccctggagcagtgtggtgaaacctgtgggctgaggctttgtcccgtggaaatcttttctctcaccccacgcttagcactgttgtggttggatgttaaagcacacatctctccaggtgtccatctctccatcacacatctgatgtgagtgatgtcaagatgctatcagctgagctcactgaaacctctgtcctccttggagtagatagaactgtgaccagagaaccaggtgtctctgttaattaactccattgcagactaaccggggaacgtaaaatctaccttgtgatggccagggaaactgtcttccagagcgcgctcgcgggggtggggggtgggggttaaataataaatacaatagtgccaactttcgtaagtacctgactcatttagctgtgagaaaggcatagcacagtccttgctatgcagtcaagggaccagagtcaggcaaagactgacctatcgatggtcaccagccaggaagaggtaatgtggggactaaggcttgcctggttgctcctcagccttttagagaatcctcctattcagtcacaccctgctgccccatagatctctacttgaaagaggggagttaaccagcaagcctcaggataagaggacaaaagtcacaaaagccacaggaggccagcccctctcctttctttagacaggaaaaaccatttgttatgggaacgccacactgcaggggtctggctttgttgtgtggggttgtcttcctgggtggggaccctgttggtggagggccatttagggtgtctagcaagattcttttgacacctagtcctaaggggaaggccagcaggtggctggggcagtgcggtccttgcgagagggcaggacattctatcttgttctctttggaactaaacaggtcttaactagtccttgggcccagaataaacagcagctgttgctggctccacccctgcgacgccagtctattaacagcttagccctgactcccttgggttcagtagcactggggttgggatggagccttgcattacagagcctacctagtgggggtgtacactggcctgccctctcccaggcccaatctccactcactggcctcataccttctgccctaggacgaggccaggatccatcgggtccatagtcctggatcgactcagctcttgtctttgccacctgcttacctagtgaccttgaacagaatgtaactctgagcctcagcttcctttgtaaaagcagctaactttacctctgtttcagggtgtcgtggctcagtgcaagttttacatacaaacacacacagcaagccagccagccacacacacacacacacacacacacacacacacacacagagagagagagagagagagagaaacacagaaacaaagacacacatacagacagatacagacacacacacacacacagagacacagacacacacatacccccagccccgccccccccacccccccagatacagtgcattacagcaggctggcctcaagcttacactggagcaaagatgaccttgaatctctgatcctcctgctttcacttccaggggtgctggaattccaggcttccaccaccaacccagaccccagggctttgttagtcaagctgtcttctctgtccctggtacagttattgaagacaaagttcccgacttgagcttgaactttgccactcgggcttgttgttgggggagctgctgaaagaccctgcacctcatttttcttgtctgttaggtgggatgctagacccccccccccccagcagtgagggctaagcaggctaacgtgttttaaacactcaagactgccagctgtggaggaagatgtgggcaggtagtgtaacgaagcccctgtgtggggctgtgagccttgtctctagtgaacaaacaggtcttctactggatgtgaccacatcaggatgtttccctgggctgcaactgtgagcctgcttgttgtggcttctctctgactccttactcttgggaacttctgccatctttttagctcttgaggctcttgaaagattgcatgggaacccccatgagaacatccaaacagagaactcatcttttgcaaagagagaaaacccaacagcaacaaaaaaaaaatctcacctaacagttagtcctgagtgtgtttggccctggtgctggggtgtcagtgtgagcacttcaggctttgagaaaaaaaaggtcctctggatgtggattctccccaggagcctggccccttaaaagaagtagccagcacggtgttaatacacacacacacacacacacacacacacacaggttttgtctgtttttgttcaagaagagaaggctgtatggctccattttgaacaccagaggctgccactctctgatagacagggaagagaaggaggctatattccagggagaaatgagaataggagctcaaggcttggacccagactgctggctcacaggtcagagccagcacctctgctgtgtggtcctggggaagtcccttcaccactctgcttcacttccctcgccttcgaaatggcaacagaacagaacctctggtgtggcatcgttgggaagattgaacgagaggaggaagccacgtcctgccaaggcgtggtcctgccctctctgagtagacacagcaggtggattcaactttccagagccccggggcctccagggcctgatggagatatatttagaacacttgcgagggccacatggtgtctgtgacaaaggatggagcctgtggcatgttctagggggagggtgacctgcaggtgagggaatgccagcccttttcctagctggctggctatgagctgatgcccgcctaccccagggcactccgtttcctcagatggatggtgacggggacttccgttaggggtgctctgagaatcgttgccagcatgaaagcatgcaggaagctttttgtgataaccacttagccagctgtaaggcgtgatgaggggccttcatgtcagatagggttcacacagagcagggagcttgctctgtccctgagtcaaacctgggaatgaccgtggaaaggagacagggtgctgtcatgctgtgggatgtacttgtgatagcagagcggagttagcatgtatttgaacccatgacttagcatccgaaacaactaaggtagcgaactcctcctggtagcaagtgctggaggtaggactgaagctgtgaaccagggaccccccccccaggccagacagtcctttgtgcggtgtctgttgtctcttgtcacagaggaagagaacatggtttatacgggtctttcgctgtaatgggaagcggtttctagagccactcagaacgcactaactggaaaagacttgatacacaggtttccaggagctcagcaggaatggatgtagccagggaaggcaggagccatagaagtggggcctctgaaacgagggactccgatcctatacaggctcactcctgggaagaaatccacagtaataaaaaaagctctgggagacagtagacatccgagtctgcacagcataggcaggctgggaggaacgtggaaggaaggcacggaaggacctggctgctggcccctgtgcccaggagggcatgcaggacacactgtttgttgtgaaatttttatttgcaaagcagggagttagaggtcctgcacattaaaagctttctgagacagtgtttgaaatgatagtgaaaaaatagacattcttaaggtagtaaaaacactttttgagaaaataaaagaggagtgtgtgcgtgtgtatgtgtgtccgtgtgtccgtgtgtccgtgtgtgtgtgtgtgtgtgtgtgtgtgtgtgtgtggccagctttcttgagatgtaattcctatagtgtgcaaatggcccatgaaatctatacagttcaatgacttctaatattcacagtgttagacaactgcactgtgatagtcaactgcagaatgtgtcatgatgccccctccccattggtccctagccactggcaactatgaacacaccttttgtctttggaccagtatcttctagccatcacatataaatgcagtcatctgttaggtgctcttttatgactggctttcattaggaaatactttcatccatgtcgcctctttgaatggcttgctggggttgctggattcattccttggggcccagatcttagcacggccagcccttggttgcaagtacaggctatgctggagctagccctccgtctcctgtgaatgaaccctcgccccttccccggccagcacattgaaggttgggtcttcagtacaggttctgctttgcagttttattctcagcacttcctctgcctcttagagctggtgggggaggggtggaaactgcacaaggcctccactgatctgtccccccccccccccagggaccttctttccggtagtgggtggggaaagagacagaatagcatctttatttgtttttaatattgcccgactccccccagcccctttcctaagttctggtcagagtccccatggttgttgtcagactcccttcccttgagactccgggttatgtgacttctctcttgggggcagccgatggggaagtccacaagtgctttggcttcctccagtgtgaagttagttagactctctgtttttcctctagttggagctgggccagcacaaagctggcacatcctttaagaggcggtcagctgtaagtaacacggccctgcagaacctccttaagcatatggaatcggggtatctcccatgcctccctgtttataggcgggtgttgttgcaggtggggctcccagatctctgtgggaagctgttgtatcggggcttacctgctctgaccctgggtcagctcagtgcctgtttgggagtagaacctggcattgaagttctgattgaggctaccaggaggctctgccccgccctagactcactagctcccaattcatatcctctcctgtcaccctgcagaccagagcgggcattttttggataccttttggtggcctctctctctctttccctgtacttacgctaaagctgtttccactgtctggagtatgtgtttcacctgccctgttcctttaagacaccattccagtgtctcttccggagtcatctaaggtacacgggcctttcccacatgtgtgaggtatttgtaccatatgaagagaggatagaccggatcctgcacttaagccccaggctaacagacgaaaagttctcctaggacaagggctttgctaacccttgagctgaacacttgtcaatatttgctgaacctgcctgactcgtggcctggcccgatgtgtttgttggtcacgtgctgggttttcccgacttcagatgcagccagataaattaatcttgttttacaaggtgttttgtgtatatgaccatggcagaacccacatcctctatattttccctgtcagcccgacccttctaccccttccccatctcttcagcgtctactctgatttgtttaatctaaacccgtgcatcccctggtgtgggatctgttgtatggcttgcataggtggctttgtgcgacctcttctctttgacccagtagatcttttgtgcattctctggcatctgcttccttgcttttgactgattcacggctctctgtgcccacgtgcactacacttaccaactctccccttgatggacacttgagttgccttcaaggctctctaatgcaaatattactgtggcaagcatccatgcacactactgccagtgcaaactccacacactgatttccctcacatgtagactggaaggcaggatggctaccaaatgactcagtttgggaaagtagtgccatgttgcttctcagatggctctgtcagtttatacgtaggcttcccacgaactccctgtctgctgaccccacttggtaactacccaaagaccttccagactgctggttctcctcctcacaaaccaatctgacctccactggatgatataataaattctaatctcttcctcattccttgccaacccatctctcctgcctgcaatgaaagtcctttttataattttccacccaggtctcactaatgggcccagaaacctaaaaccttccattatctgaagaacacagccagcttttcaaaactaaacctcctttgttttctcccttaatctgaactaagcccttcctatctatcttccttctccaccgagctgggagcctctctggcaggttctgtagaccgtccaggaaaggctgaaagttgtgttgcttcacatggtgggggaatgactctagtcctcccgggttgcttctctccttcagaagccaggtttggtatttagctctgtttaaactgtgaccgtgctggcaggtggaaaccaactgggtttatctgctgggcataatgacaggaaaaaggatgctacaaatacttcctaggcgctggcctgggccagattctcagtcatcactgttccatgacacctcatgttgctgaaattgactattattggtttgggggttggggtttgttttttggtcattttatttctttttatttaaaattatacttatttatatttattttttaaagattgattttaattttatgtgtatggatattttatccgcatatacatttgtgtactacatgcatgcctggtggcccaggaggccagaagaaggtatggggcccctggaactagagttaattacagctggttgtgagccgagaacatgggtgctgggaaccttgctcaggtctgcaatagaggagcagcagatgcgcttaacccctgggccacctctctggctcctgtctgcgatttcactttgccccatcacagtgaggcttagacatggcgtcaggtccggtgttctgagcctattatgtgcttgtctgagttctccagttacaccgtgagctgtgacccggcaacatcagcgtctcctcccccctcgcctctgtccgtgcccccaaccccccaccctccgcagggtttttcacttagcagatgctcagtaaatacttgctgagtggttgacacagattgcatgctatctgtcatcttcaaaggttaggaccagaccgttaaaaaaaaataaacaaaatctttctcttaaaagaaggcattacctcctgcccttcccttgcaaatgttccttctagtcttatttattgcttttttggggggtagggagtcttaggagagcgactcagaaagcccctttaatttaagagagatgccataaatcacacccattacggagggatcaaatgcctgcgtgcgtgcgccctataagtggattaggggcgcacacttgggatggctcctctgtttgtcccccacccatctgcagggctggccttccctggcagtgtgtggtatcctactaattgctcttcaataaacaacagtctgttgaaaacctcccatgaaaaaaagtgccgtctatgtattgtatcgggaaaactaaatattatgggaaaggccaaatatttccactgtgttaagaaaataagagccccggctgtatggagcttccctctcagtgggcaaaagactcggtggagacttcaaagagggaaaagctgtcaggacagccagggcagtggctccattaaagaggagtgagtgtgtgcatcctactcgtggctgcagaagctgcaacattctctctgcctccgggaggatggtggaatctgggtgatggagctgtaatggagtccttagtatctgggcagcatctgagctggagggcccctgaccgcacgtggaccatctgatgagtctcttctggccagttccacccacctctcatcactgggttaagcaggcggggttggctggctttcagtggggagagacctaaaaatcatttggcttttactaagaagtcaggctaggttatctaagggccatccccagggaggggagatctgagctgctggcttgcccattttaatgggctgggggaagctgtttgaggagtggccgtaaaattgctcaccagacctgaaatatgagaatgctgtctatgagtcagagggaagagctcccaggtacagagaatgggctcttgttcttcagggtggttgaagacctggcactggcttgctgggtttctccttagcaggatcattcccacctgccaaccctgactaggtacacatcagctgttaacccaaatgcagacgtggaggaaccgttgcttctcggtacagggactttcctcttccttgctcccagaggatgcgccagtgcactgtggtgacaccctgtagggatgacagccatgctcttcagctctgcgaatgcctaggagctgtgcagagtcccaaacacctacgccttcatggagcctcccatcagccaaggcaggactgttattgcctccttcatagacacagattcagaggtctgggggtgtgtggtggcgcgtgaggatatttccctgtgatcagatagatgagatgtggcacagctagaattcagacctagatcctgtgacattttagcattttgtgcgagatgaagttagccattcttccctgttggtggcactactaccatcttctcttcctcttctcctccttccttcttaggaaaatatgtatttattttatgtgcatgggtgtttgtgccttcatgtatgtctgtgcagaacatacattcagtgcctgaatgggcaagaaaagtgcatcagatcctctggaactggagttacagatggttgtgcgctatcaagcaggtgctaggaatcgaacttgggtcctctagaagagcagctagtgctcataactgctgagccatctctctagccccacaccctgacttcttaagcctcagtcttagttgtaaagagaggaccacttcccaggaacaaatgattcactaggtccagtagaattggttactacagattttaagagcactctggagaggggctggtgggcgtggccatgtgtcgagcgtgctgggtaccagctgtaagctctgcatcttaggtgcagaactcccttgaattctcgcagcgctcacgtgagatttgttttataaatgtaggatgaagactaggagatgatgtagctctctctgcgctatacagctcaggggtggtggagctgggcctttgctgggcctttccagtgccaagacacattctcttggtgtgagaccatgacagattgttttaccagagtggtcggggaggggaggccctgaggggtgtggagaaggggttggaaatagccaatccttcaggctgggggaagggaagagggctggggaacagccggaactatcaggatgggaccagtcttcatcactctcccgaacacagggactcagtcccccaactgatgccttggcattgaagaccaggccttcgtggctctgcggaggtgacatcactcatcctctgtgctggctccttggctaactgattagatgtggtcatggtgatgggtatgaccctgtcaggatgacgcatcagccgtgggatatcctggtgtgggaagaactagatttagccctggaccatttctctgttcactgcttctgtacgctcgaagctgagagtgctcttccactggcccaccaacccttccgagctccagcctccttgctgacctttgaaagcacatcacggtcaatagctcatctgatccctcctgtctttcacccagcaagcatttatgcagcacctactgtgtgccagacaccgtttcagatgctgtagacacctgggtgagccagagcggtcgctctccagagaagagggaggccccaggctgactgggtggaccagcctgagtcaggtcatctctgaaggaagtgtgtggtgagctgagcaggaactgggcagaaggaaggaagtgatccctgagcaggagtagaagctgctgtctatactaactgtatgtggcagtggcaggtgttcgggggaggggacacctggcaaaggccagtgggagagagaaagggaagaggtgactcagtttccctttactgtcgccatattctgggatgtgccccggggctgtatctcggactctgaatgtttgatgatgaccaagatgggcttctcatgttgccctgttcacgtttatcagtgacacggggagacaggagagagagcactctaagaggtaccaggcttagctttcaaaactaacttgaggaaggttggagtggaatgggcaggaggaagaaatgcaggaaacagccccgtttacagtagcatcatagagtagaaaacccatgttattcttgtgccttgcaagtctgacactgtccatcaaataacaatccccgtcccctccaccacaacccaacagctgctctctcaccttgtttgggtaataatcctaaaagttgcatgaagtcaggagcccaagtacagcaggggctgcagacacagaagtgggaggagccaggggctgggtcacttgttcattagaaaggaacgaactcagccctgtgagtgactttcaggtcctggggctgtagccctagaacttgcatttctgagatgctgtcactggagttcaaggtggagaaagatgagggggagaccgtgtctgttctgcctgagcccatttgcacaggtgaacattgctttcaacccccgccccaaccgagtcccaccctcacatgcagcatttgccgagatgagcggctggatagggaagctccgagacgggccaccagaggcatccctgggccaggaagaggacatatcagggggtccctacaggagccggaggaagggaggatcagatagacccaaagactgaactaatggtcacatacccagagacgaacggatggccttacttgtgacttccttactgactctggacccatgcaggaaaaacctttctcctatgagcctcgttcttgtgtctcatgggcccatgcacttgaaacacctggtccctggatccctctgtagagagtcgactcttgttacggagtatagcagtgttggggcctagatgcaagaatgacatgcgtggacagttgtcgtctatacaaggctgtgcccagacttgctccatgcttgctcaccacagaccacagtcacagaccttgtggggatggagctgggtataaaccttaacccctgactccaggtctctttctctcagtcccttgtccagcctctgagctggggatgagttgcctggagcggaggctctgacctattatagccttcctctaggaggtctttccccagacacagaaaatctcaaaggcagaggacattaggacccgggcacacttgtcagtcacgccccagttctgctttctcccctaccaagccccaaagccactgacagaacaaacaccacgtctgtatctcttctgactggccacttctctatcttctggagatttccatgaaaagaggcagctggtcttgaagagtcaatagaaagaggtcaccagggagtgagtgccatgtaggacgcttgccatggggcatcaagcttccagaatagctctgtaaggccatgtgcttccttctagatgcagggagtggtcacaagatgctagtgcccagcctgagggagcacagggcccagcctgagggagcactctagggcgggacttggggtgtgggtcccaagatgcctggcttgacctaactgtccccactgaggggtggccccgcccaccacctgttctttccctcagctcagcacatctgtccgtgggctccccacctccctctcacttgagataccaccaattctctaagacgcagtgactccgtcaagttttgccacaaggtgggaaaggacagtctcactaggattataatcccagctggctgttctagtcatgtgaccttgggcaagctttgaacccttttggaagttcagcatcttctgctggagagggtaagcacccctgggcctgtgtgttgatacgggagcttagtgattcagagcagccccctacagagagagtcagagcaaggagctattaaggtggtttctgtcccttctggaagtctcatgaaataccccatgattggctgctctcaactgtgtatggtcagtgtatgggtgaaggtctgtccagatctcccacttgtatcgactgggatggtggaggccacacctcggtccgttactacagctacctgcctagcagacagttaccaggaaaaaactcgaaggagctaccactgtgtttcttatgggcgaggcacactggtaaatgccttgtgggcattttctcacctcatcttcattcaaagtggcacaacagagaaaggccctcactgagcaaacccggtgacctgagtttgatccccagaacctacataaatgtggaaggagagacccggcttcacagagttgccctctgatctccacctgcatgatgtggcatgtctactcacgcacagatatacacatcacatcctcacgcaatatagtaaaaaatgtttaaaaaaaaaaaacccatccaagtcatgacctcttgctactcttgtttcataggcgtggaaggctcaggaactggatacctcatccaagtccctataccaaataagagaccaagctaggtctagcatgtgtaatttgtaccccccattaggcatccttgtcttttctgcctagccccaacctgtgtgataaggctggagggagactgcattgaacagtttatgtttttggctgagtggttcatcttcagtgcccattgcagcacggctggcatatctacagcaagggctgggaggagagacttctctgggacctcaagtgcagcctgggagggctagaatgtatagctcatgcctttgactgcaagagtctgggtgtgagtgagaggggtgggctctggccaagtgaagcaggctgaggtcagagggaggggaccacctccccccagggaatgcttgcatgacgtgacttcatgaagcgctgatggaagagagctggccacatgccctcttacctccagcctctgtctgatgaagaactcggatcaggaggggaggcccaaccagatgtagtgcctggcagactgccctggccccaacacagggctctcctccagctaacttggcagccctcttccccaaggggacctaggagcaaatgacgccctagagttggctgggacagagaagcgggtccctcatgggtacaggttaggaaggggcagagagatgagggttgggggctataaagatgtgacctggcattattttgttccggtcactctgtattttaacacaaattgtgtgtgggtgtgtgtgggtgtgtaagtgagagagagagagatggggggggaagtgggagagaaagaaacagaggaaagagagggagggaggaagagggagggagagaaacaaagagagagagagagnnnnnnnnnnnnnnnnnnnngagggagagaaacaaagagagagagagagagaaggaggaggaggaagaagaagaagaggaggaggaagaggaggaagaggaagaggaggaagagggggagagagaggagagatttttcctaagagcttgtgcctaggagtgaactaaaagtacaacaaaaccgttggtttctagcaatttgctccttctgttttcaaagctgctatgccctctgcaccagatgcccccaggtcctagtccatggctgtccctgggtgagtggatgactttcccaagcactgcccagatggaggtcctccatcctcttccaccttgggctcctttgagtctttccagcatcccagatggtctgaagtctcaggagcctttggtgtggagtttcttcaacttcacacagccttttccgggatcccgtatctccttttgtttctagggaccccgcccccaacatgttgcttcccaaggtttctcatcaccaggcccagtttcaccaacatgcctgcctcagcttgaggttccctcagatccatctgtttcctaccacatctatctctgtggccacaccagggctccccgatacctgatctttattcctttaactctcccacctgtgccacgttctctgcctctgtctgggccctggccctggctctgtggactgctatgcccactttgcctccatctttccctcacccacagatctgggacttgccttctccttgcctccttgggctccagccatccaagctcagcctgtttcacaccaccccagctttcgtcccttctttgcctgggtgtccccttgccaggatagccctctcctctcttccagtgtgacaacttctgggaaaccttttaagtttgtgatttaagtatagtttgtccccatagaagcttcttttaaaatctgtgccactgtggtggctttgagacctggtgtcctttgaaggcaatgaagcccttgagcgatattagcacctgtttcgtgggagtggcttagtcaggaggcagctggttagcataaagcaaggtcgccctcatctctccatggtatctaccagaagctgtgcttgtgctcctgggtttcccagcccccagaatcttgaaccaaagtaaatttcattcatttgttgatttatttttaattttttgaaacaggctctcatggagtcccagctaaccctgaacctatcctcttctttctattcctcagggaccaagcctggcaactttgtttcttaataaattacccggtctcaggaattctcttagagtaggacaagaccaccacctggagtgtcattatctctcatccctgggggccagagttgcacaatgttttattggattttgtctgaccagtgtctagggcggagcctagcacagagtaggtccagattgcttcttttctggatgcacctgatgagcggcttagctatactgagaatccaccaccaggtccccactgttgttccatgttataggttaaaccggggaagttggaggctgggtatctgtagagagtggttctgggaatggagtgggagaatggaaaggaagcatctccagtgctgtggtaggaactgtggttccaggcacctataatggcttttataaaggggggagggaaagggatggtgggatcgactggaagaaactggtttctagaaagggcgagcaagagcaagtttcccctcagtgcaggtgtccggttgtggggacaggctagtggagcgtcagtgcagtgtccctgtgctggacaccaaggacatggcagccttcccagagtccctgttggactgggtgatttatactacacaccagggtgtgctgaggccagcaagctatccgggcagagaagagggcgttttaaagcattggttccttccagccatggtgttaacccacctggatctctccttgcccggcagggacatcagggacatcttcctataggcaggatttctccttgctctgatggccgcacctactgtgagttagtgctgccctactgtgggcgagctgctgatccaccacacagggactgctgaggcctagcataggttttctccaagctcagtgactgtcacatgattcctgattacaccagatgaggggccgggagcacccagcacggagcctgctcagggaggtttctaggagacagtgggtcttgcttggagtttggaggaatgaggctgagaggacgtagtaatggagttaagaaccctttaaaaggagacggctcagtgggcaaagtgcctgcctgccatgcaagcttaaggacctgagttgttcaagactccagcacccacataaaaaagctggacgaggtgacacatgcttataatcccagcgctgtgggcagagacaggcagatccctagggctcagtggccagccagtctaaccaaaactgtaagctctaggttcagtgagagaccttgtcccaaacaataaggtgaagagtgttggaggaagacacggcaaagtagcctccccctgctccacacacactcagataagtgagcacacctacacacgtgcaaatacatctcacacacgttcacacctctctttaagtgacgttttctcctcttttacttttgaataactgctttactgagaagtaatttatataccatacagcgtggtctcagaacatctcaagagttacgcagctactaccacagtcaactttgggacctttcatcttctaggtcctacctgaagcagtcaccccgcttcaccatcagctctgagcaagctgtcaagcactttctggctcatagatttgcttgctgtgagggttccatacacagcaggtctccaggtgtgggtcagttctcgtttatttgactgcagtgctaccaaccacacggcacagttttgaaggtcattcgttctagatacaagtcctttaacaccgggggctggagagatggctcagcggttacaagcactgactgctcttccagaggtcctgagttcaattcccagcaaccacatggtggctcaaaccatctgtaatggggatccgatgccctctgctggtgtgtgtaaggtggacagtgacagtgtactcacatacatgaaataaataaataaatcttaaaaaaaaaacaaaaaacaaaaacaaaaacaaacgtcctttgacagacacatcgcagttataattttctcccgtgctgtgggttctctttactgctgacactcatcgaagcagaaaaggttgtgatcttgttgaattccggtttgcctgctttcctttcattaccgaatttttttggcctccctgtttgaggtctcgaagacttccttgcagcgagggaatcaaactcgggaccttgcgtgtgatacagtgcaacaaccactggggctacttgagtgccctgttaagactccatccttccgtctctcccatttgagaggctctggcccgtttgcatatggcggaaggaggtatcaatcttttccagctttgagttgggtcccactgattgtccgacccacggtttccccgcttgctaatgctttgccttcttcaggtaggtctctgttcaaacacccctgccccagacagttgctccctgaccttcagtgtctctcctgctcagtctcgggacctcagcacggtcccatgatttctgttgagcccagagcagcggtcgggtgtctgtctcactacctggacttccagtgtccagcacagtgcctggcttctgtgggactcaggaaatttcttttagttaagaagttgctttctcagaggattttgactaaaatctctgagcggtcctggcctcacggtgttggaagttaataagtgagaacgggccatcaagcaacattacattttggggatctcttgtctccccagcccagcaatcccattagttcatgttacttgcatttttggttggccctggtgactggaaatttcttcctgacagtggacagagacctgctttcctgcagttcccactcatctactgtctgccctgacagtcgactggacctgatccccgtgttgtgacagtcctttaaatatccgagaacatgtatcagtgggcactactgattcttttagctgttcctttgagccagtaggggctggttctgacctctctgtcactgatggaggcctggggatggtgggtggcacaggctgccaatggaaacttggacacagacacagctcagagtggaggagtggaggcatctgattccagttgtcccttcttcattagagtggatgagtcccaagcttgtaggcaggattctccaggaagtccagactccctgtcatagacattgagaaggcaaagctgaactctgtaggacacactcttctacaatggtgctttccagttaaagagatgtctggttgctttcttttcttcccagctagtcagtggtctctggaggtttggttggcttcaatgacccccaactctcactgacagtacacccacctgggagctcttaaaacctccaaaaccattcccaccttccaaggctctagtttaacgtgctttcgaggccaaggcagggtggttttaaagggcccgtggtgtctctgtgtagccggagctacaaccttagtttcgggatcacagggttgaacttgaaactccccactgccccataggaatgagcaagggctgatgtcagcacagcatccagagccaggggacaggagacaggggacaggggacaggggacacaagtgttttccaagatcgaaatctcatgttaaattatgaaagccgtacactttcaagcaaaaggaaataaatacggaaatgttcaaagtagaaagcgagactgtacctgtctcttccctgagatctctactctcagataaccagttctcgaggggcacagggccctgcacacttacaccgcagataaacgaacgtggctggctgtgcactgtaggctccactttgttttctcagcatgctacagaagagggcatcttaccatcagcacgtatatgagccataatttttataacttttaaagtcagtgaacattgagtattccttatttttttgcagcagagaatatttttcatacatataccaactctccgttttcctcttcctcttcctcctcttcctccctccctccccccccctctctctctccctcttagaggtccagttgctaagtgcaagaacttgtaagatttaggataggaatcagactcctagatgatgctagagagatggctcagtggttaagagcactgactgctcttccagaggtcctgagttcaaatcccggcaaccacatggtggctcacaaccatctgtgatgatacctgatgccctcttctggtgtgtctgaagacagctacagtgtccttataataaacaaacaaacaaacaaacaaacaaacaaacaaatctatcttaaaaaaaaaaaaaagaaaaaggataagagtcaccagaatgctttccagaaagccaggccataccaggcactagtgtcctaatgacagccacttgcctgtgtcaccagcgaagctttgctgagcacagcagagaggaaggtgtgagtgtgtcagctggggaggaagtggagaggtcacttccctgaaggaccgtgtaagggagcagctgacttctggcctcccctgcgctgcacaggaagcggaaccaaactgtgctcattaacctttgcctggctccgaggtatgacaaaggcacaggcgccctggcaggatgtgtatgttgagggcactgggccagggctgggcgttgattagggagtgtgtggagccagaagttcccttccgaactttgctagagctggcgagtggtggccaagcccatcggaacccagcacatactgcttttgatgtttccaggctgggctctgggctcctcggtgccaaagtgcgcctagcagacatgtccgacatgatagctggacatgtgagctgacacaaaaatgctggcacttgggaggcagaggtggatttctgagttcgaggccagcatggtctacagagtgagttctaggacagccagggctacacacagaaaccctgtctcaaaaatataataaaaaataaaaggggggggcagggggagctggcaagaagattcagtaggggaaagggtttgcctcctggtctgatggcctcagtccaacctgggatcctacaggctggaaggagaggattgactcaggtgtcccctgctgggcacatatgtaccatggcatgcaaaccttggtatgtgcgtagctatacccagtgcccaacaccaaccaaccagccaaacaattgatttaaaaatacggttaaacctgagagagaaagcgcttgtctggagggcttggctaatttaactctaagctcgtccctggctgtgggtcggacctcagctggtcacagctgggactcccctcttctttgggcgctggaggtattagcgctgtctttggagagataatgagaacgaaggctctagctgtgcctggcactcagtgagtcctcagcaaacaggagtggctgttgctctcctcactccaagggagcccatttgtttgctcagataagagcaaggtgtgcctggtggcctcttcaaccatctctctctctctctggggaattgaaggacggagctttgatggtgactccgtcttttcaggttcctcaggctttgtggatcctgggagtgcccagcttctatgtgcatttcccttccaggaaacagggaagaaaagaacatgaaaaaggcctctggcctcacagtatggcaccctgtcagcagatctgtgcatgtgcgtgtatgtgtgacttgaaggtagaagaaaaactgcctagggggactaacagaaagatatggagacatgaggagggagtgtgctttttttcaggactggagatgtagcccagtggtggaagttgcctagcaagtacaaggtcctgggttcaattcccagtgctgcaaaagtaaatagtgaatggataaaaagctttctttttccccagaaatgggtggtactcgtgggcttttaagtagtaggtggatgtggctcaggttctcgagcctttctggggtgactcctgcaggattcactgcgatggtcactcaccctgtggtcactcagtaggtgtgcatgttggagtagaggtctccctctaaatcccccctttaagtggtggctctttcccaaatcttcactgtcacttagaacaaattcccagctagaggaggcattggggttttaccagggccacctctgaggtcctcaatgttttcaggctaagctaaaaatgttagagtcaggagtgtggctcacttgatagtgtatttattatgtagcatgcacaaagccctgagtttggtccccagcatcatataaaccgagtatatagagtaaggcatacttgtggtcttagcaaccaggcagtagaggcaagaggtcagtagttccaggtcatctttgcctattgtgagtttgaggccatatggattaatagacccatattcctaacctatccagcttccctcccccaacccctccaaaattgagccaagtgacatgggccattactggcaaggtttaggactggcaaagacccttgtaccgaatcagaaggattcatagtctagctcttgcccattaagagtttgggtctggggctggagaactcccttcaataagtctctagccacaccttgttgctataaatcctgctattttcattgaatgaaccagttgctatctcaggacccagtacatggaaggccaggagagggcaagacagcttctgctaatagggagaccagggaggggttgggctcccccatgtcaaacagactgatgcaacatgtgtcaagctctcgggtggtgctgtgccagcaattagcaaacaagggtggatgtaatagcccgctgatgatggatcacaagctctgagcactcccagatgtggacagactcatggggccaatgggacccaggtcagatggtggcactcttgagggctccttctatggaacaatgagtggatgtggatagggacttttaatatcaggaccattactgccaccttgagagtcatctggaagacagtatcagcccaggctttggcatagccacttgattaggaatcatacccctggagccctctgcccaagggtggtttaaatttagaggacagcttggctggactggagatttacaggccactctctctcccaacccttcaaggcagatctatgtatatggggcatttagaaggggaaggtagggcttaatgttctcttagatggacatcaacttcttgggggaagaacttagcatgggcccctcctcatcaagaagctagtgcagtatccatggtccctttcattggcttctgggttgtgttcattctggtttctagggccatggttttgaacccagtttaccttgaatggtaggtttcccttcatccgtagactccagaagatctgaagtgattctgtgacctcccagatcctaaaaccggaatagcccactccaggagcaatgtacaccccccccttttttttgggtggctacagccccaaggtggagcttgtagtttgcagactataaggtagattagatttcctccctacttggctccttgactgggcaaccatcaggtagtgaagacaacttgcccagctatgttcgacggccctggtcctagccacctgatgccagagccgtgtgcaagcaggttggagagcattgcaggttggagagcatcgcagtggagtttccatttggcctggggccatgtctgctgggcatggggccagggaaaataaggccttcctcagtaaactgcaaccaccatgtgtaccacataggggtgcgcagtcccctctacaattccagctcttctccccttgttctactttctgtgtcaaaagcagcaacagacattagtatttctgatgaaacccaaaccaacccttctaggtgtggttgggccccatctttgcagatcccattctgaactcccctccagagactatgcttctttcttggaactgacctgcaagggatttgcatcccggtcatgcaaatttactgacctaccttcaaatttgaaggagcttggttcctagagggcagcagaacccactgggcagacagggtcagagagctcggatgtggtcaggcggtgtgtattcagtagatagaatgacctcggaatgggaggtggcctgatgaggtgctgtgctgattgcccatatgtggtgtccctgctgagggttctcgccctttagacgtgagctgcagagaaacatgatagtctggctagtccacaggaagctgcacatggctactggtctttaaggaggtttcctatttgtctaccatctgcctgaagtgaccagagaccttgaaatggaatccgtgcatttttaaaaatccagaagaaagggaaactccacacaggaaacataagcccaaggagctgtgtttggaatcagggtgtttaattgaagcccagctgctgggtaatgttatctggcagctcctgaaaccagaggggggtttatctgtaggggtaaacagagttggctttctccagtgacctctgccctctccacctcagacacctgctctttctccaaaactatctctaaagcagggccagccagagtgtctttaagaagctctggtgttggggtgaggggcaggagtgtgctggggcgaggttggaattctcatctggagtgataatcaaggctctatctaaggccgggaagaaaacagagcaagtgtcctgtcacgatagagtctggagtccgtcttcagatctctggtcttatctaccagaggaactgtctgcttccaaggctactgacctatggcatacgtgtcccagaagtttaggaaaacctggggctgggagcgtgagagatcagagatctcacagtcaatgaagtgggctgtgagtgagatccagctggggctggctccagaattctctcctcacttggccatctgccacctgacaagtcgctgccttgagccccagattccacctctgcccaaaaagcgacctcttaccatgtgccctgtaacaactagcaggcctccttgtatctcccagctagcaggcttcctgcgtctcctgactaccaggactgcctgcttcatctttccagcagcccggctgggagcctgtgatttatactccctgggaggtgaaagggaagcccgtaattcccacataggaaggagcatgggtgttaagccccagttaagtccttccccagctccgcttcacaggccctggagaatggtggagtttaatgacctgcaggcaagtccaccctcctctctctctcctagtgggcttggccgcttggggacaccaggcagcacctggtgcagggacacacctgctccctgtggagcattcgcgcaaggagacagtcaggtggaagaggggtgggggtggtagggtgattaagaccctgatgaaaaccttgctcctcttccagggtagcagggagctgctgtgtctgagcggtggccggcttttgctgcctgcctgaaccctgatctctctctgatccccaagttctgtctctggttgttcatgggctctcagtgcgcctttgactctccctcgttcctctaggccagtggtcctcaaccttcctaatgctgtgaccctttaatacagtttctcatgtcgcagtaacccccaaccataagttattatcgttgccacttcatagctgtaatttcgctcctgttatgaatcgtgatgtatatatctgtgttttccaatggtcttaggaatcccctgtggaagcgtggttggacccacaggttgagagccagtgccctaggcccttccctgctcagacgtatccagacttctctgttatctgaataaagctttaaaagatgtttagttcctatttcgtttcctatagtcatttgttttaaatatctacagacttaaatttacataaagaggactaggcccgtggctgccaaaaagtttttttttttctctccaaaattaaagtttaattagtattgtaacaataggagagggaggacctttaaatagggcacagccttcttgaatggctagatatccttgtgctggaactggcttcatggtaaagtgatgagtttagccccttttcctctttcggtctcttgaactcaccctgttctctgtgcccaggacggctctccatagccgccggcaccatgctcctgggctttccagcctccagagccaaatcagcttttagtgtttatcatttatcctacctcaggcaatggtagaaaactaaatacccagtatagaagataggggaaagactcagatttggttcatgtcttctacagtgtatgttattagctaagtggctttacttagcatctctgtgcctctccttcctccagcaccgtctggggataatcattgagaatagatcaaatgagctgatacgtgtaaatactttataccacaccggcatatagtaagttatctaaacacgtgctatcgtttggatctaagtgattttgtaatttattgtatgagataaatgtttgcataaagcacactataattcatgtgcacacacacacacacgtctgcctgtctgtctgcctgtccacatatttatttcggttcatctttttctcacacagggtctcataccgctgaggctggtcttgaactcactttatagtggaggatgaccttgaactcttgattctcctgcctccacctctcaaatattggaattataggtgcctaccactgtgcctggctttaaaaagattcttattatttttcactgctgagactagagctcctggtcttaaatgtgctgggtaaatgtgctaccactaatctatatattcaattcatatttagtacaataagctagtagtttattctgagcatatgtgggcagggctggcctttaacttgttttctttttttttttttttccttatcaagacctctgctcattaatactccatttctcggtggtgatatccccccctaatttcctggctttagggccctctccttgattgtctttcagagtattctccgcaccatgcagctaactgtcttagttacttttctgttgctgtgataagccaccatgaccaaggcaccttataaaaggaaacatttaattggtcatacagtttcagaaggttagggtctccaatggtgaagcaaaggcacacagtggccagagcagcttctgagagatcatgtcttgatccacaaccacaaggcagaaagtgagacacggggaatgatgtgtgtatgagtcacacacgtcctccaacaaggtcataacccctactccttcccaaacagttccaccaactggggaccagagccttcagacgtacgcacatatggggccattctcattagatcctccacgctgactctgtgacttagcctggaagagaaggaggaacagtgctccttcaccaattaacaggccacctccacactgcaagctctgctgtctaactggggacttgcacctgtctgtccacagtgcctaaatgagtctctttgctgaagtttctcctcctgtagcccaggccctggcttctctgactatagggtgttcattagaagaaccccacagacctatggtgtcagaattatttaccagtggccttggtccctgaattcctgcagtgccagagtaattctgttggacgtgcagatatgggaacctttgctggggagacttttctgtccccagaggtcacctcccttgtgtcccatctgtgccaggggaggtcagcagagtagccccatggctgagggtgtgtgtgtgcagtcttcaaaagtttacacttcttccagggctgtaggaccggaacaataagattccacacaatacgttgtgtggacaaggagctttctctccttccccagagacctcctgaactaggtggccttccttggtggcctgaggtgcagctctgtgtagtttaccaggggacagcctagacttggtgcgcttgccttgtcgatcttccatgtgtgcacttcatctctcctgtgaagttgcttcttatgccagacttgccagcgtcctaggtcagtgtgacaactctctgtgtgcatgctctgtgaagggcagtgagcctggttgtcgggaggctggctgtccggaggtcaaggtgagccacatatctctggtctgcccaggtctgcccatgtggaattttaaagtgtgaggctcatggacctgcaatttggaaggaggcttcacagaatctcattcactctgaggtagacggagaaatgtaaatcagctgtttcaaaaaatgtaatgacctcaattttatgtttattatccacaaataacacttaacctgtttgttttaaccctgtactcagagaatcttcattatcatttcagtgactgcttcttcaggtgtgtgtagagtgtgtgtgtgtgtgtgtgtgtgtgtgtgtgtgtgtgtgtgtgtgtggagtccacatgtttcctggccctggtgacaaatgagggggaaatggtctcagctgtgacactcctacagtaatattaaacagtgcctgcagcccagtcttggtcacctactcacctgcttctcttttccctcaggtatacattatcaacgtgacctggtctgactccacctcccagactatctaccggaggtacagcaagttcttcgacctgcaggtgagttagcaagaaccagctggcggcttgagtctcccatgggttcctcgttcatgtccacatctcactggaaggccctggacagagccaagaggcagaatccagtctggcacagaggggcagatgcgggggaccctatcgagcagccaggggcagatgtgggggtccctaccgagcagccaggggcagatgcgggggtccctatcgagcagccaggggcagatgcaggggtccctaccgagcagccaggctgggtactgtcttgactgctacatgcagacacttaaggctttgtcgctttccaccatggcccttcacagtcttgctttgtcatcctcccttggtcttggggtggaaaccgtggggaggcaagaaggcagttgtgggtgctgtgtgcctgagcagacatatctataaacatccatgatgagacacaagccaccacatcattgctagtaaagaaaagcaaacacacagagaagaccaaaactaaataagcaatttatagaactacatgctgggcatacctccgggtctgccttctacccaaacaaggagcttgccacccagctcgtacttgtggatggtaaacgtgtgtctctaacttagacagatgtgtctcttcagcaacacagtagtatatagccacactgtaaccattaaacacacccctttgatgctggctgatccgttttagggtcttttggtgacagatgagtattttatactcacactgggcttagacaataatatttgagaagttcgtgcagttgaccagatggtgagaaccagcctggggcggtagggcttccgcaaagcccaaactaggatcagctgtccctgtctagtctctgcttctcttcaggactgtcgatggcccttagtaattcacaccctgatgaactgagccgtcatagctcttgcagtttacatgtggctcccactatcatagacaccgaccttctcccttttccatatggataaatccagaggaagactttggtgaggtaccttctttggcctaatcggaatgcccagaggtaggaagggtcttggagtgtagacatgagccttagcagggtaaatgggcgtgtcacccttgcacatcagaaacaagtgatagagtattatgtgaatgagcagcattccgtggtggtggtgggggggggggtgccgagaaagtgggggtttcttcccttagaatgtgagtgtgatttagaaccacaaaaacacaaaagaagacgcagatgttcctagccctcacagccagcagccctggaatgacttcacttgtggccaggcttgtctgagtgggttatcttctgtgcatacaagttccacacctaccgggtcagttacattcagatcaaagatatgtagtccttccctttagccccttagcagtgggccatcttggagagggagatgcaggcctgtgtgtttgtgcgtcagcgcctgctttgatctcatgatgcttgtcactgggagacaaaccttttaaaaagccagttccccaggttatggatccttctgcttcaaccacagggggttgaatttgtcactgcgtgtgggaataggagcactcatgactcctgcctcttcccctctcagccctgcccaggctccttaggtctttccaggataaactggtgggctttgcctgcaccccatcaatgggtacagtgtgcggggacaggaaatgataatgtagtagggcagagtctggaccctgaaaggactcattgatcagctcgagggagtctagaagcctggggaaaccttcccaatcagaatgtctattctggccccaccccctcccaagttatagaatcgcacaagaatctgccctccacccctgacccctgcccgaggactcactctctcctgtcactgtagtggggggccacaagnnnnnnnnnnnnnnnnnnnnnnnnnnnnnnnatcccaaaacatgtagagagtctttgccatccattattccacagtgcagcacagtagcagccacttgagtcggaggagttcttaaggcgtccgtcccttttcatcttggtggcatccactcgtacactcattcatggctatggcattctcagtcactggggctgctggcctgacaaggtgacttagcaggcaaaggcaggcttgacggcctggttctatctctggcagccatcaactgagcatcatccatcaacttgaagccgctgtcccagagcccctccgaaagcccagagaaggcttcaagagcattttagatgtcaaggtggagaggcagggccttgcttcttctataaatagcttttaactcggtgttctctcagcaggagagggacctaccccacagggagctgaacaggttatgctctcatgcccaagtttgtttggttataagggatctgcctggagatgaccttgggttaatcagaaggcaggcaagtgaccacacatgccccttgttcaatcttccatttcccatgtctcctccatgacctagccccaccaaagaaggacaggacaggggggctcccgggccctggctccattggtgacagtttcacaacctggcctgccagccacggggctgcagtaatttctctgcaaacattggctcatgtactgttggcccccaagagggtcccctggcagtgagtgcaactgggtcaatatttggtcagagccaggaaaggcccttaatcttcccatgaaccacttggaagacagccgagagcggctggaggctacttgtttgctctaagggcttcagctgtgtggaagagcttttctctctcccttattcatctcccctgcgctttccgtacacgcaggcatgaacgcacgcatgcaggcaagcaggcaggcagcgcggccacagctcttgaatagcctggactgatgtgctgtgtgtgtgtgtgtgtgtgtgtgtgtgtgtgtgtgtgtgtgtgtgtgtgataatattatttatggacactcatggatcactgcatctttagaattagaagagttcctttctgtaaggtgtatgtgagtgtgtatctgtgaaggtgctgtgtgtacgtggggtacgctgatgagcacacatgtgttcaagtgtgcagaggctacaggaagaccctgggtgtgagctatcgctttccacataattcctgtgagagccttccgctgagactggagctgggctggcagctcgtctctgctccccattcccatgctgccccaagctctgggcttgcagactcaggcagccgcactcaaccttgtacgtgagttcttggatccaaactcgagtcctcagtgcttgtgcagcaggcactgtcactcactgagcggtttctgcactgcaggcgccagcacgacggtcgctttctattctaaggcctttgctttgtaggtaaaaagctgttaggttctctattcatgggaaatgttctgtgtgtgtatatttgtgtatgtatgggtgtatgtgtgtatgtatatatgtgtgtgtatatgtatatatgtatgtgtgaatgtgtatgcgtgtatgtatactgtatgtatgtgtgtatgtgtgtgtgtatgtgtgtgcatatgtatgtatgtgtgcatgtgtatatgtatgtgtgtatgtatgtgtatgaatgcacatgtgtgtgcaggccagaggctgacactgagcatctcccgctacctcttcatctacctcttcatcttgtttattttgagagacaaggtctccaactgaacctggctcttgatgattctgctatattgattgaccaatagagaagaacactgagtctagatgaaagccatgtgtgtgtacatgcatgagtgcgtgcatgtacatacgtgtgtgtgtgtgtgtgtgtgtgtgtaggtcagaggacagcatgcggaactcagttctttcctcgtctcctatggattccggggttctagctcaggttgtcaggcttggcctggtgtctgctgagtgtttcacctactgaaatataactattttaaaagttctagaaggatatactccaaattggtgaccattacacctggatggatattagggacatcgatgggaaggagacctagtcaaatggagaacttcaagctcatctgtgaaaaacaggataataattaaagggaaatctgaggagaggtaggaaagtaagaactctaaaataaaaaatgtctctttgcagttgttacagtaatggaaaacaacaggcttgataaatttgtatcaagaatgtatcttataagagaaagaaagtgaaaataataattttaagttacattacctcatttttcctagaccttcattctagatcattcctgtggaatgtaagtagttagatctcattataacaaccccagggagctatccaaattatcttgtcaaattggaatcttgtgttcagatattacttaaaacccctgagccaagcattggaagaggcagtccgttaactggcagcggtgctctggtcctgatgatgttgccaggactgagatggctgggttccaaaaccaagatctagcaagcctttccgatgataaaccctccgacgagtcctttaacctctctgtggccctgttttcttatcttaaagtgaagtcattataaagacccgtctcctcggatcatagaaggaacgaaatgatagattgcatgtaaagaaagccattggaaaggggagggtaaggttcttagagacgggggcagaagcttcatgagctcagagactggactctaggaggaggtaccggggctccccacgccaaccggagtcacaggctccttcctgtgcccctaatgcagacctcactttggccagatgatgtgcggtctgctcttctgctggagacgcagaaggcagagagaagatttcccttagagaaacaaatacttttcatctccactgtctaattaccaacctgcttcctccccgccatgctgttaggagaacactaggctttgtttttgtttttaaagatttatttatttgttttatgtatatgagtgcactgtagctgtacagatggttggttgtgagccatcatttggttgctgagaattgaactcaggacctctgctcactctggcccaaagacttatttattgttatatgtaagtacactatacctctcttcagacacaccagaagagggcatcagatcgcattacggatggttgtgagccaccatgtggttgctggggtttgaactcaggaccttcggaagagcagtcagtgttcttacccgctgagccatctcaccagccctgtgtggttttttgtttgtttgtttggttggtttttttttttttaaaggagttactggtctacagtttttctttacccttgttggtggcagaacatggaaggattccagggaagccctagaggactccattggtccctggtaattcctttcctactgggagctgacttcagctccttttctgtgcctctggggctcttaagtgaactccagcctatgtctttcccctggcaggtcctgcctgagggagggcgtgccagggcagggggatggctgtggagggatcggaggtgagggagaaatggtccagaaggtcattcagctcagggtgggaaagcagctgctaacttttcacttttgagttaccttgtagttgggtccactggaggtctttggagcagggggagctaagtccccctctgtcccatcccaggcacatgaggcttgctggttcctgtgcaggttctgaacccttgtccatttaggaacacctttctacagctggggcttctcagatccagaggggctcagaaccatcctgacttagaacacacagaaagggtagggcaggaggggacagcgttggagcgggttctcacacatctgtgagaaaagggaaataagacccagatgtgggctgaggcttgagaactgtgatcggagtcctgctctcaggagaacgttctagctaggctttccagatgatatgaagcagccggagctgtgcggctgcccctgcacctaggcttctccatagaaaccagtgagctccccttagggggctgtgctcattggatccaggcacccacctcttgggtgcaggacctagcagatgtcatggacaattgcatgaccccctccagccggttctgcctctgtcactcccttggctcttccctggggtcagggtggacttattaacccacgctcaggaagttctcccttagacaggaaaatcataacagaagttatggtgtcttttgtcttctcgtatgagcacagactgctcattgggtctaaacttctaggggacatcatgaatgaggacacagcggggaggggtattgcgtgtaccccaagtcctgcagaggtgctgagagtatgtctcggctggagaaattatctacatgtgagaggcacatgcttttcacaaacctggtgttagtattctcacaatggaaaaacaaacaaacaaaccctgttcactgtggaatggatagaattgtgttttatagtgagagccctttagagacaacaaaaggtgattagtatctgacattcaagttaccttgtcctagcatgcccacaacagacaacattcactgattacacattgtccctgactaagtctgtgacagacattgttaatcaaccatgagttcatatgcatctcagagtctctaaaagaacaacaccgggtatcttcacgatgtcactcatttagccaatgacctttgaggtgaagctgactggccaccttctgatctattcccaccctcttatttgataaatgagcaaattagaccccccccccagtctaattttggtgttgtccaaaaatcatagcaccaggggcctggggaggtggtggcccagtggtcaaagagcttgctctgcaaacttgaaggccagtgttcgatacctggatacccacccacatatgtgccaacgagtgtgtctgctcccctgtaacccagctttgggaagcagagatgggatcgccagagcaagctggctagcaaaactagccatgtcagctagtcttgattgacagaccctgcctcatggaatgaaatggaaaagctattagggatggtctatcccccaaatcaacctcaggtgtccacatgtgtccacatccacacatatttgttccgacacacatgtaaatatgtattcacagatgtttaaaaatggaaaaagagagaaagaaaacaaacaagactgtccccaaatcatggcaccaacaagtcagtaagacttgggggtgccccaccccttccccaccccatccccaagcttctagttcactccagttgggatctctctgattttggtgaggagggcgggaactcttgatgccgcatcattgaaggctgctaatgggggggctgggtgcccgctctcttgactgtgccacgagcagaactctccgaggcttctagaaaggtcttcccaagcagtctgaccttgggctctggtgctgcctggccctcagcccacaccgcctccctcttactgaacaacaaacccaagctccaccagggaccaagtctgcgtgagtcagcgcacaccacctgtgcctgcttggagcagcacaccttgtttagctggtgtaaggtgtcctgctggggtgtgtttgggtgttatgcgcagggaggccttggaatgcagttgccgccccacgaacctccctccttggttccaggcccaaaggcttggcctagaaaattcagtttgtcttcactgagcccccgtgtacccctctttggagggaagccggcacttttgcgtaaggaggtggctcaccactccaggctggaggatgaagggaaggaaactctttggtggtcaggtgagtgtgtgtgtgtgtgtgtgtgtgtgtgtgtgagaatgtgtatgtgagtgtgagtatgtgtgtgtatgagagtgtgtgtgtgagtgtgtgtgtatgtatttgaaagtgtgtgagtatgtgtgtatgagtgtgtgtgagagtgtgtgagtgtgtgtatgtatgaatgtgtgtgtgagtatatgtgagtgtaagtgtatgagtgtgtgtgtgtgtgtgtgagtatgtgtatgtgtgtgtgagtgtgatcagttcattctttacctgccagagataatttcatgtctgtcttggtacctcctgaggacctcagggaaagaggccggcctacagctctggtttaagtggaagcatcagccagtggaagatccaagtaggacagagttgccttggtgacgatgcacggagtggagtacccatatgggcctgtgtgctatagcatcccatccgtgcaggtgtttcctatcggagacccagaggtcttgacattctgtccttactagctccagacagggcaaccattagttttgcttttgactctgatggaactatacatagggagcagctaggataagggatgacaacctgagttgtgggcctctagggggagagtcagcttgtcccttgaggagaagtgaactatatcaactctgcttcttagcaatcagcctccagggtccgagcctcagccgctctgcatccctggatctgagggatgcttgttcaagtgggactgtggcaggagttactgaagaactgcttctattaagctggagccagggaaaggcattcgcctccccggagacctcctactgttggatgacatctggctctcaagggcttgtaggattcctggtgccaaattcctgttgtcctgagtgtgtgggggggtggggggtggcagaagctcagtcagggttagactcacttgggtttgggcgttggccccacctcttactgctgatcgtctctaggccattgcttcacttctagaactctgcacaattgtatctgcatcactggtctttgcagaacctgcttctgtggctgtgaaatatttgaagggacaaagcacaggagatccacctcactgagcctggagcagccccaggggcattactattataggactgtgggtgtagattctctggaggagaattcagggtctccaggtgactgccagtgcctgcccacctagactcagggaacagtttccagctacaaaggggtattgggcatttctggcgccggggtgagggagtgttcctgggttggcgaggggatagctttcaaggcagccgaggcttggctctgtctgctaactagggagccttcatctgttgcctggccgaacagagtggccagttcagccttgctggaatgccggaggatgggggaagtggctaggcaccgaggggggtgggcttggctaaatagatgacattcagatttacaaaataaaattgaaaagaaggaaaactcaaacaggaagcatgtggctggtgtctgggccggccgggagatgcttgcagaggtggctctgtgtgtgacaagctggccattcttcccactgtgtctcccaagggcacctctgtgaaggccagcctgtctccctccccagtgagacaggcttcttttgtcttgggcttcctagtgcctctcgtctcaacttggagccataggaggaggactccctagtggaagggtggagagaacccttgggcatgtgcccagtgcctgctggctgtgcccactcctttccccatcagggccgttcagtggagttgcaaccaaagcagagggtctgagtagaggccaccgttccaagagacttgttcaggaggactcagatctatagttgccatctactgcatcataggtttttagtgcatgttgggaaaggatggatgccttcagagggcccttctttctctcccgggggagaatgacggtttactgccctctctggaccatgctgtgtctgggcccctgtgaatgcagcgagctaacagcgacctctcctacttctccctattctgtcctaatgggatcacctacctgttccactgactaacatcttccctgcttctctagtgtcatgcttgtcctcttgctaatttaacttaaaaaaaaaaaaatcaagagtaggcatttgcctagtaaacagagtggctcttggcagggtcaagctggaccccggattcccacagccccttgagttggcagccgcctgtgttgcttggcttcaggagcaggttttcagggtttccttctgtcagtgagtggaagctttctctaggcccagctgctgtcttcacctggagggtgacaccagagggtatttgcggaggactagctaggggcagatcgttgtgtctggatcaggccagagtggagacagctgggctgtagactgacctggaggcggatgacgtgtcaaacccttgtaagtagtacttgtgcatctatggtcccatgctcctaacccagctgttgcctaaacctttccccacatcctcccctctctcagcccttcttcccctcctctcagtttttgcaccatctctcacccagaggagcctcttgtttctcagggccacagccttcttcccaggtttctccagcattctagaaacgtccccgtactgcagtcagcttttttgatggcaaatttccagtctcttctagggctacatagtggtgagaccctgccgcagaaccctgtttcacccctgtagagtacgccaggcctcagtgggcctcttgcctagagctaacacgtggaacattttgctgtgttattgagaagtgtctgtagatcgaatgttagattgccttcctcctgccttgggtggagaacagtggtgggaggttctaccaagcagacagaccagcaggtgggaccaggggtggggctgaggattgtaaccctgagaggaggccgggctcagaggctcctggggaacggaagttcagaagctggggcatcttgggaggtgttgagtgccccctactgttgtggccaccggagtctggatcccagtcaggcctgctgacaggtgccagagatctcactgtccccgtgatggtctacccttgtacttcctcctgttcctcactctgggtggatcgatagccccgccgctgggtcaaccagaaggcagtgtggctactggaggggtgacctctatctagcctgcagggtgggctggaaggtccccaaatgttcaggaacattttccctgtagcatttcctggtacctggcgggaggacttttccctacaggaaagtctctgagccgggcccagctgggaaggtgggcaggcccagctcactgagtcattccccgggcaactccacccagctttgattttctctccgggatttctcttttcccatccgagttccattttccccccaactccccccacccccagtgtggacagactgcaagcagcccttgctgaagaagattccagagggagatgactggagactcctgtgggccggagatcagcctctgtatgcagagaagcccttaaatgcaggatcagcacagcttcgaagccatcagaccagctcataggagcccctgaggaatggcaagggattcaaggccatttagggaccacacagacccaggcagacaccaaaggcccaacacaaagacagctgcctcttcctctcagaccaccctcagaagacggtgcagctctgacggctctgtgcccacccaggcagctttctgccaaccacacttctcctcctcagagtgacagaggctgtgtcataccatggaccttcgtataaccattctgtgagacctgctgtcgtttcagaacgaactcttaaactcctgccccaaccccaagtgatcagttcatgtgccatttctaactgatcctgtttcttctactgtcccccagatcctgcgcatgtgcactcaaacacacatataccacacacatacacacacatgcatgtacacttgagcacatacacgcatgcatgtgtatacatgcatgcgcacgaacacacacagagccattgtccagacatgggagcccagcactaccccagagccttcacccctgcccccgctgtactctctcctctaacccccttccccacatcttacagtggaccccctaagcactgaggccttgggtcctatgtcctgtcagtgagacctcctttgaccacatctgcctaccttgccttcaaatcacttgtctcagcctgttatcccatcagccatttgcttactctgattttccccacaacgtgggaacttcaggagaagaaatagccccaaagctttaattttttttatttttccattctctagaacagtgtcagctgggaaatccttgtcagtgacttctagagagtgtgtgtgtggtggtggtggggtatggggtgtgcagagaggggctgcaccctcttccaccttcaaaggcaggtgtgttcagtttccactcctccgggcagctcttgactttgtctacgggcagctcccaagtcacttgttagagagctgatggaatccttaggggtgaagaacattagggttcctcaagttcgcagcgtgtggaaccactcaggccgttctgcagataccggtttaggtgtagcagtgtgcagggtgatgctgcatcttccaggctcttagctgatgtccgcactgctgttctcaggaccgcatcttgaacagtgactggggtccctgaaggaccaatccaagcccctttctccatcctttttgttgtttcttttttctgttcaagtgtgctctttgggcaagctgattggttgatcgtggtgataaggagggaattggacctgggggacctgggggatctagaggctgcccagggaagatgtggactgccttgcagaaatggtgggtcacacatcaggagtgtggtgcctggctgaggaggaaggaggtggccagcccctccctccagttcagctttgtgtctcagtgacaggcttgtcagaccaggttctccagctgtggcgtgttcacatctggaggcagggcaggcaggggctaggggaaggatgtctggccttgtgctgaaggaggttcagtacaggcactgtgctgcctcattgctgtgggtccagaacatttccagaagaattctctacatttcccagtcttcctgctttcaaagtggtttcgggggaccttgattaaactccttgtgttgggataatccaattgctttctaacaagtttttagtggcttaccataagaaacattcattttctgttcacatgagtcaacggagggttcagctccaggcagccatctgcagatccatcttccaggtggaagttacaaaggagaatgtggggaaatcctgggagttttactggttgtgcctgggggaggttgtgtggatctcacttctgttcaagttccaccaatcagggcaaagtcatgtgactgtactgccagcaagggaagatgggaaatgtgggttagttgtgtccagttgtgttatggccaatgtggtggactttgggactttcaattctgagacctaggtattgacaggtggacaggcgtgtgaaccgatccttgtgacaagagtgacgttccaggagcttgcatggccgctctgcagaagccacctgcagagggggggagctgtggggcagtgtgctaatgaggaccctaaacagccatgcagtgcgagacgcatgggaggcaggatacatgacaacgcacgccagcggtgcagaggtggcaaacatgctatgttggtgccacgtggatgctgggagcccaaggccgcagcctgaagagctggtatttacttggcaccgtgattactgggacattggtgacatttgtgtggttgtgaagtttgtaatgggagaaaggggagcattggagaggtggcctcctcaagttactagttcagacagtggccctggccagaactcagatggcctatgtgtccttcactggacccccctgtctgtacagacaataatagtgtctttgaggcagacttgaaccttatgctacaaccccggcgcttttgctgcctagaaaggcttggttgggtctaactcaccgccacagctgctttctaccccaaggcaaagagaagcgagctcccggaaagctaaggttctcgtttcaaggggagagatggtgggagctggcctctgcccattccacccttgccctctcttcagcctgttcttcgtttttccttttgcaccggacatttgtggggaaagagctcttaaagcctggaaagacctccacccttgcctttaatctcagcgctcggggagctagagggaaacaggtgagttgaaagcaaacctggtctacatagtgagttctaggacagccagggctacaaattgagaccttatctcaaaacacacacatgcacccccccaaaaaaatttggacagagttacagcagggggaagaagccacttgaatacagaaagaagttgttttgtcatttaaacatgtcctgccttggcctcttcccatcagggggcatgttacagaccaggccagaatgtcattgccctggacagcagtttgaccccagggattggccttggcttcatctctgctctctgtcccaaactctgggcaggatttgatcctgtggtacccagggcagtttgggaaccacagtcttggccatatggaaggtaaggatcagaaggtagggcttggggagggctccatgccattcaccaccacccccttctcccatcctcagggcctcttttacttttactttttttggcaggggtagggaatattctggaaggttcatgtgggagagggaattgttggcaactttgggaagagttaagagaggtctctggcaggttaagggactgcagacccctgggggggggtggagctgggtgaccacagccttcacccagcagacttcactctctgtgtgcttgtaaccagccttaccctgacctggcacagcgttcctctggccatctgctcccttcccccaaatgtctcttttaccgccccccagcctatgaagaagccagatgtgtctttctagaattccactttcagtgtgttcctcctccgctccgagtcctccagggactccctgctgccttgagcaggaagtccaatttcctcctctcagattcagccctgtcctcaccctgcccagcgcacccctgcctgcctgccctccttaggatcaggaccctccagcacgggccaccttcctaggattgaaggaggaagagcctgggagtgccagcagtggctcactgcaggcttgggagcggggagggtgcatgctctctagtggttagccatgctgtggcctgctctctcctcccaggccaggctggaagctggacaagtccacacctctgcctaccagctttcctagtgctctactgccctagcattatgcctgcccttccctcttggccaaggacagctggagttgtgtagactaacgtgctgggatgaagctaagagttttaggatgctaagggttgtcaagtcatggaggattttcctgaaagctaaagggttatactagaaatgggatggcaccaaggaatcaggagtcagtcttcaaacagcccagtaaatctgcagtagctcacttaacccacacaccactctgatgctggctagttttatgtcaacttgacagaagccagggtcctcagagaggagggaccctcaagtaagaaaatgcttccataaggtcacactgcaggcaagcctgtagggcagtttttagatcagtgattgaggggggagggcccagcccgttgtgggtgtggccatccctgggatggtggtcctggttctatgagaaagcaggctgagcaagccatgagaagcaagccagtaagcagcaccctccatggcctctgcatcagctcctgcctccaggttcctgtcctgccctgtgttcctgcctgcactgcttttgttaatgaactgtgactgactcggaaaacctctgctgctcaagggagagggaagggataagataatgtgcctggggttcagcagctctttctggaatgtttctgttacagcgtggatatggacacagcagctcaccagtggggttcaccagtggggctcaccagtggggttactgatgcccagagaggtatccggggtcagcaagtcctctacaggctggagctggaaccctcctcttctcgactctttctcctgcatgtatgcagggaaaatgagcccacgggagtagactggggtagccagcctgcttgggtaccgtactttaggctccagagcgaaggctcacagtctagctgggataatactgtcagctagccattgatgtccttcttctcagcaggtgctgggggattggcccagcctccaccatgttaaatgtaacacatgacgtggccaaccctacacactggctgaactcctgggatgcgctgaggtctcttctcttgagtctggcccacacacaccagctgggcagctccctggggccctggatactcacagctaagtagggcctggcccagacaactcccaccatctgctccccagtctacccattgcctcctggacctcagattggagactactggtcagactgcactgctgtccccgcctaacagacagggagaccaatctgtgtgtgcctaccatcgcagccatgtttattcttcatgttaactaaattgttgtgccctaccacggtgactccagccaggcctgtgggaggatgaggagcaggccaaacgttccctttagtggttacacattgtcttaaggttgtgtgtgtgtgtgtgtgtgtgtgtgtgtgtgtgtgtggcggggagatgaagagtgatctgtgcccattctgtacactgatgcgtaaaccgcaggacctcaggacgaccgtgtctggaactagagtccaagtaggcgtgattcattgagatgaattggaataagtcaggcctcctgtgcagcaagactggcaatctcctaaagggacactgggccacaggcagaggcatgtgaagacaaaggtcttcgacagccatggagtgtcttgtgtggcctgaatcaccggaaactggcagctgagtcttcctcagagccctgacaaggccaagtcctgatggcaaaataacacagtcaggcctggtggcctggtggcctgggggcgtaactcagttagtggagagattgcttagcacattcggtgtcctggcttaaactccagcacaatgtaaactgtccgaggttgcccttgcctgaactgagaggtggaggcaggaagagcagaagttcccagccatcctcgattacatcacgtggtttagaccaagccaggcttggcctatgcaagactctgtcacaacacactaccacgttggaggtgacatgggggggagagttatgtgtgaagtgagagtggcctctagaagctgacaagacatgggaaggttgctttctggagcctcaggaggcgacagctccgttcagctccgcctgactgggtggagatagctgttcagtgagccttgctgctccagcaggctctgaagtaagtctcctactactctgaacccccagagcccccaacagtgagcagcagtcccctctagctgacttctggcaatgacttcctctcatctcttcatggctagagtgggtctctcttgccagtggagaatgttctagtactctgtattttgtatttcgactttagcatgttatgggcctatgacccaacaaccaggtcatccttgccagggcagaaggaccccctctgctctttcccctttccctggcttccttactgtttgcatgagtgttaggccagctgcacgaagtgctgtaataatgttgagtgcttgtatccaccccacccgccataccatcctcagccctagcatctgggaactctgagtgacagctccacttgaggctgcccctttctgccctacagagcacccagcactgccatcttctccagtcttttgtgagttgcagcatcttgaccatttcttggactgtagagggtcacctggttagccagtgtggttctggagcccaggttacacgtgtctgttctcctttgcgtatatgtcttaaagaatgggggctggggtatttataaatacacctcagggagaggcagtgttagcagcgttccctccactccacttgcccggttcttctgtcctatggccttgctctgcctggctctcattctagtcagtgttaagatcttacttcctccttcccttcctcctctccttccccctatcctttcctgcctcccacttcctctcttcatttttactgtattgtggtgagatatactaagcacaagatttacccttgaacctttgcgagctgcatagttcaggggtgttaagcgtgtcccctcgtcgagcatccatcatgttgtcttcctcaggtctttttcttattttcacctcaagggtttcatgacttatcctatccagggattaagttgttcttcaatgagaaccctgacaaaggtccaaaggtgtgcatctcttgagacatctctgagtctgtttataacttcatattggttgtgaagtcaacagtttcatttcttccttcccagccttttcaagaagcccgtgctgaaggctgaacccagggcctcacactcgataggcatgttcttcctttttacactttgttttgagactggatctcactaagttgcccagcctggccttgaactcatgaagtagcacaggcaggccttgaactttcaatctttctacctcaacctcccaagtatctgtaccatcagacccttctagagtttaatgtctctcaacaactcaacaatctcaatctctttctctctctctctctctctctctctctctctctctctccttccttccctcccttcctctctctctccctctatgtgtgtatacaagtaacataacaagtgaaactatgtaaaatcttcattgacaatactagctgcccaaattaaaaagtggaatctcaattgttaagataactgttatgagggatgtgatagcacgcctttagtcccagcacttagggtgaagaggcaagtggctctctgagtttcaggctacctgctctacagagcgagttctaggctagcctgggccctgttttacaaaaaaaaaaaaaaagttatttcccctgaattggggtgtgaattctatgggttccttcctcccccacctcaggagcttttattttatgacagtggttctaaacctgtgagtctgaccccttagtcacagggatgacctaagacttatcagaaagcagacatttaattacaattcataccaatagcaaaattagttatgaaggagcaatgaaaataattttatggttggggggtcactgagacatgaggaactgtattaaagagtcgcagcattaggaaggttgagaaccactgttttatagagattaatcaacctaaatttttttaattgcataggatctagaatgactaattttgaaggagagagacttattttaagacttatcaaaattctacagaaatcaagaaaataatatcaggccatggaaagcacaaaatcctgaaatagacttgagttaattgatttttgacaagacttgggctaatttagaaggcaagagagccttctcggcaaactgctctgaggcagtgggataacgaattctgaaatgtatgttgacatttgatgtcagatctaattggagcagagaattcttctgcactcccttgtctccccaataagaggatttgtggataatcactttagaggcactcagtccctccctgtctgctgtttgtatagcttcagtgggtcaacaagggtgcctaactgttcaggggcaaagagtattccctcctcaggacttaagtcaacaagagcaaaccacaggctgtaactcagttagttggtagagaatgtctcacatgcccaaatccctgactttgatcccaagtaccacaaaacaaaacaaaacaaaacaaaacaaaacaaaacaaaacaaaacaggattggttgtgcatgcttggtaacctcagcaggtggagacaggaagatcagaagttcaaggacagcctcaagtacatagtgggttccagtcttgattgatctctataaactctgtggtctcttaagagggatggggggtggggggatataaatcacaaaaggctgtgtcaattagtcaactaggataaacaaataggaagtactatcaaagaggggaggtggtaacctttgcctgggaccatcctagagggctcttagggcaggtctcaccaggaaagctgcacttgctatcactgtctgatctaatttgccctggagtttttggagctagccttggtaagtggccaaggctggccttgaggtttcctgcttctaaagtgctgggagcctctagcttgtacttcctaccgctgtctctgtgattctcagagaccccagcatctaacattggagctgccaagtccacagtgggcaccacagacagacaaatggaccctcaaggcttctttgctcttttttttgtattggaatttgtgggtcaaagagctcagtagctcccagcaatgttcttttcgtcccttaggtagaagagggactaaggttgaaacactggagtttaactgggcaaactcactggaaactcctccctcccagcaggcgggcgagcagttgggcctcttaggttacaaacctaagttgggtgggacccacctcctcctctctccccagtgtttattgctgcagagccctgcccaaagggagctgtctaatcagctttcccaggctgagacagctcctggaaccagactgtccagtatctctcacgacctaccccttagataaacagtcctggctaaagaggttgcagctggttgcaaaggctgcactagccaggaacctctctctccaagaaggacccaggcaatgagatctgcttttcttccggcctgactcagggccttctgggagacgggggaatctactagcctggaaagatggtcacagcagaactccaggctgagtgaaacccttctccctgtccatgttcctagacttcctcctcatgaaagcctggccaggtctgtccagggcatagcccctcagtatgcttatctccgtggagttcaaccttacacatcagacactgcagcttggctatctagcacagatggccccactgcctaccatccagccatcttaagcttagacctttaactgctgccgtttgagacagcacactgtgggcgtcacatgctgctggcttaactccattaggctgcctttatttggtttgccctggactcagggccagggcttttgacttctttgaaaggcaacctgcaaacagtgggcatccctgactggttatctgggctttgcgttcatggcacatggactgtgtgattcggtgactgggagagcccactccaaggttctgttagcttagctgaggtggattaggtgtcgggtacctgggctctatacctgagggctaccagtgtggagtgagcctgccagaggctcacagctttggggaagacctgtggacccagaactcagcagacggtctcatcttggccggggtgccaagtgggtgtgctggactaagccagaggtataccaagaggaagagctgcttgctatataggaagagggagccagtgagcccctgcaagggtaccctcaccccctaaagccatcgagaggaaacctcaagtctgtccctactcttgccaggctatcagatgaccctgcatccctagaaggtacataaacccccagtggaaatttagattgcacttcagccgggaaggcaaccgggatgtggctctcattgtcaagactgagtcagtcttcttcacccagaagccttctcctcagcagttgtagagctctttccctggagccgcctccccagctccagtgtatacttttgagaatcctgtaccccggaccagtgctgttcaacaggaagtacgacatgagacacatacccaataaaagtaactctggtagctagtgaaattaatatttaaactagttttatttgggagctggaaaggtggctcagtggttaggcatgcttgctattcttgcagagggccagagtttgtgttgtattcccgcaagcatctgtaactctaggccaggagctctgaagccattggtctccactgacacgtgtactcatttacacactcacatgcacacgagcacacacacacacacacacacacttaaaatacaacaggtgtaaatattttatttatatgttctggaatattctcgacatacaatcaacatcaaattcttcttttaaaaaatgatgtatgtgtgtgttttgcctgaatgtgtgtctgtgtatcacatgtgtgcatgcctgaggaagccacaagaaggtgttggatcccctggaactagagttacacatggctgtgagctgtattgtgaatcaaacccaggtcctctgaaagaacaactgggacctttaactacagatccatttcttctgccccagtataaaagtcttaattttataaannnnnnnnnnnnnnnnnnnnnnnnnnnnnnnnnnnnnnnnnnnnnnnnnnnnnnnnnnnnnnnnnnnnnnnnnnnnnnnnnnnnnnnnnnnnnnnnnnnnnnnnnnnnnnnnnnnnnnnnnnnnnnnnnnnnnnnnnnnnnnnnnnnnnnnnnnnnnnncagcgtgttttacatgtacagcccatctcgacctgtgctggttgcattgcaagtgggcagtgtcatgtgtggacagagtcccctgtgggtaatgcaggggtacagctgtgtaacagacagtccgcacatcagccacttccatggcacactggagccggagagaggggcctgggctctgaaccagggctgcatcctcctggctcacagttgcctcctctgcctgcacaggcaaggctgtgtaaccccagcgtgagagctccctgctgacatctgactccagcctaacatagagagggcctgtcatctagaaggacaggaatgaaggcatgaatatcctgtgtccctccctgcccacttctcctagccccacattcccagtgcacagttagcgtgagtcagaatctgagacccaaaagacaaggttggagtcagagactctacaagtggtagagctggagggtaatttaagtttgttccacaaagagaaactagaacttacaaaaattggggcacagaggagaagggcagtccaaagggaaagaaagccaggaacactgagagttccaggccagtctgggctgtataatggccaggcttgctgtataagaagaccctctcacttttctcagtggtacagccacttaaatgagatcctacatcttattgtgacccgtgcacaccctggatccagagagagtcagttcagagaagcatatccctccatacccaggtgtctggttgggccttcctgtgtcctcagagctccacctcagacaccttgtggagtcattacctggaggccccaggtctggtctatgcatggtattatctatcctcagtattttgggggaaaaatcacttataaatacgcagaggatgaaattgaaaagaatattaaggaagcatttcaagacatgtggtacaaagatgtttattgtaatgctgtatataataacaagaggtgagaaacagcatacagcaatggggtgatgggtgaaatgagctgtgagccagtcagacactggaattctctgtcataatttaaaaaggcagtatgatcaggcattgtggcatatactatatacacaggtaatcttgtatttgactgggtggctagcctgagctacatagtgagaccaacagaatgttgggcgcttggagagatggttcagtggttaagagcaccactgactgctcttgtagaggtcctgagttcaattcctagcaaccacatggtggctcacagccacctgtaacaggatctgatgctctcttctggtgcgtctgaagacagtgtcagtgtactcataaacaagtctttaaaaaaaaacataacccaactggaatgttgatattgacataagaactgggcatgtagcccagaggtaaagctcttgcttagcatgaacaaaaatgctaatatagaagtatgcatctgtgtggaaaaaaatgttcaatgtgtggcacaggaggattgatgaggtcatcttagttacacgcatagcagtgtgcgtaaaaggatacatgctgcccccccccaacattagtgttggtttttaggggaactaaattaagtgactctttttcccctttaaattttcttgatcaatttttgtttcttcatttgtgttttcctgagacacaatctcgttatacagcaagaccggccctgaactctcaatgctcatggcttggcctcccgagggctgagattataagcgtgtgcggctgcatcaagcttccttcaccacagaccccacacatggctgcttttgtaatttctagtttctccacactgagcaagaacgactccggtggtacagagggaaatgcacaaaagcacaagaggggtgcagaaatcaagggttcgagcctgcgatatccatttcgaaacgtatcccagaactcccacgtacaggcttataatgctgtactccgacagttgtatttaaaggcagcaacaaggaattattaaatgttccagagctgaagttagagcattaaaacccatgagccagctttggctaaatacctatttgggaagtgaaagttgactatggtacaatcttgctctgagtggaatccacctaactcttcctatgtgggctctaaatgctccatggagattaagtaatgattatgaaagagacagtcctaaaaccatgtgttaaagctgataaatgaatggacattcatgcgtggggcaagcatgctcgcgcaggcgcacacagacacgcatgcacccggtcctgcctcatgcatcctattgccggtccctctgcccgcctcacaccatgccagccacactggctttttccagtggtttgcactaagggttcccttcctggaacgcatcttacccatagtgctctgcttcctcacctcctgggggtctttgcctgtggattggtaacatcttcctcagcaccccaaacaaaagggccatgtcttacatagatatttcaactgtcttccttcttctttatatcttccctgacaaatgaccgatttgtttattgtcggtcttcctgcaccagaatgtaaaacaccctgcgggcaaatactgctttctctaatgtcccgtgtccttagtccccgatcagcgagcatctgcagacttgggaggagtgaatggaccttagggacgagtgacagatcctcaccctgccaaggaggaacctgatccaggtcacgcagctgccatccgggctgcagccctcagcatcagccgctcacagggagggacccagccttgtctgtcctgcttccctggattcttccagttcacacagaacgtgagcccagaatagcaaagggagaaacagctgttcccgcagggtcctggaagccattccagagggctcgtccctggaaaaacagtagtgagctcagggtgggaaggaagaagcggagaaaaggggtcccaagccgcgagggccatgcaatagctcaggttctgtggttaaaataacatctgctcctggggtttcagagcagctctggaaggtgggtggtctgtctggagtatcaggtgggcctttcctccattcctggcccaggaaggtttgggatatgcaggtggctgaagtattcacccaacagacggatgcagtaggaaggcactgggcccaaaggcgcatctggaaaccccagtctggcctacaggcctgttggtctccggcccaacctcactctccggcgtctccagccccctcccctttgctgagatggtgcaggcatcctctttgatgcatggagagctctggccttctctcaagctccatgtggtttgttaatgggccgtgaaacgagggatttttttttttatcatccgtgtgagcacactggtggggtgctgatgctgctcagtgttctcaagcctgtctgtctgtctgtctgtctccccagatgcagcttctggataagtttcctattgaaggtggccagaaggatccgaagcaaaggattattccctttcttccaggtaagctccccgtggccccgtggagggctggcagggactgggagaagcctcccccagcaaggccagaagaggccgcctttggcaggggttagccacttcacaaaggatctgcaagcctcaggtttgaagaccactgtcctccatctcggttccctggccactccggaatcatttctgccagcccctggtttatactttctggggagtttctgaggctcttgaacttgttatcttcataaaaaggctctgtctgagaggatgggatgtgtgtataatcccagtactcaaaaggcaggcagaggcgggaggatgaagatttggaggccactctgaacttcatagccattcctcagcaaaacaaaacaaaactcccaagctgagcatgggcccagtgaggtggctttggtgaggatacttgccaggcgtggtggcgcatgcctttaaccccagcacttgggaggcagtggcaggcggacttctgagttcaaggccagcctggtctacaaagtgagatctaggacagcctgggctatacagagaaaccctgtcaagaaaaaaaaaaagacacttgacagcaagcctgacaacctgagtttgatgcacggtggaagtagagaaccaccttctccaagctgcactctgacctccgagggcgaccccacccccaccccatgcacatacaatacaaatgaaatagtagtttaagatctgccttaggaacatagtgggtcccagactgggctacacgagagactccttctcaaataactaagaacactgggtattcttccagagggcccaggttcaattctcagctcccacagggcagctcacaaccatctgtttcagatgtccagtaacgtccctaccctgcccccatgacatccagattctctcccagcatccttgggcttgaggcacacagatgtccatgcaaacaaaccactcatactcatgaaaaaatattggtgattcagggtttttctgtgtagccctggctgtcctggaactcgctctgtagaccaggctggcctcaaattcagagatccgcctgcctctccctcccaagtgctgggattaaaggcatgaatcaccactgtctggtgcatatgtctgtgtgtgtctgtgtgtgtgtgtgtgtgtgtgtgtgtgtgtgtgtgtgtaattttaaatatattttatatgaaatatatattatatatacacacacatatatataatgtatatataattttcttaagttaaaaagtatcataaactaaccaaacaatgcagaatcatagagagacttaagttcacctgggaaaggattgctaatcacaagaacaactgctaccccccttaaattgagcatactccccaattcttgatctcccataggcctgatgtgttgtacttccctagcacacctgtgaggtagcagagacaggatttgaacccagctcggtctagccagtcactgcaacaccgtttggaacctgtttcatgcaatcaattatgtgtattttagaaaaaaatgtctctggtaagccgtgacctgctgttactgggatgtctagagtctgagtagaggcctgtaatgtgattatagcacacttcctcatcattactgcagagagctgttcctactgagagctgtattatcgcttctcatgatgggggatgctgctagaatccagacaggttaattaagtacccttgaaaatggcagagctaggcatgaactcagggctctgccccaaaccacgaggggacactgccctctggttttctgggacctcaaggcagtagattctgctggttctcaggacagttcccttcacggaggtcttcctactagattaatgctgaccctggaccctcacaggccagccacctggatgagttgtcagttagacattagtggcccacggtcattcccttctgttgattgagagcaggtacctcacatggggagtggcctctaaaggccctctgaagggtgttcttacccgacccttacagtgggaaaagctacacatcttcagggcctcatactaggcttatagagaaggaaccggctctggggatccggagctaagagcctatatagtttgggcaagacaagaactgacctttgagagcaagtgtctcacccctgcttcctccatcggcctctgagtcacaagaccagacagcgactttgcactgagtccagggcatttagggtgtccaacatctgggtctgcaacatccttaaattcttgcaacagtttggatgctacacccacccagggcagggctgtccagctagggtgttataggtgaacgtgtcccataggaacatgaggttatcagtatcacacgagtgctggacttggccctgggacctgaagctgcctattttctcaggaaggattgggggtgggggacttctactctgtctctggccaatactacaaggaaagagtttgtcattctgccagtcatgcttaggaggggagctgactatgccgggctgaggggctagggtgagggtatcccagctacttcaaagatttttttttccacccaaggaacccttgaaatagtgagagacacgagcatttctaccataagaatgacttaaagtggagagtggtggcgcacgcctttaatcccagcacttgggagggaggcagatgcaggcagatctctgtgagtttgaggccaccctggtctacagagtgagttccaagatagccagggctacacagagaaaccctgtctcaaaaaaaaaaaaaaaaaaaaaaaaaaaaaaaaaacaccaaaaagactcaaattaggatgtgactctcactgttgtgtcactatgtgataccgagtgtgaccccatgagaagcacagagggaaagaacctgtaagctgcgtgaggaagtcagaagaggcccaaggaaggggcctgagacttgatgtggggctggagggcatggcttgagtaccaccaacttagttccatgtctcagactgcctgcattcatccttggaaacttaagctctgccagttaccagctgtagtaactttgtgcctcagtttactcatctggaaaatggggtgataatggcatctactccatgtggcagtgggaaagggaagaatggattaatgcagcccaggtgctcagaactgtggctgtcccctagcaagggtcaataaatgttagtccttattgttaccatgccccgcattgcctaggctttcccacctcgcagtcacatacataatttgatgtgacctgaagttattgtttctgttttactgactaggaactggaagctaaggcatgctgagcggtttgtataaggactcacagtctggttagccaacaccaggactcttttgtctgatcttttggtggtccttatttgagataggatctcactttgaatcctaggttagactctaattcactaggtagctcaggctggccttgaactcaaagcagtcccgtcccctcatccttctaagtgctaggactacagggatgagaccccatttctggcaaacgccagactcctttgtccctcatgctgggggaacccagctcaactgaggccccattgaagtccagttccattcttaggacttgagtgaggactcaggtcacgtgaggctcatttgcatagtgcctgcctcatggttaattcccagagaaggtggctctttaaagagaaagggagaggtacagccaggcacctttagtcccagcgctcgggaggaggcagagacaggaggatctctgcgagtaccaggccagccagggctacatagtgagaaccggtcactcaaagaatacattataaaacaagttttagaaggaggtgggtgttgtagagatggtcttgcagggacccaagttcagttctcagaacctacgtggggcagatcagtaactcgagttccaggggatccaaaacctggcctctgcagtcacctacacacagataccccaccccgtgagcataattaaaaataaaattaatctttgaagaaatttgttaatttcctgtgagggggtgggtgcatgccatggtgtgcctgtgggatcggaggaaaacgtgaactggttgtctctttctagcatgttcttcccaggtagtgaacgcagtcttggcagcaggtgccactacctccctgagtcacctcaccagaaaagtcacacacaagatacctttcaaccaccatataaacgtgaccatgcatagtagggagtgttgtcgagagaaatgggggttgaccagttccctgaaggaaacactgccttttcttagccctgctccctctgagcccacctttcattggctctgtgccttggactcctggtctttgtgcactcagtctccagggcttcagactgggctagcccctgggcagaggccactgggaaagggcctatttagtagctggatacctgttttagcttgagaggtggattcaaccgcgggcgactcgggaatgctctctcttttgtgaatttcccactgtcgcgtcacccgtctcattgtaagagtaggtcttgtgtgtgtctctgaacaccaagttgtttctcctccttaccttttgagacggtgtctgaggtcaccgctgattctcccagagttgggagggtgggtcatcctattggcaaaggcttaacaaaaccgtaagggtgcacacaccccgtgcgcttcggacggccacaaggagggctctggcagcattgtgtctcacctgggatttcatggtaaggattcatggttaggaaagctccagggaggagctcagttctagttccagagttgctggggccggggcataccaagcatttgtgctgcccgggaagggtttggagtatatatactccaagctccagtccagctacctccttctggcccacctgactgcaggctcatggctggggacttgaagggtctggctggtagctgcaaaaggagaggaactcaaagaactcgaggctttgctaacatgctcactcagctaccaggccaatggtaggaagtcctgcacaggagcaatgcatcttgggatcgggacttaggctggggatgtgtccggccaggtctggcacacctcgtgttcaggccagtctgtgggtttgcaaggtggtgagcacccagtgtgcctatgatagaatcttcatccgagagaagttggctcctgatggtacccagtgcctcttaggggacaggcaggacattatacagcagcaccaggccaggaatagggtttaggggaaggaggtccgtgagtagagccaatgatgtggtagaggcagggtttggccagtgcctgatatttgaatatcaattaaatcctgtataaaggttggaggtacatgcattgcctgtaaggctccccaagttgttttcacctgcgttaaaacctgtttgctggattctgggaatgaagagcccatggaaggaactagaaggtgtggaacccacaaacaaggggcagctctccggtacgtgtcccggggagaaatatgcacagctcaggctgagaaagggcagagtgttatttggaaacttgggcatcctgagaagggggtctgaggatggactcccctaagctgaacctccaaactgaattgtgagaatgagggagccactcctatttcctggctgacctctgtggcttgctctgagccaaggccctgtcctctctagctcttaccatgtttctgttgttgggcgggacacgtggcatatgctgcatttagatttgttcatcagtttccttatttacacacagtttaccaactactaccgtatgcctggacctgtactggccactcctcatcccttcctccagggtcactgatggctttcatccctaggttagagaaaaatcaactctgggaagaaggctcagtggcacctgccaccaaaatgagtttgaaagacccacaacgtgaggactcccccacattctgactcaggagaggcgacaccccaaaatcaccaacgagaaacggtcttgctgcaaattgcaagaggatttttattcaagagcgctctcaggcccacggtcatacaccacgcagggtagaggaccgtggcgccccgagtagctgagtaagggggtatttaaaggaagaaaccacaactcaaggaggtgggaagggcgttgttggaaaataccaaaaataccagttaagagtcacaaggaagtgcaaagttacaagtgtcaggttatctctcaagaaagtttctaagagcccctaacaatagcacatttgcattgcaggttccagtaatggtcagggtgccattctttgaattgaacccaggaagcgggtgggtggaggaatgtggctatctgttttatgattagcataccttggagcacagagtttactactctttcaagttcaatccctgggatcaatgtggtggaaggaaagcgtgggcgctcatgagcacgtgtgtgtgcacacacacacacagacatggaggaaagacagacagacagacaggcacagacacataggcagacacacacacacacagaggcttacacaccacacacacatatttaaaaagagagaagtcctcccgatcctgccccacgtggtagagcttcaccctctgattcgctgtctttccccggctaaggagcaatctcacggcctgcctcagcgaggctccgctctgtcttcccctgctgcctctgtacctgccaagtcaggcccaagaccaagcacaagtaccctcggcccctccctcagctgtcactgtcactcaagtgttaggcatatcctgtttggggtcaggtgacctggaagggcctcccacgtgccttaagcggctgaggtccttggcaccaagtaattattttgtgtgtgtgactaaactatttagtgtttttcattttgtatcattacacatgcagaactctttggggtccgagagcgccatagtccttcagttatgaacctgacaggactggctattgactttcttttataaaatacccttccctcccttctttttgaaatagggtcttgtcttagggtttctatcgctatgctaaaacaccatgaccaaaaacatcttggggaacaaagtttagcttatagctggcaggtaactgtcccatcactgagggggtcaggacaggaattcaagcaggatgggaacctcaaagcaggaagggaaacaggctgtgggaaaacactactcactagcttctaatccaggacttgttcgcctgcccccaggaccaactgcccaggggaacaattgactatacacacacaccctccacctgcctaccacatttataactgattaaaatgtccggtagacttgcctaaagaccagtcttacagaggcactttctcaattgtggtttcttctgttctgataactctagttagtgccaagttaacaaaaccaaccaggataggcctgccggagcctgtactactctgagcttgccgtgtagctaaggatgacttttcaactctttcccttcttgcctttgcctcccgagtgctgggattacagggatgcacgactgtacctggctttaacttttaattttgaaataattacatgctcatgaattgttgcaaaaataccaggcaccatactccctctctggcagttccaacaactgcggagtaggtagctttgttacattgtaaggagggtcaggccagacattctccaccaccaaattacttcccacagttttttttctttaaaattatgtgcatgtgcatgtgtgtgtgtgtgagtgtcagtctggcgtatgcatgcagtgcctccgtcagattgccctggaactagagtcagaggcagttgtgagcggcgcagcatgggtgctgggaactgaacttgggtgctgtgctctgaacggccgtgcaccttcttcagtcctgggacatcttagataaataagatactgagtatgttatcaaaagcagagtattactgttggcaccttaattgagcttgccggttgccctgagcgactgattttcgtatgaagcatatggaaatgctagtgagtgtgcatggcagctggccggggaggagggcagctgcccatgcgaagctactccacagtcaagtgccagcactgctgtttccagcaaagagctatgggaagaacttgatttgtgtgaagaaactggcttgaagcctcctaaacaaattctgtgggataaatgccaccatttcagttgccctcgatgggtttttagtttttttgtttgtttgtttgttttggtttttttttttttttggttttttgttttatttgaaataaggtccctcgatgtagtcctgattgtcctggaattcgttgtatagaccaagctggctccaaactcacagagatcctcctgcgtctgcctccccagtgatggaaattcaaggcacgtgctacatgttttattaaaaagaagcctatgtgccaggcggtggtggcgcacgcctttaatcccagctctcgggaggcagaggcaggcggatttctgagttcaaggccagcctggtctactgagtgagttccaggacagccagggctacacagagaaaccctgtcttgaaaaacaagacaaacaaacaaaaagaaatatgtgataaattgttacaatacctctgaaagaaagttcttgaattgaggtggtgcttgcatgttaacccatcactttatgaggctgaggcagacagatgatagttcaaggttagcctgaactacatatgagttcaaggccagcatggatcatgtattgagatactactagtagtcatgataatatcatttattgttattattaattattattaatagaatctgtggcctctgggttgctgaaaactggacagatctggagctgggagactaggaagtcaccttgacctcaggctttagggataggaacagcgtcgtagagaactgtgaatggatcaaggtgtggtactacaagcctgtcccagcacttaagcagcagaggcaaggggatcaagacttcaaggccaacctgggctatgaagtgagatcaagaccagcctgggctacatgtgacatggtctcaaaaaaaaaaaaaaaaaagcaaaaccaaataaacaaacaaacccacacagggtatctggtcgcaccctatttgtgagccagtttatcttactgacttcatggctaaccgtgtaaaatataacattcttgaatcagagacgtcagactttattacagcccacgtgagtggcgggggcatctttacatctgttcatcctccctccctccaagtttctgtgaggtgacaagattgtcttgagacgtcatgtgcacgtgccatgggctgcaaactaggaagggagcctagacattggagacattagggaaccctcatttttattacaggcaggaagcaaacctgttttttttttttttaaaaaccatggggggggcggggcacaggctgttatctctggaaagataatccaaaacaaaaagtctgctgcctgtttaggaggcctccacctgtggcagttagagagccagggacagtagtctccagggtatatccggctctgcttggaggggtaggcagaagtgttttttgggtacttacctcttgatgcagcctgaagtttacatggaactctctgccttgtttgaaaagactactgtggaaaacccatctcctgttgcccatcctggggctggagtctatttcctgtatatcctgagtttgctggcccaaggagcctccgggggaggaaatggtcactgcagagcagggaggagtgaatatagccactgatgtaaaaagcaaacaactgtgaccagggcccagggacctcagaagccaggcagtggagcagaaagagctgtgcttagtctgcccaggtgatgctagggtcaccttcaacttacgagctgtctgtgactctatgccagctcactttacctctggcctccagaaagccctgtggtcctgaggactgagtcagccccctcccaaggccccttgcatctcctggtgaatgagattatggagctataagatggcttgggccaccaagcaaccccataactataaacaaggtaggaaccggcagcctgaaggctgcatgctgacctctttggctcacaggatggtatttttagacagcagccgtgctcgctccttttgtactggctggacagtttacataccagttcctcaataaagaggccgtttggagccagagtgcaggagtgtgctgggtgaaccagagaccctggcttatgtctcccttacccaggagccctgtgcaacagatccggtgtttattcagcactaaaggaagcaggggggagggacaggttttagcctgaggagggctgaccctcttgcttaggtctagatgtttcccttcgtctccaccaggcactagtctaagaagcctttccccaaaggatctgggagccaggacaagcaatgactgggctctggcagggacgtgacatctaagaagtttccagaccctgctggtagcctgaaatggcaggggaaagacagacttctgtgatgaggataggacagacagtgtcttctgggaacactgaggtataaaagctgtcaacagaattacaggtctaaatcatgcacctccatacttctgggaagcgctgggtctcctcttgtaatcacagctcccactctgtatgctgaggcccgtggctcccaaagcccgctgtaagcgtaagcgtgctgctctgagcttggctgtgttcatccattcctttcctgccgcaggtatttaatcaagcacctactgtgtgccgggatcagctataggcacttacatagccaagaacaagtgccaacaggaagtttatcttctggtgggggtgtggggatggtccagaaaacaaataaatgagcaattcccaatcgtgacaggaatcaggaagaaacagaactgtgagtgaggtggcccaggtggtctgagatttgttagccaagaaaggcctctgcagaggtgacatctgaactgaggcaggcatgggtaggtcagggtccagggatgccaggctgggaagatgatccaagggggactaaggagtgtgtgtgaaaatcagcatgaagcagtggagaagggaccaggccagctgagcactgagagagttgggcagattgaggtggggccaagaaggctacccctgaagaggggtaccagctccacaggagcgtgtgaacggtgagagccctccgtgtccaggcaatgtgacaggccccagaggcttccagccccaggtccccgaggtctacgcaggcagcgatttcacagggggtctttctgctcttgaaaatgaatgtggatcgggccctaagccctgcccctactgcatctgcactttcagggccaggaagaactagccactttgtctgaattttctgtttccttcatcccttgcttagagtccccttcagaagggagtcagcctcccgagcacctgccccaggtctgtagtcctgggctgtctcccaggactcttccccaacaacgttcggttgaagcagatgcccacactctcggacagcccgggccattggacatgcaggaagtgtgctctagcctggaagcagccttgaggtgcagcccggtcacctcaaggacatgaggtcactactcatgtctgtagctccataattaagctaagccaccagccctccccttgcttgctggcaacaccatccaaagtgatgggtgtgacttcaggcccctgtcacactcatgaccttccccaccctttcagcctggaaataaataatttccttatggaagcccagcgttcttttacaaggtcaaaccgttttcctctgtgcttagagataacagttacatgccggtgtccccgggagtggtggtgtcggcaaactcacattcaaacaaagttactcggcctaggtttgatggtgtcagaggggaaactaaggcaggagaaaggagatgggcttcatggggtctgtgagagcagggatggactaagctgagcctgcaatgtcgggccacacagagtacaaggtagggaagggaagaaggctgatgacctccacagggttgagcagagcaagtccccagaggtcatgctacgggctggggatttatcccttctcgctgagatgttttaggccgagagatttctatcttgaaaggctccttcagtgtggcatgcggaaagactggaggtgactaggcaggcaagggatgaaggcggcttgggagaagccgagggaagaagacagttctcaggtgtatattacagggagcatcagttaaggaccgcaggtggggatcagggaggggtcaagggtgatgaggtcatagatcagggtcagggtcagccctggtcaaaatataaaccagcatgttacaatggccccatttcagacctaccctgtgtttaccataaagggggaagaagatggcttcctctcctctcccttctggtagccactgcctttggaacgtttgaaaggtgcttttgtgactatgttgttcagttggcagagtacttccctggcactcacaaagtcctgggtttgattccctgcactgtgtgcgctgggtgtggtggttgtgtgcccgttgtcccagcactcaggaggcagaaagatagaaacttaggctcattctcagctacatagcaagcatgaagctagcctgggtcaccctgactggacccaggcccaaagacagagccccagccttccctctcctctggcagggtctgagttggctcttagggtcccatcctaccatataaagtgactcaccattcatcccgggctgcttggcatcatcagaccctggaaacctccaatactggcatccactgaagaggcttaggctgtcaggctgcctggtccccaaaccacagatctggccgagggggcttggtatggcctgaagatggagcctgttcacctgaatgaatgtgcttccaggagacagggaggagcctgggccaggctgttacaccaggtttatctctaccatcacaggctgagtagcccagaggagaaagtcctatttgtttccctctgggacagagcacaaggtaccaggttccaccttagagagaaagagcttggaaggacttggggctcagatctgctcttaaacctggggttccttctcaatgctactactggtctgagtataaaacacgacttaaagggcgtgtgtgtgtgtgtgcgcgcgcagaaatgggcaagcactatgaagtaattcatcacggggaaacttagagtcaacatacttggggttcaaatctcatcccggactcttcctagctttatgaccctgggccagttccctgcagcatccctgcaccttcagggtggcccagcctcaaagggaagtccgcagtagaggcacagtgagcacccccaatgccgtggtgagcgtggttatgaccgtgtgctgagcctgctctctgggccagtgtcaatgcagccttctggaatcttctccaggcatggtggctcttctgagacgcagacctaggcacttgaacattggctgctcaaaatgtggttggtctcttgggcgttgtccgggagctcattagacatgcagtctccaccccagacctgctgaatcaggcctgtatcttaccaagagccgggtaagggatgagaaacacttatttaaggccctcggagcctcttggtgggctgcccacctgcattattgttaacacactcttggtgtctagctatgttcggtcccttcatgtattataaactgctcacgagcacagacagatgtagctctgagtcaaatgctcagggaagcagggcctcatgttcaacttgaagaggactacgatttggcctgtggtcctcacacatcctagagatgtttacccgcttaggagagctacatccagggagaagggttcgtgtaacagcacagccactgttcatcatagactaagcaggaggatgccgggggcctgttactctgcattctctccctcctatccaaggcagggggaaatgtggagccagggatattgatacagttttggttttagaggcttctcctgctagccagatgctgtaatcccagcacacgagagcctgaggccacaagactgaaagcattaggccagtgtgagctttatatcttcataagacctggtctcccccaccccttctccctaaaaatgtgcctgtggaaatggggaagcccagcccccaagtctccaggccctctgtgggggacgtgtaaaagtaagaacagtgttaggcttcctaccgtgtggacgccaaggattatttggcctggaggcaagtgcatctacccactgagccatcttgccagtcagtggcatgtatgagattgactcaggcctaagcattcactcatgtactgcagagagggaaggaggctgttatgggagtctggggcagtaacattaagatgagatttttttttttaaaggaatctgttttgctctaataggggcatggtagtgaatatttgtaattgcaagactctgtctcaaacaatccaccactatcacaaatcagaacttcaaaataatgaagccctggaagacatttaagaccaggaagtagctggcagcatggtggcctgcccactctcctgaccttgcacttctgggctgggttgggaatggcatcagtggatctagtaggtggtaggatcttcttgcttactgaacaagtacatatgcttgcaagatagagcgtagctgttgttcagagcctgtgcttgggggaccaggggtaacttttattgaattgactaaatggaaaaaggtctaaatggaaaagccttccaagaagctgtggatgtggggatacacacacacacacacacacacacacacatatatatatatatatcacacgcccttcctagcctgtgagtcttcatctgtagatttattatcattaaattggatgatattgggggagatatacacttattaagtagtaactgtaatcctttggcattaattttctcatatgtacaattgttatacacacacacacacacacacacacacacacacacacatataaccggcctcatgtgtcctggaagtgcttgctaccctatgaaacaactgagattatcagttgaggtttggtgtaaaacaatgggacattccttactggagggctttcttaattatgtaaaccttgtttcaagttttatcctgtgtttttagaaatatagaaattagaggctgatcggagccttcttttcagtcacgtcacatgcctacagttaattttgtctgattacatttttttaatttttattcaccacttagtggcagatccttaaattgcaggtatagtaccccacagggaatacttactaactttctgtaggaaattatataacaccacaactgctgttcctaaacacagtttcatatagattaaaaatgggggtaaaagtaacgctcagagtttaagagcactgactgctcttccagaggaccagggtccaattcccagcacccacagggcagctgaaagctctctgtaactgcagttccatgggatctgacacctttacacagatatccatgcaggaaaacaccaatgcacatgaaataaaaaaaccaaactatttaaaagaaaaagaaaccctttttacctttgtttttctgtcggatggtaaatccccaaatttccatttggggcaccaaatagaatcttgggaaatattcaattcttgtttttacttgttcattcctaaacctcgaaggggcctgtttttctgtgtctggtagcatatccgtcgacagggacatggcccctgtgcctcgtagattcccattcattaagccctcacatgaggatagtcccagcctgagaccccatgaccgtgaaatacaaggatcgacctgttagtatatgacttttttctaaaagccattaagaccaaaggactaagtgaccagtgatggaatattatgcaaaaggaaaaacatgtcagggagacaggggtcttctagccccgcctcaaatccaaccatactggcagtatgtggctgcctctgcataaggccagctttgtgcccctcttagccccctgtccccagtcactcccatttcctttgaaaggtgcagaaagcccccttgtctggagtgttttcctgcaaagagcccctactgaaagactccacacacagccaaggctctggccttcacctttgcccccaacttattctgacaaagagttcctctcttccctcctaagctttttgggagacgtggctaaggctagcaagaattgaatgaaaatataaatagaagtgtaacgcataaccaatggtgttccccaaatatctggagacatgattgtcggtcaagcagcaggcagccaccaaaccatgcaggcgtggtggctagtgtgggccattcagtcagttgagtgtctgcagggtgcttccagcatgtgaacggcacggcggcatctggtgaaaaccttgctctcggttacctagaacaccctccttgtctgctctcttggcacccatcagccacatgaccaggcgcagacagcaaagttaagccacaccacctgggcccagatcagccagtcatccgatcagccgtgtgactccgggacatctagaagctgcctctgaggttttagtctcttcagcgttggtcatgaaaactttagaagcttggtttgtagagagcaggagccaaaccttatctcatcttgtgaagtagctggggatctgggaccgatcgcctggggcggatttgttcttggctctccgaaacaatgtccttggttgtagttctcattgctgggtgaggattgagataggatttggacagagggaaaaaggccaagttggagaccctgggcaatgtaacctctaactgctccagcctgcctctcaccgactttgtgaggttggttaagtcatttctataaaccaagctttgacctaagaagtgaggctagcatgagatggcttttggaccctctcagtttttacagccaagatccatggggtcactgtggacaatgccgagacccaaactgagctctgtagtgtcagccggccccatcccaggcttcggatgcgacgtgggagaactcggaaggaactctctcctgttaggtgaaaagtgtgattctgcaggcatgatgctgcgtgcgtgtgtggaatcccagaactcaggagaccgaggcaggaagatggagagtctgaagccgtcttggagcaaaataataaaagttacaacaacaagaaagaaaggaaggaaggaaggaaggaaggaagaaagaaagaaagaaagaaagaaagaaagaaagaaagaaagaaagaaagaaagaaagaaagaaagaaagaaagaaaggtttttaatgtgttgagacaaccactcagtagtacgtgcctttttagcatgtgtgtgaggctctgaattcagtcagaggtataaaaacaaataactagtggtccttggtcttaaaggtccaggaattcaggtgttttcactctcggtggccacctgtgatcaagctgttacccatccagcttgttcttacacattcatgacccaccccaggatgttaccctagtcctccctttcctcaacgtaaatgtaccccactctgcagccaccttgagcttacttcagcttcttagatgagcctggtcactctcatcattggacttttttgatggggttcctgcctctccctggaactcgcttcctacttctcttcctagctccctctcatgtgaccccactaaagctaatctctctctctctctctctctctctctctctgtctctctctctctctctctctctctctctctctctctctctctctctcacacacacacacacacacacacacacacacacatgaacctgcagcaggtcactcagccttagaccgtcaatgtacccatctgtaaaatgggagtaactacagtatcttgtacctaactaaattataaggttatatgagctcaaataacaatcagtagaaaacatggcgtgcgcacatagcccagaccacgtctggcctgtcttcttcctatccatccttgtagaaggggtgtattatgtaggtttggaagttactgaacagaccgactgtctgggatctgtattgcagctgagccagaccccagagaagtaggccttggggtaatgctctgccccaacagagccaagcaaactcccttctggctggccgggtctagctgtggtcctgaggtttccttgcaagggaattcagaccaaacctcccaactgctcagaggctcagtagtgaacaaggccactgctgagcagggattgcggtcccctgctacagaaggcaggccattctcttgtggccctccaagcctgatgcctggccacacactgtaggccatgccacaaagagaggcagccaggaagctttggccaatatccctccacccgcttctggaggacagctccccacaggggtggagttgaggcagtagagctgaatggggccctttatcccctgctcccactgggaggccgagccactgccctccacacccaccacacccaggcccaggaggacactgtgacctcagcaccagcctctctattaagcaggctctctggccccactgtgtctgggtcctggaagatgagtcccgcccttgcgtccgagatggcagccccagtgtgaaaggaaagagtgccgtgtgtgtacatacatgagtgtgtacacgagagagaggctcatagcaggactgtgtggacacacactcattagtgtattggctgcacttcagtacaagtctgttgcctgctgctgcatgcaaggccttgtgctgagccctagagacacgtctgttagtgttgtgcttgtagtctgttctgcggcaatactacaaagagtggcccatctgagcatgaccagaagtggtgcactctgggagtgaattgactcccgcaaggtttagtctgacctacatgcatgcacacacagagacagacagatggacggacagacagaggcagagagaatatagtactagtattattctgaagctgggcatgatggtacagatttataatccaggctaattatgaggctaaggctggagaattaccaccaagttcaagctagcctaggctacataatgagtgctggcctgggctacaaagtgagaccttgtcacagcaacaacaaatcaccacagcaaaagattattctggccgctagaaagtggaaccagagacatgggctcagtgcagcatgcccagctgctggggaggctgagatggggagacattggagtccagaggtgtgaggaaagacagactggcttgaaaaataaagaagatgggaggagggatgaaggcaaggaaggaagatggacacaaaggttggctctgcaggattcacataggcactggatagcaagttagccctgcctagcatgacagcactatgtctatactctgtaatccattgtctagtggtcctactgggtggacgagaaggctgatatatagaaagcatcctgtgtccaagaacatagtggtgtgacagctgacacccagcttggtggtcctaagttgtaaagcctcttgtgcccttgagcccagttctgggagctagaaatcatcaccccacttcccaagatgccacagcccttctagccgtgcacgctgtgacaacagcaaagtgaagcagggcctcactctggagcccggcctggcctggaacccacggcagtcctcctgcctcaggggtccagtgctgtggtccagacttgtgctatcactcccagctaatgnnnnnnnnnnnnnnnnnnnntagggtttctttgtgtagccttggctgtcctggaactcactctgtaggccagggttatcctttcaatccatagtgaaacgtcaccatttcgcaagtctgtttccctgtgtgtaggaaccagggagttggacaaagggctcgcctcgcatgcataacgctctgggttgatccttgacaatacataactgggtgtagggacatgtacctgtaaccccaacatttgagaggttctcccctgtaattttctatagaggattcattgtaacctccaaagacacatgttcaagtcctaggccgtacaacctgtgaccattatgttcatttggaaaagggtctctgatgggtgattaagtgaaggacctcaagaagaaaccagggcaggctggagaaatgatggctcagtggttaagagcaccgactgctcttctgtaggtcctgagttcaaatcccagcaaccacatgttggctcacaaccacccataatgatatctgatgccctcttctggagtgtctgaagacagccacagtgtacttacatataataataaataaatctttaaaagaagaagaagaaaaggaggaagaggaggaggagaaggaagaaaccagggcaggcaagatggctcagtggttaaagacacttgcctctgagcctgatgacctgagcttgattcctggactccatgtggtccagcttctgagtatcccctgacctcccatgacctctgcaatgtgtgcatgtgcaatgtgtgtatgctcatgttcatgtgtatgtgtgt

SEQ ID NO: 1355 - DNA, 3728 bp, Mus musculus
cgggcgggcaggctagcggagccggcggcgcgcgagggaaggggcgccccccaggcccacgggagcagcctgggacgcacggagccctcgtgccctccgggacagtcgcctgccccggagcctcagctgtaggcgcccggagcctcggcggcgagtagcgcgtgggacaggggtggcgtgtaactgcaggaaccggggcaaccggagaaggagccggaacccggccgggatgagaaggtgacgccgccggggggcgccactcgctttgtggggacgatgctcgcctactgcgtgcaagatgccaccgtggtggacgtggagaagcggaggagcccctctaaacactatgtatacattatcaacgtgacctggtctgactccacctcccagactatctaccggaggtacagcaagttcttcgacctgcagatgcagcttctggataagtttcctattgaaggtggccagaaggatccgaagcaaaggattattccctttcttccaggcaagatcctcttccggagaagccacatccgcgacgtggctgtgaagagactaaagcccatcgatgaatactgcagggcgcttgtccggctgccgccccacatttcacagtgtgacgaagtcttccggttctttgaggcacggcctgaggatgtcaaccctccaaaagaagactatggcagttccaagaggaaatcagtgtggttgtccagctgggctgagtctcccaagaaggacgtgacaggtgccgacaccaacgccgagcccatgatcctggaacagtacgtggtggtgtccaactataagaaacaagagaactcggagctgagcctccaggccggggaggtggtagatgtcatcgagaagaacgaaagcggctggtggtttgtgagcacatctgaagagcaaggttgggtccccgccacctacttggaggcccagaatggcacacgagacgactcggacatcaacacctccaagactggggaagtgtccaagagacgcaaggcacacctgcggcgcctggatcgccggtggaccctgggcgggatggtcaacaggcagcacagccgagaagagaagtatgtcactgtgcagccctacaccagccagagcaaagacgagatcggcttcgagaagggtgtcaccgtggaggtgattcgaaagaacctggaaggctggtggtacatcaggtacctcggcaaagagggttgggcaccagcgtcctacctgaagaaggccaaggatgacctgccgacccggaagaagaacctggcgggtccggtggagatcatagggaacattatggagatcagcaaccttctcaacaagaaggcatctggggataaggaggctccggctgaaggcgagggatccgaggcccccatcaccaagaaagagatcagcttaccgatcctctgcaacgcctccaatggcagcgccttggccattcccgagaggaccacatccaagctagcccagggctccccagctgtggccaggatcgcccctcagagggcccagatcagctccccaaatctgaggacaagacctcccccgcgcagagaatccagcctggggttccagctgccaaagccgccagagcccccttctgttgaggtagaatactacaccattgctgaattccagtcctgcatttctgacgggatcagctttcgaggcggacagaaggcagaggtcatcgacaagaactcgggtggttggtggtacgtgcagatcggggagaaggagggctgggccccagcctcatacattgacaagcgcaagaaacccaacctcagccgccgaaccagcactctgacgcggcccaaggtgccgccgcctgcgccccccagcaagcctaaggaggctgaggagaatcctgtgggtgcctgtgagagccagggctccccactgaaggttaaatacgaggaacccgagtatgacgtccctgcctttggctttgactcagagcccgagatgaatgaagagccttcaggggacagaggttcaggtgacaagcatcccgcccagccccgaaggatctcgcctgcctcttccctgcaacgggcccatttcaaggtgggtgagtcttctgaggacgtggccctggaagaggagaccatctatgagaatgagggcttcaggccatacacagaagacaccctgtctgccagaggctcctctggggacagtgactcccctgggagctcctctttgtcccttgccgtgaaaaactcccctaaatcagattcccccaaatcctcatcactcctaaagctcaaagcagagaagaatgcccaggcagaactggggaaaaaccagtccaacatctccttctcctcctctgtcaccatcagcaccacctgttcttcctcctcctcgtcgtcctccttgtccaagaacaatggtgacctgaaaccacgttctgcctcagatgcaggtatccgtgacacccctaaggttgggaccaagaaagatcctgatgtgaaggccgggctggcctcctgcgcccgagccaagccatccgtgagaccaaagccagtcctgaaccgagcggagtctcaaagccaggagaagatggatattagttccttacggcgccagctgaggcccacaggccagctccgggggggcctcaagggctctaggagtgaggactcagagctgcctccacagatggcttctgagggatccaggcgaggttctgcggacatcatccctctcacggccaccactcccccgtgtgtccccaaaaaggaatgggaagggcaaggcgccacctacgtgacgtgcagcgcctatcagaaggtccaggactcggagatcagcttccccgaaggcgccgaggtgcacgtgctggagaaggcggtaagtgggtggtggtacgtgaggtttggggagctggagggctgggctccttcccactacttggtggccgaggagaaccagcaacctgacacagctagcaaagagggagacacaggaaagagctcgcagaacgagggcaagtcagacagcctggaaaagattgagaagcgtgtgcaggcgctcaacactgtgaaccagagcaagagggccaccccacccatcccctcgaagcctcccgggggcttcggcaagacctcgggcaccgtagcggtgaagatgaggaacggggtccggcaagtggccgtcaggccccaatctgtgtttgtgtctccgccacccaaggacaacaacctgtcctgtgcccttcggaggaacgagtcgctaacggccaccgacagcctcagaggtgtccgcaggaactcctcctttagcaccgcacggtcagcagccgctgaggccaagggccgcctggccgagcgggctgccagccagggctcagaatcgcccctgctgcctacccagcgcaaaggcatccctgtctcccccgtgcgtcccaagcccatagagaagtcccagtttatccacaacaacctcaaggatgtgtacatctcgattgcagactatgagggggacgaagagacggctggcttccaggagggggtgtccatggaggtgctggagaagaaccccaatggctggtggtactgccagatcctggatgaggtgaagcccttcaagggctgggtaccctccaactaccttgagaagaagaactaatagcacagggtccttccagactcaacgtgctgccttggctgccactggatgagctgcggcacgccagacacgggccg

SEQ ID NO: 1356 - DNA, 3375 bp, Mus musculus
atgctcgcctactgcgtgcaagatgccaccgtggtggacgtggagaagcggaggagcccctctaaacactatgtatacattatcaacgtgacctggtctgactccacctcccagactatctaccggaggtacagcaagttcttcgacctgcagatgcagcttctggataagtttcctattgaaggtggccagaaggatccgaagcaaaggattattccctttcttccaggcaagatcctcttccggagaagccacatccgcgacgtggctgtgaagagactaaagcccatcgatgaatactgcagggcgcttgtccggctgccgccccacatttcacagtgtgacgaagtcttccggttctttgaggcacggcctgaggatgtcaaccctccaaaagaagactatggcagttccaagaggaaatcagtgtggttgtccagctgggctgagtctcccaagaaggacgtgacaggtgccgacaccaacgccgagcccatgatcctggaacagtacgtggtggtgtccaactataagaaacaagagaactcggagctgagcctccaggccggggaggtggtagatgtcatcgagaagaacgaaagcggctggtggtttgtgagcacatctgaagagcaaggttgggtccccgccacctacttggaggcccagaatggcacacgagacgactcggacatcaacacctccaagactggggaagtgtccaagagacgcaaggcacacctgcggcgcctggatcgccggtggaccctgggcgggatggtcaacaggcagcacagccgagaagagaagtatgtcactgtgcagccctacaccagccagagcaaagacgagatcggcttcgagaagggtgtcaccgtggaggtgattcgaaagaacctggaaggctggtggtacatcaggtacctcggcaaagagggttgggcaccagcgtcctacctgaagaaggccaaggatgacctgccgacccggaagaagaacctggcgggtccggtggagatcatagggaacattatggagatcagcaaccttctcaacaagaaggcatctggggataaggaggctccggctgaaggcgagggatccgaggcccccatcaccaagaaagagatcagcttaccgatcctctgcaacgcctccaatggcagcgccttggccattcccgagaggaccacatccaagctagcccagggctccccagctgtggccaggatcgcccctcagagggcccagatcagctccccaaatctgaggacaagacctcccccgcgcagagaatccagcctggggttccagctgccaaagccgccagagcccccttctgttgaggtagaatactacaccattgctgaattccagtcctgcatttctgacgggatcagctttcgaggcggacagaaggcagaggtcatcgacaagaactcgggtggttggtggtacgtgcagatcggggagaaggagggctgggccccagcctcatacattgacaagcgcaagaaacccaacctcagccgccgaaccagcactctgacgcggcccaaggtgccgccgcctgcgccccccagcaagcctaaggaggctgaggagaatcctgtgggtgcctgtgagagccagggctccccactgaaggttaaatacgaggaacccgagtatgacgtccctgcctttggctttgactcagagcccgagatgaatgaagagccttcaggggacagaggttcaggtgacaagcatcccgcccagccccgaaggatctcgcctgcctcttccctgcaacgggcccatttcaaggtgggtgagtcttctgaggacgtggccctggaagaggagaccatctatgagaatgagggcttcaggccatacacagaagacaccctgtctgccagaggctcctctggggacagtgactcccctgggagctcctctttgtcccttgccgtgaaaaactcccctaaatcagattcccccaaatcctcatcactcctaaagctcaaagcagagaagaatgcccaggcagaactggggaaaaaccagtccaacatctccttctcctcctctgtcaccatcagcaccacctgttcttcctcctcctcgtcgtcctccttgtccaagaacaatggtgacctgaaaccacgttctgcctcagatgcaggtatccgtgacacccctaaggttgggaccaagaaagatcctgatgtgaaggccgggctggcctcctgcgcccgagccaagccatccgtgagaccaaagccagtcctgaaccgagcggagtctcaaagccaggagaagatggatattagttccttacggcgccagctgaggcccacaggccagctccgggggggcctcaagggctctaggagtgaggactcagagctgcctccacagatggcttctgagggatccaggcgaggttctgcggacatcatccctctcacggccaccactcccccgtgtgtccccaaaaaggaatgggaagggcaaggcgccacctacgtgacgtgcagcgcctatcagaaggtccaggactcggagatcagcttccccgaaggcgccgaggtgcacgtgctggagaaggcggtaagtgggtggtggtacgtgaggtttggggagctggagggctgggctccttcccactacttggtggccgaggagaaccagcaacctgacacagctagcaaagagggagacacaggaaagagctcgcagaacgagggcaagtcagacagcctggaaaagattgagaagcgtgtgcaggcgctcaacactgtgaaccagagcaagagggccaccccacccatcccctcgaagcctcccgggggcttcggcaagacctcgggcaccgtagcggtgaagatgaggaacggggtccggcaagtggccgtcaggccccaatctgtgtttgtgtctccgccacccaaggacaacaacctgtcctgtgcccttcggaggaacgagtcgctaacggccaccgacagcctcagaggtgtccgcaggaactcctcctttagcaccgcacggtcagcagccgctgaggccaagggccgcctggccgagcgggctgccagccagggctcagaatcgcccctgctgcctacccagcgcaaaggcatccctgtctcccccgtgcgtcccaagcccatagagaagtcccagtttatccacaacaacctcaaggatgtgtacatctcgattgcagactatgagggggacgaagagacggctggcttccaggagggggtgtccatggaggtgctggagaagaaccccaatggctggtggtactgccagatcctggatgaggtgaagcccttcaagggctgggtaccctccaactaccttgagaagaagaactaa

SEQ ID NO: 1357 - DNA, 27827 bp, Homo sapiens
  misc_feature (17205)..(17256): n = a, g, c, or t.
tctgggggtttgaaactgtcatcaggatctgggactctctcaccacctctctgcttgttggcaccattctctcatgatgacagcagtttcaagtacctttaagggacatcaccaaagaaagagcttctcctttaacacaagtcctaggattgtttccagctgacccagtagggtcacttgccatccataaaaccagtcacggtgggcgggagttgcaacactttggccaggccagggtccgacacctactccttccctccaggaggtggtgagcttggcctcacctaagccatggggacaaaggctggtagcaccaccagaggaagggcaaatgcacgctcgggaggaagcccccgcaggcctgcagtctacagggtcttccaccctctgctgtgtgtgcaatcactgagcaatccatggatgccagagagggactcgggtgatagaaaatccatccatggctgggcgcgctggctcacacctatagtcccagcacgttgggaggccgaggcgggcggatcacgaggtcaggagatcgagaccatcccggctaacacggtgaaaccccgtctctactaaaaatacaaaaaattagccgggcgtggtggcgggcacctgtagtcccagctactcgggaggctgaggcaggagaatggcgtgaacccgggaggcggagtttgcagtgagtggagatcgcgccactgcactccagcctgggcgacagagcgagactccgtctaaaaaaaaaaaaaaagaaaaaatccatccatgcaactcagctgaaggatgcaggaccccaggagtccaggctcagagaactgactgcactctttctgggacccgggtggcaccctttcccacctggaccaaacagaacttctgtgcatctggggttggattcttccctccacccctcccagcccagcagcctagcctgcagcttccgtgaaggaggggaacggcggactgtgctgagcacaggatatgtgcagcttgagtcagctcggcccccgccgagcaggtcagcaggctagatcaataaataaataaacgccctgtgtgttttccgcctccctctgcaccagctgggcaggccgcggacggcatgtggtattttcccaaagagatagcgactgcagcagcatattaaccatgacacgaggccacagctggctcaggcactcaaccaggggcggaaatgtaaccaaaacaggagagccctctcctctccttgctgggctcccttgagacacacatccatttttctccatttcagctgccagagcagataacactgggggtgggagctgttctagctctgtgggacaccctgccagagtgcagcgatgagcaacccgccctgccgagcccaggccctccagggctactgtgggagggacgcagctgggggcagctctcagggaggagggtgaggccataaggatggtcccacagtttcaggggtcgggggaccgcagagagtgtggtagaagacatcccagtcacacgaatgaaagttgaagcttcgagcatggttggattcaaagacttgaacatgattaataaaaagtgaagatcagctgccggcaaggtaatgaaaattgtgcaccgtgtccgcagtagtgatttcagcctgaaaccctccactgccaaagttcagcttctccctgaactctccacctgcaagagctagtaaggagccacagacagcttaacctcctctgtgtgagcaaggtggctcccacccagccttcaggtcttgctcatttactgcatattgactgatttgctaaacattccaagcaccatgcccagtgctgaagacacaggaatgaacaagacagacaaagccctgccttcctggagctcatattccagcagaggaaacagacacacactgaacgaaacacaataaataagccaaatacatgtcgtgttacaaggtaattcctagtatgggtggggggcaataaaccgggataaggggcatgagaatgccatgcatggaagtactgtataaggtggtcaaggaaggtgaactcgaagcacagattgaagcaggtgaggctgagtgtgtggcgctgaggagtttcagagggatcgagatctaccctttgtcctgtgttctgttgctgcttgcacagggctgtccagggctaggtcagggccagggggggtgcccagaaatctctgaaggaaatcctccctccgacgggcaagggcatcacggggattacggcatcccaagcctcttggtgtcctcttctgaccccagcttccttttgtccccacagaggagaagtacacagtcatctacccgtacacagctcgggaccaggatgaaatgaacctggagagaggggctgtggtggaggtcatccagaaaaacctggaaggctggtggaagatcaggtaccagccgctgccccccacggttgctgggtgggtttggggtcacgctgggtgggtttggggtcacagggactctggcctcacagaggtcggtaagtgattgcatctgggcgaagtttccgcctgaaccataaaaggatacttctcctctgtgttgtgtggcctccctccctacccatatccttccctaaaagtccatgataagcaaaactttctccaaacacactgaaccacagatagcagcaaccccattaagcaaggctagtttccacctccagatgtttctcataatgaggagttggaggccaaagctgccccatgtgagtgacagccccctcccgccccattctgagaacaagatggtgcataaacactcatggactgtaattcatcctaggctgataatctgccctcgtctctcaaagtccaatggtaaaagcagggcgtctgcattccaaacacctttcacagccctttcacctatgtgatgatatcagagcctcccaggcaggcagggtggccagctcgtcctgccttgcctggttttagtaatgaaagtcctgggaacccctccttgatcacccccaataggcaggatgtgaccatgggaaattagggcaagagaggaagccgaggtccctgcaatctagtgtctgcgctgtgatgtgtggcgggacattcgggccatttccaggaggctgagcatgtagcactgcattcattcattcattcaacaaacgcacaccaagaatctctgttgggcccagccctgttctgggagctgaggagtcaacagtgagcaagatacaatagctcacaccacctggtacagaagacaaactcataaacggtgatagagcagagggttggccatgttggagggatgcatggggactttggtacacagaagaggggctcctcagcctgggggtcaggaaggcttcctgagggagatctcagaacctaaatttgaagacggataatgatagtaatagtgtattagtctattttcatgctgccgataaagatataccccagactgggaagaaaaagaggtttaactggatttacagttccacatggctggggaggcctcagaatcatggcgggaggtgaaaagcatttcttacatagcatcggcaagagaaaatgaggaagaagcaaaagtggaaacccctgataaatccatcagatcttgtgagacttattcactatcacgagaatagcatgggaaagactggcccccatgattcagttacctccgcctgagtccctcccacaacatgtgggaattctgggagatacaattcaagtcaagatgtcgatggggacacagccaaaccatatcaaatagcaggcatgggcctggcacggtggctcatgcctgtaatcccagtacttgaggaggtaaggcaggaggatcacttgaggccaggaattcaagaccagcccgggcaacatagcatgatcccatctctacataaaaatcttttaaattagccaggcatggtgatgcacgcctgtagtcccagctacccaggaggctgaggcaggaggatcactcgagcccaagagtttgaggctgcgatgagctatgatggtgccactccagcctaggcagcacaacaagaccctgtctctaaaatttaaagacattagtttttttaaactttttaaaaaaggataacaaacatatattgaatagtatgttatcttgctgcataataaattgtcccaaaagttagtggctctggaattcagcagtggcttaattagactcaaggtctctcccgaggttatagttaggatgtcagtaagggctgcagtcatctcaagatctgactgatgctagaaagtgacagtcaggatttcagcccattcccttctcaccccagagcccagtcagcactgcacatcgcctcccatcttatggctctgtgtccccaaacaatgaactatgtcaaactgagcgtgtgggttatatacagcctggcactttctaattaggatattccctctcagagcatattttaagattgatagacactaaactgcagatttctacctccttttaaatttgcttccagtcaagagagaccttttttttttgcattaaaacccaatgctatttagttcttaaattaattcttgacaagagattcagccctgccattgggtctgttcaactttccccaaaggtctggccacctgtttttttgggttctggtaaatgtttaacaaccagctctccaaggaaaaatactctgagttacagtgtttgccagttgccatggtgcaaatactgccaccatggtcaatttcaagctatcagtgtgatgtcactaaatgtagagattgggagagatgtgcccaactggctgtcacagctggtgtgactgactgcagcacacccctggtctagattggcccctctggtcattgctgttaaactgaattctggccaagcgtggtggctcacacctgtaatcccaacactttgggaggccgagacaggaagatcacttgagtctaggagctcaagaccagcctgagcaacatagcaacaccccatctctacaagaaataataaatagctgggcatggtggtgtgtacctgtaattccagctacgtaggagactgagttgggagaatcgcttgagcccaggagttcaaggctgcagtgagctatgatcgaaccactgcactctggcctgggtgacagggagaccctatctcaaaaactgaatgtctcctgcagaggattaagagatgatgacactcattgaagtcccttttgggaggacactgagctgctctgtcagggtctcgatcactctgcggtttagtgatggccagctgccacttggcgagccctggacccagccctcaacctgctaatcccatatgaaagcatgtttaatctccacgttcatcagcgtgaacagatctccatctgtctatgccaggctttggccccagagctggggctgctgggaagaggcagcaaagcacagagattcagagcccaggctggtgccctgctggctgggtgggacatggtgggtgctgtaagaggggcaagtagaggccgggttggaaaggccttgaaaataccaagctcagggcttaggcatcatcaagaggaaatgcacagtgtgtgccaacctcttgccctgggcagtcacaacccgtcgttcctgctccctgggacctgtcatgtgattcccagtaggagcaaggcttcttcccttgggcctggcggagcagtttgacagcatccttcctcctcttcacaggtaccagggcaaagaaggctgggcccccgcctcctacctaaagaagaacagtggggagcccttgcccccgaagccaggccctggctcaccctcccacccgggtgcccttgacttggatggtgtttcccggcagcagaacgcggtgggcagggagaaggagctgctcagcagccagagggacgggcggtttgaaggccgcccggtgcccgacggtgacgccaagcagagtgagtgacacccgcccaagctcctgataatcagggcccctgtgtgccagctctgtgctcaaggcgtctcacatcgtccctcatcctcacagcagcccagctgctcccccatcctccagataagaaaacagaggcccagaaaccccgggtaacttattccagatcattcagcccgtgaattgcagaatctgagtcaagaggcattgctggccgggcacagtggctcacacctgtaatcccagcactttgggaggccgaggcgggccgatcacctgaggtcaggagttcaagaccagcctggccaacatggtgaaaccccgtctctactaaaaatacaaaaattagccaggcgtggtggcagctgcctgaaatcccagctacttgggaggctgagataggagaatcgcttgaacccgggaggcagaggttgcagtgagccaagatgcaccattgcactcgcgctccagcctgggcgacaagagtgaaactccatttaaaaaaagaaaaaaaaaggggaggcgttgctttcccatcccaggttgcattctttctgctatctcacagtggtcacactggctactctttttcaagcacctgctacatgccagaaaccttctaattagtctaatcgactcctcataactacctttgagggaattactactttttctgttttacagattgggagtctgaagggtgagagggtgtgcccaaggcccccagctagtagacggcaggggcggggacttgaacctggggagtgctgtgctctctattgctccatgtggcctcgtttctaagccagaggaagaagatggccttgtgggctctactccaacacagtgcctctcccatcttgcttttcaaagcctcctcgtgtatattttaccatttaatgttcccaacacacctgagagtagagttcattactgttgtcggcctggtcacactggctaccataccatgtctgcatgggcacgctggtgcccaggacttacgcacagtgcccatgatcctgtcttggccgtgcagggcaggtgaactctgttgagaaaggacttccagctacccacagagatgaggccactgcccctggcggggcttctccagctgtttttaagtggcagtgaacttcttgagtccgtcaaccaagtttcgtactttgctcagctgccctgagaagtcactgatcatgttttctcacatgctgtggcaggggttctggccatccccgagtttgtgtgattctaatctgtcaatcatggccaagaggttagatgtattcccattaactctagaggagcaaatgaaaatctgcagcctcaatgtctttgttagtatataggttcaggctgggcacagtggctcacgactgtaatcccagtgctttgggaggctgaggctggaggatcacttgaggccaggagtttgagaccagcctgggcaacatagtgagacccccctatctacaaaaaaaaattttttttaattagctgggcgtggtggcacacacctgtagtcccagctactagggtggctgaggcgggaggatcacttgaacccaggagattgaggctacagtgagctgtgattgctccactgcattccagcctgggcaatagagcgagaccctgtccctcaaaaataaatagatagatagatagatagatagatagatagatagatacatagatagatacatagatagattcagatgctaaaacaaagacacccccctaccaccactgaatatacacatatacacacatccaataaacgatctagatatgtatttctttctcacaaaacagtctgtgtatatgttcagggttaatatggcagctccaggcaatcaagagtcttattactccacatctatcttgttgccctcatccctcggtccagaacggctcactactagtccagccaatgaaaagcagtgcattgcactccagcctgggtgacaagagcgaaactccatttaaaaaaaaaaaggcgttgctttcccatcccaggttgcattccttctgctatctcacagtggtcacactggctactgtgtacacagctcagaagccacacactttctactttgtcttacatcccactgccagaactgagtcacgtggcaatacctggctgcaagggtgactggaaaatgaagtctatatagacagctaagtgtcttggccaatactctgttgctatttattctaacagaagacaggtaaatgggaatttaagggattagcagtctcctccgcaccccaacgccaaactacccttctgtatggacccgtgctgaacctggccaacattctgcctttagccaggagccttggaccactgcaaagtcctcatcctcctggccctgagacccagagccagggcagctgcctcgagagtataaacccctgagtcatcggcccaagtgtgtttggttcagtgtgtttgtgtattgttgcgtttgggttgttctagagcacaaaaccaggtgcagataacattcactgcatgcctgccacatgccaagagcttcacagatgtttcctttcatcctcaccgctgccctgggtgacacacattatgccagttctacagatgagggccttgtggctcagagaatccaatcatctgtccaatgccagcagctgtgagcctcagagctggattgggacccatctctgtgttattctgaagactttgctttttgccctttctggagaatttccatgacttgaggatccagcaccatcccctttcattcctgtgtagaaaagatgcaagaaaagctacgtcgagagagtcctgagccaactatgagccacgcgtgagcagctccttcctgcccaggctgttctcacagggagggttgcagcagcatgcagacgcctgtgttcaatcttctgcaggagaaaatagacccgacctggcacccagctcaggaatctcatctgtagcacaagatgtaataagctctcatttctccataggatcaccaaagatgaggcagagaccccctcctcgccgggacatgaccattgtaagtggatcctcgctactggggagtggccactgacttgagggctgtgaggggtgtccactagcccctcacacacccctcgcccttccagaaatgctctctttcctgtccacacaacagccttgtgaagcaggctgtagaaatgctagtcccactcgcaggtggaaagacggaggtgcaggcaggtgaaacagtttgcccgcggggccagagtgctcctgtgacagttgggcctcaggacctgccttctgctccctgggcccttctcttggtcttagatcagtcttctcaggcgacttgaggcccaagctgagatgagacacaaatatcatctgtggtcccattctgatattctgcgctcataatccattatgtaaaattctctaggtacctttttagccaatactttgaacccaatgggttgttgttgggttttggggttttttttatttgtttgcattggtttttgagacggggtcttgctcttttggggttgtatttttttaatgtctgctatttatcaagcacctgttgcgtgccatgcagcgtgccgattgcctcacaacattaactaatttaatacttgaagcaaccccaccaggtagacactgttatgcccactctgcaggagagaaaactgaggctccagaagggggtgatttgcccaaggacactcccaccatcagtgtttccaacccagatagatctactaataaacttaagctccctccacaaccctcactgcctcttatttcagagaatattgtcttgctccaaattctcatgattgtacccaaatgtcccgtgtttcttcccatcaccctaaagctgatgggccagtgaggtctcaccgaggagtgacaaactgcgtggtcctatttgtgttgtcccttagaatccaactaggtccccagcacccccttaagggtgattgcatgccccaggcccttagactccccctgacacagggtcgcaggagtgcacttagccttggagataaccctgtgtgtgatcgtaccagcctcgaggcctcaacctgccgaagccgcccatcccgccccaagtggaggaagagtattacaccatcgccgaattccagacaaccatcccagacggcatcagcttccaggcaggcctgaaggtcgaggtgagtggccctggtgttcctttgcctacttgtgattcctgattccaggcatcacctcctacttctcccctgtcacctcctacttcactgggtgggtggaggtggggcggagattaacagctttatggttcacataccatacagtttacaattttaagtgtaaaattcagcggcttatgatattcacagggttgcacaaccctcaccactgtctaattccagaacaaaaagaaactccttacccatcaacagccaccctccatttcccctcaacttgccagcccctaggcagccaccaatccactttctgtccccatagatgtgcctgttttagacatttcatatagatgaaatcccacagtatgtggtcttgtgtgactggctgtatgcctttctttaccacctcccacctccgttcttgcttctcctctctccttttcttcccactctctctgtttgtctactttgttccccagattctcttcctgcatttctctttcctttcctcatggggttagagcttcaagatatttctttctcatatttgcaagaaaacctgtaagtaaggggatggcagctagggccagggtttggaaacctttggcaaagatggttcttgagacactttcaaaagcaggtgagccaatcacaggtatcaccaaattcactctgtcatgtgtaagagttggtcagaccctccccacctcaccttgggaggccaaggttcaatttattcatctctgcaacaaataaaatgctcctggatctcctactatggttgtgtgtggcggctgcttttctaggccctgaagagttgtcgtcaccatcctctttcctttaaagaacacagctctggtccctggcacagagcactgtctgatggcacagggcagtagacaccattgatcagttcactccagcatacctctttagggcccctcccttccttcctggctatattccaggaaggactatagcctgcctgcctgcacgccttcattccttccttccctccttccttcccttcttccttccctccttctttccttccctccctccttccttcctccttcctccttcctttgttttccttcccttcttcctttcctccctcctttccctccttctctctttcctccctccttcctccttctttctttctctccctccttccttcctttcctccatcctccttcctgcctttcttccatcctcctccttccttttcccttactccagcttgccagcagctccaccaggcacaacatctggcccaggccttgctgtgtactacagtcgagaggctagttctgcatcctctggcccctgcttccagaggcattgaagtatcttcatgtttcactagaaggaaatccttttgtgttttcactttgctattatctgagtgaagggctaaagggatgagatttgggaaaattctgaattgtgttttaatccattatagaaaaatctgccccttcatactctttcattgtatacacatgtattgagtgcctccttttttttttttttttttttttttttttgacagagcctcgctcctctgttgcccaggctggagtgcaatggctcaatctcagctcactgcaacctccgcctcccaggttcaagtgattctcctgcctcagcctctctagtaactgggattacaggcgcccaacatgacgcccggctgatttttgtatttttagtagaaacagggttttgccatgttggccaggctggtctcgaactcctgacctcaggtgatctgcccacctcggcctcccaaagttctggcattacaggcgtgagccactgcacctggctagatgttgttttcttatgatagatccatatgctctgtttttctcttctccagttttgcttcctggctcattgcaacattatcttagccttcaaaattcattaatggaaccacagcattctagcagtagggctaccagtaacaccttagttacttgtctaggctgtttatcttcaggatgtgttatgataatgatgatgatgatgatgatgatgatataggcacctcttctgtgtcaggtaccttacctccttgataactgatcttcacagaagtcccaagaggtcaaaataccagcatcatagggttggttggttagtttgtttttcttttttttttttctatcagcatgttttatagatgagactcaggggggttaggtaaattatttgcctctagtaacacagctagtaagcaatggagttgtgaaaccaggtctttctggttttaaagcccacactcttttctttcccctcattcttgtgatctttttttttttctttgagacggaatcttgctctgtcacccaggctagagtgtaatggcatgatcttggctcgctgcaacctccacgtcctaggttcagacaattctcttgcctcagcctcccaagtagctgggattacaggcgcctgccatcacacctggctaatttttttttgtatttttagtagagacggggtttcaccgtgttggccaggctagtctcgaactcctgacctcaggtgatccgcccgcctaagcctcccaaagcggtggaattgcaggcgtgagccaccgcacccggcttctgatcttgcatttgcttttattcctagtagttcttggcttccctctagtaaatgaaaacgcccattcctcatggttcagaacacacatgttcagagcttctaccacaatactttgcaaagagtgtaagcttgacaaatcttactgatacatctaatattgattaccctattttcagttcctcacatacagacttaagtattagtgttgttgaattcatggatgtgctgacgatgactcgtatgcccagtgtggcctgtaatttttaccagagctatcaagcgttgataagatgccagtcatcctcacataaacagcttacatttatcagtggcctttcctggagattccagtgggactcattaagtgctgcctgtcaagtgcatcccgctggctcagtgacctccactctaatttaatcgcagcagcattatttaccaagtgctgttgtatgcattagctcttgcggctgcaaaaattctacaagtgggtgttaaattgttcttaccattttccttctgtgatgtggaatctgaggcacgtggcttgccccaggccactcaggcagtaagtggcagagccaagactagaacccaggactgcaggcccaggagcccagcatttgcgtcctggcgctgagtctgtggctgccatccctctcccagaagggccacaaagtgcccgcagccatctttgctccttctgcaatttcttaccccggacacagcccttctccaagcagggtctttttttttttcgagacagagtcttgctctgtcgcccaggctggagtgcaatggcacgatctcggctcactgcaacctctgcctcccaggttcaagcgtttctcctgcctcagcctcccgcgtagctgggattacaggcgcatgccaccacacccagctaattttttgtatttttcgtagacgcagggtttcaccatgttggccaggctggtctcaaactcctgacccaggtgatccgcccgccttggcctcccaaagtgctgggattacaggtgtgagccaccgcgcccggccaggggtttcttttctgagaggcaagattaggtgactctgaagcccaccccgctgcctttgactctcctccgatcgacggcccttctacaggacccgctgtgtgttcctcagctctcctgaggctccgttctgcatgcgtaaaatgaggtgacagttccccactcacagggtgtcatgagcgttcatcagatcttccgagtccagagagagcctaccagggaattgcagtgtacatctgtgatggctgccataacaaaataccagactgggtggcttaaacaactgcagtttattgtctcacagtttgggaagccagaagttcaagatcaaggtgtcagcaggtttggtttctcctgtgtcctctctccctggcttccatatggacaccttcttgctgtttctcacgtggtcatccctcagtccctgtgtgttttctaatctcctcttcttatttggacatcagtcatattgaactagggcccatgtattaggccattcctgcattgctataaagaaatacctggctgggcacggtgactcatgcctataatcccagcactttgggaggccgagatgggcagatcacgaggtcaggagatcaagcccatcctggctaacacggtgaaaccccatctctactaaaaatacaaaaaaaaaaaaattagccgggcacggtggcaggcgcctgtagtcccagctacttgggaggctgaggcaggagaatggcgtgaacccaggcggcggagcctgcagtgagccgagatagtgccactgcactccagcctgggcaacagagcgagactctgtctcaaaaaaataaataaataaatacctgagactgggtaatttataaagaaaagaggtttacttgactcatagttgggcatgctgtacagaaagcatggtgccagcatctgcttgccttctggggaggctcagggagcttttactcagggcggaaggcaaagcaggagtaggcacatcacatagcaagagcaggagcaagagagagtggcaaggagacaccacacacttttaaacaaccagatcccatgggaactcattaccaagggaaggacaccaagccattcatgagggatctgcccccgtgacccaaacacctcccaccaggccccacctccatcattggggatcacatttcaacatgagacttgggtggggacatacatccaaactcagcccaccttaatgatccattttaaccttaaccacctctttaaaggccccatttccaagtacagtcacagttggaggtattgggggttagggcttcaacatacgaatttgggtagggggacacaattcagcccataatagcgagcacacctttcacctgtgtgaattcagccacgcagtgctggacaaaaaagagacagagaacaagatcttagacaacatgagtgattccacccaccattccagccaacaggcgtgtatcccacagggaagtagggacacgatgaaaatctactctactccaccagctccaggtcccctgtatataaacacgagcatctctttgagctgactgtgattcctgtgttcaaagatagatatttttcaggccaggcacagtggctcacacctgtaatcccagaactttgggaggccgaggcaggcagatcgctagagaccaggagttcgagatcagcctggccaacatggtaaaaccccatctctactaaaaatacaaaaattagccaggtgtggtggtacatgcctgtaatcccagctacttgggagactaaggcatgagaatcgcttgaacctgggaggcggaggttgcagtgagctgagatcatgccactgcacttcagcctgggtgacagagcaagactctgtctcaaaaaaaaggtaggtctctttcatgtgttgtggactctataaatgccagctaacttcttcatccgatgctcagccaaagaagccaggatcaagggtagctctgacttctgccttgtctttagaattgtagcagacgctgccggtgcctctgatccacctgaattcacctgcgcctacacacaggtccctgcaagccgacagcttcccagaaggggagaggagttaataccctgggtagggaggagctgagagtcaatagataaatgcacgcatccccagagggacccgttctgaggcactgtctttgtggtctctcagagggtccctggcagatcaagccccatggccccgagcaataacttgctcataattggcctctccctttcccttctttctctgtctacttccttacttgtatttcctaggaccaactctcaaattaagtacctatacccaaggccacatctcatggactgctttagggggagtcccatacgacaagactctccccccatgtaagatattcccggaacatggtaacatctccattggtggtccctgtagaccttgtcagaggagctgctgagtacacagtgacagcttctagagctccagttgcacatgggttctgccaaaccattccatctgctggccctggcatcgtagccaagtgcctttctctatcctcccttgcaggtgatcgagaaaaacttgagtggctggtggtacattcagattgaagataaggaagggtgggccccggccaccttcattgacaagtacaagaagacgagcaacgcgtcgagacccaactttctggctcccctgccccacgaggtgacccagctccggctgggggaagcagcagcgctggagaacaacacgggcagcgaagccacgggcccctcccggcccctgcctgacgcaccgcatggtgtcatggactcggggttgccatggtctaaagactggaagggcagtaaggatgtcctgaggaaggcatcttcagacatgtctgcgtcagcaggctacgaggagatctcagaccccgacatggaggagaagcccagcctccctccgcggaaagaatccatcatcaagtcggagggggagctgctggagcgggagcgggagcggcagaggacggagcagctccggggccccactcccaagcctccgggcgtgattttgccgatgatgccagccaaacacatccctccagcccgggacagcaggaggccagagcccaaacctgacaaaagcagactgttccagctgaaaaatgacatggggctggagtgtggccacaaggtcttggccaaggaagtgaagaagcccaacctccggcccatctccaaatccaaaactgacctgccagaggagaagccagatgccactccccagaatcccttcttgaagtccagacctcaggttaggccaaaaccagctccttcccccaaaacggagccacctcagggcgaagaccaagtcgacatctgcaacctcaggagtaagctcaggcctgccaagtgcccaagacaagtaccttgttggannnnnnnnnnnnnnnnnnnnnnnnnnnnnnnnnnnnnnnnnnnnnnnnnnnncctcccaggagaggggcctggccgcgcccaggacaggacgggcaaacaggatggtctcagcccaaaagagatttcctgcagagcccctccgaggccagccaagaccacagatcctgtgtctaagagcgtgcctgttcctctccaagaggctccccagcagagacctgtggtcccaccccgcagaccacctcccccaaagaaaacctcttcgtcatccaggccgctcccagaggtcagaggtccacagtgtgaaggccacgaaagcagggcagctcccaccccaggccgtgctctcctcgtccctccaaaagccaaaccttttctctccaactctttggggggccaggatgacacgcgaggcaaaggcagcctggggccatgggggaccggcaagattggagaaaacagggagaaagcagctgcagcctctgtccccaatgccgacggcctgaaggactctttgtatgtggccgtggccgactttgaaggagacaaagacaccagcagcttccaggaagggacagtgtttgaagtccgggagaagaacagcagtggctggtggttctgccaggtcctgagcggagccccttcctgggaagggtggattccttccaactatctcagaaagaagccgtagccgactccctttctgcctagagggcccgctggtccttgctggctttacccacgtatttaatacgcctcttaatttatcattctccacgcagcttccaaggcagacagactctggggtactgtgacttcttgcctcccatgggtggagagtgagtttcggacacctcgggcgcccctgggcctgatccctcctatcacagcatcactggaggctcagaacccacagcctttgctttctgtccatgtcagcatccctgccttaagagaactcctcctggccaatggcattgccacccagcagtgggaccaagactctccaagacctccaggactggatcccattgcctggagaaactccagcaagggtctctcatggcttggacatggcacagtaaggggcagccaacccagtccatgatgacttttgctccaacttcttcatgtttctaaaagcccagtggctttattcactcctcctaaattgcctgctaccagaaggaacttcatcctgaagaaatgcattccattaccagttccagggaaagtgtccccttccccaaagcctcaggcccgtgggcctctgaggttccactggatgcggctcccccaggagtgggcctggagatccgctcagccgccctgcctcccaccttctatcttgggaccgtggtcagccctgaagggtggttccagccccgcgtatgctgcactttgctgctgcaggctccggtccctccagggcttttcaatgagagttcccaccccaacttggagcatttcatttttgcctacctaaagcaagaatctcaaagtttgtttgaataagaggcccattcacaagtcgtgcccttgtgagcacccctttgctgagtgcctcgtgggtgccaaacactgtacttggcgctttgcattcatgctttgaccctcacaacctccctttatagatgaggaaattcacgctccatgtgcccaaggacacaccagccaggaggaagagggaagaggatttgagtccaggcctgcctgacttcagtgcctgtgccctcccctctgtaaaagacaaaccaggcagggaagagatagaagctggctaagtggtggccaagtggcttcattgtgaggggggtgagggggcattcgtggctgctcccacacccaccatccctccagcccacagcagcctataccaaaggctgccccggactcaacagctgcgtctccatgacaggagaatgccagggtcctggtggttggcacagagccctgttccctgcttctaagctgttgccccctggggaatagagcttatggagcaacgggagctgaggtggcctcgagggccagcctggagggctctgagcatagcatgcagcggtcccatagggaggcaggtaaccaagggccaggcagagctgcttcctgtgcctctccggcatttgtaatgtttttttcttttttcacgcactgccaaatctgttttctcccttgaagaaacccagggcagatgtggtcgtctgtcaaactgaggtctggagaggcatgactaaatcactgcagaagcaaaatcaggacccagcatttctagctcccagcccagagtaagagagcagagcagaaccccttcccattctacccgaccgaggcagccctgccctgccctgccccgcccctccccaccctgccctgccccagagatctccagttcacagtgttcatcaggcgagatacttttggacccacaaagccagttttttggggggatgctcagtgtctacctgcagtgccaaagttttgcttgaacagccctcttctgccgcgcctcccagctccaccccctatcaacgtgggtgctggctgcttctgcgtgaggagcttcctctgatcacctgtagcatctttagtgccttcgtccagtcggcctgcaaatcccatttcccagagaggcttgggcagggcccacttgccacttggccctgtgcccagagcgttgggggcagatggcagccaggggaagaagggaggtggggaagggccgccaccgcttgagggtcccctcccttgagaggaggccccatggcagttttcctgagttcttgatccactttggtttaaacaacttttgtgaagctatgtgagatttgactgcatttcaaaagacaaaacacatgtttttttctgatttgctctttgcctttcagcgacgctttcagatactttgtgagtgtctactctgtgctaggtgctgagtagactgggatgtgtgtggctccatccctggctggaagagctttgagtcctgtctgctgacttcactgaaggagtttctctcttgcttcattccttcctcccgggggtcagctgggtaggagcagacttgccctgccttcctctaggcagaaagttttcctgcaaatgaaagaatctgccattctcttttgctatgatgatgatgattattctgacatgacccgcgggtactgaagccacagtcctctctgttcactgttctctccttgagtcatatctatggcctgaggacgtctgtatccagctccttttcctacaatggtagacacttccccaggcagtgggtgggtcagggtggccagtcactctcctagctgtccttgcctggggacttagatttaccccatccaggactgtggtcgctattctgtgagcgattgatggcgcatatgcagaactcccctggagtcatggctctagaaagtgtccaggcccatcgtgacaatggtgccaagcaccgggctggtgaccagtgcctaaacacacacgctcccttaatccttacggcaagcctgtgaggcggataggaccagccctgatctatagtgagaaaattaaggttcagagggagaaggtccaaatagtggccaagctgggactgagatctcgagtttgggtttgtttgggttttgttgttgttgttctttccctcgtgtccatgacttttctctgccattagcagggaagtgtgcggagggcttccagggaatcaagtgaccctccctctgaatttcggtgcctcttccccccgccccttgctcacacatttcagtaggtcacaggccaaatggcagcccaaaaggtgggcagagatttttttttcttcccctcacccctgcttattaacacaattgtgacaactactttaccttacatcccagggcaaacggacagcttgcggtacctccaaaaatttggaaaaccctgagtctaagaccacctcttgataaaagaggcctttgctcacattttctgctcggaatctttctttgccattggtgggtgtatgtcgtcccagctgagactgcgggagagctgagctccagcttaaaccgcttttaatggcccttccctactgggggatcgctggagcccatgccaggttacggtagtcattttaaacctctgccacaaggccacgccatagaatcaatttccaagtcaatgttcttggccctaaaatgtttgcgcccactgaggatttcattaccaggtggaagatgggggaacatatgccacgttaaagagcaagtgctgagtgtgccaggacttgagaaggaccttaggctgaggagtggacagtctggtatttatttcgcctctcccaagtacccagcacagagtgggaaaaagaagaaactgctcctgccttccagtagctggcaacttgacatcaagaacaaaaacattcgtagctggacccccgtcctttcatcgtgcccaagtcttacatgttggcttaagctgcccccttggaggccgtacctttctctttggactgtgacagtggacacctaacagcctgagccatgtgtggctgtcttatcccccaagggttgtccaggcccgttctgcagggctgttgtgtagactgcagacatccatacctcaccacagaccaaagatgacctcgtgtcagactgtgggctgatgagaggtagagcagcatgcatcgaggcctgagggtgcagggcgccctctcttggcctggaggaattgctcctaactagagtaagtttccacgagggtcccaggcagagctgcagagctggaaccggaggctccacagtccttgcctgctcatggacctccttcagagcacctttctacagactggactgcccagctccgtggggtggcatctggtttctggtgctattctgccaagttatcgagctcctcctcatgtttcaacattccatcttcccgtttctatcctcgactccaaagtaagccttcttagctccaatcagggatgaggggctcaacctcttctgtcctcaaagaggccaaacgcagtgccacagtcggtagccttcacttttagatgtcctattcatgtaaaaaagaaggtgcccccaccaggcttacatcagcaataagcaattctaatgcaacgatggtgtccacattttaccccagtgtgtgcccatgtatgcctttgtgcccgtgtaattattgttagcgcccctttcacttagaggggtgatgataaactgtggccaccttgattacaacccacatttcctgctttggggagcttccaagtaacaggccatttcttacctccctccaggaacagtgggcactgcccaccacctcgtgtctgctcataggatgacgctggagatccccacacttactctaccctcttggcaaattggcattccggtggtggtttttgtttcctttaacacattaaataaatgagtatataggatgtgaggggaggggtgagaacaactagctgtagcatgtgtaggctatatactttaccattcgacttctttcctttttttttttaaaataaaaaaagtgcttgactggtttcaagcttcatcatgaagatgcagtgtctatggattttatttggcaggagaaagggtacatagctttgtggcctgggatcttcgggatcaaggaacagaaacctatgccagctatgtttgggaactgtggagaaataggggcgacccctctctgggccatagtgcaccttcattctcttaactacaatgtccacaaaccaagggaaagcttcctttatgtccaaaggatggtgaacctcttgccggcattgcctcctgatggtcaagagtgtgctatggaggtccaggcccagtggctcacacctgtaatcccagcactttgggaggccgaggcgggccgatcacctgaggtcaggagttcgagaccagcctggccaatatggcgaaaccccatctctactaaaaatacaaaaattcgccgggcgtggtgtcgggcgcctgtaaccccagctacttgggaggctgaggcaggagaattgtttgaacccgggaggcggaggttgcagtgagtcgagatcacgtcactgcgctccagcctgggtgacagagtgagactcggtctcaaaaaaaaaaaaaaaattgtgcggtgggggtttggggtgggaaatgcagccacatttgggccgcagagactgcccaagccatctgctcctgggaggtggagcacactgcctaacgttttactactttcccaaaggcagtgcccaagcaaaatcaaccccagtgtggagcctccttgttcccaggtgactaacaggacaccaccaccccaccttcctaaggagagaagaaaaccagcagagtccccgaacaaaagaacttggagggaagggatatacatgcaatattcatgcttctttagaggaaacaatataacaaccttcttgcagaccttgcttaggaataatggtcattaatatattaatctgtgtccccattagaaggagaaaaacagaaggtgtggtggctcacccgtaatcccagcactttgggaggccaaggcaggaggatctgttgaacccaaaagtttgagaccaggctgggcaacatagcaagacctttcctctactcaaagtttaaaaaaaaaaaaaagtagccaggtgtggtggtgcacacctacaggcccagctacttgggaggctgaagtgggaggattgcttgagcccaggagttcaaggctgcagtgagctgtgatcgcaccactatgctccagcctggatgacagagcaagactgtgtcgcaaaaaaaaaaaaaaaaagaaaggaaaaagtcatgcggtgttctgggcccccataggagcaggttcacccaagttcttgcaaaccaagagtgcttaatcataacaggactggcaatggtatgggctttgcggctggggctggaggggcatccgcctcatgggatgggacggcaatgggaccatgatcagggaccaaacctggctttctctttgcagtctacttgccctctcactacatttctgtcccgtgaccttccttcaggtctcacctggaagtgtcacactcgccattccctatcatattgttttttgttttgttttgttttttgagacagagtttcactcttgtcacccaggctggagtgcaatggcgcaatcttggctcactgcaacctccacctcccaggctcaagcgattcttgtacctcagcctcctgagtagctgggattacaggtgtgtactgccagctaacttttgtattttttatggagacagggtttcaccatgttggccaggctggtctcgaactcctgacctcaggtgatccgcccgccttggcctcccaaagtgctgggattacaggcatgagccaccgtgcccagccccgtcatactgttttaaccacgccaaacatgatccagctgcctcaccttctcatacctgcaaacactccctcatctaaggtgagtttctgagtccaagattaccatcacgggggcacgcttctccaagtccttggtcttcaatgtccattccttctctcattcagtattatttgggccacatgagattcttcggcgtcttgcaactcacgcttcctaatcaatggctctcaaattttaatgaccttaatgattcaccagggagcttgtcgaaagacagattcctcagcttcactccctaaaagtcaaactcagcaggaatcagcatcctgagaaatccattctgaggaaataatccgcatgctccaccctgagaaatggccgggctttgcaccttacctggtatagtctacatgttcaaaaattatattctgtgctattattattattaccatttatttttatttttatttttttggacaagagtctcgctctgtcgcccaagctggagcgcagcgatgcagtcatggctcactgcagcctctgcctcctgggttcaagcgattctcctgcctcagcctcctgagtagctgggattacaggcgtgggccaccatgccaagctaatttttgtatttttagtagagacagggtttcaccatgttggccaggctggtcatgaactctggtcctcaagtgatccacccaccttggcctcccaaagtgctgggattgcaggcgtgagccaccgcgcccagccaggatctaacttttactgagtacatgctaatagttgagaagtttatagatgttatctcttttaatcttcactacagttcttacagataggaaatattacatccattttatgggtgaggaaattaacagtctgagagattaatttacccatggccacagctagtaagaggatgaacttgggcatctgagccccttaccataagttcccgaatctataatcttcccacttagcatttcccaaaatgtttttcagaacaaatgtcgataggaatttggaaataagtgttctgaaggtacattagtttgagaactgctgtttaaagtctattgcaggacttcttatgtaagcataatcagcctcttacatactagtgtgcaatgtgaatgtctgagagggggtttacttacactgggtttctcaaatgtatttgactgtgataccattcacagagcatctatcaggggcaacgtttcatgtaataaactctggaaaatgtccaattttaaatttcagctctgccttgcattctacctgaaccataatgcctgtctaaccttagccacatccttcacccaaattctgtttgtaactcactgcaacagagagctgctcactgacttcaagctttcctacttgctattgctctaccttggagttgtctgtaaggattttcccatacaaattgagcatcccaaaatataaagacccaaaattgaaatactccaaaatctgaagcaatggcatgacattcaaaggaaatcctcaatgaagcactcagattacagattttttgattaggagagctcaaccggtgtgtattctgcaagtattccaaaatatgaaaaaaaattgatacccacaacacttctggtcctaagcattttggataagggaaacacaacccgcagtgagattgccacatataggaaacttcagaaaacagccaccaggcagggaatttttctatctcctaaacacgttttcctttagagacttgtaaattaatggcagtgtacagaacatacatattttattaataaggcccaggttcatcccctcttaagatccaggaggctggccgggcacagtggcttacgcctgtaatcccagcactttgggaggccgaggcgggcggatcacgaggtcaggagatccagaccatcctggctaacacagtgaaaccctgtctctactaaaaatacaaaaaattagccgggcgtggtggcgggtgcctgtagtcccatctacttgagaggctgaggcaggagaattgcttgaacccggaaggcggagcttgcagtgagccgagatcgcgccactgcactccagcctgggtgacagagcaagactccatctcaaaaaaaaaaaaaaaaaaaaaagaataacaaagatccaggaggcccagatcctacaataaactatgtcctcattcccttccagctgcgtgaaacttggcctccaatacttctacagtatagtacagaatagtgaacttcagttttcattgcatacccctcaataaaaatgttaatatgtgaccaggtgcagtggctcatgcctgtaatcccagtactttgggaggctgaggtgatcggatcacttgaggtgagaagttcgtgactagcctgaccaacatggtgaaacctcatctctactaaaaatacaaaaaaacttagctgggcatggtggcacgtgcctgtagtcccagctactcaggaggctgagtcaggagaatcatttgaaccgggaaggtggaggttgcagtgagctgagatagcaccactgcactccagcctggacaacagagcaagactccatctcaaaaaaaaaaaaaaatatatatatatatatatatatatacacacacacacacatacatatatatacgtatatgtatatatgtatatatatgtgtgtatctatacatgttaacatgtacaaaatacatggattaataaataaatgtcatgtacaatattgttacgtgggaaactcttacatacacccatgcttggtttgttcccttccatgtgaatggagctgcaatcacagtaaggctccagctctctctctccctgggaaagagtgactgatatttaggggagcaggaagcaggtatgcacagctcagcctctctcctactagggatcagatggcccagggacgcatattccactgggcccctagctgtgggaggaggcctgtgcctgggtcagtgagcgtgtcttaattcttggattcgagcttgagacaccatgactgccaggcaccacacctaagccagattctcccacggccctctcaagaataaagctaacattttgttctctatctctcggatcccactctctcagttaattctgaactcaggggaggagaacagggagctatttattaggattcttaaaaactgtctactgaggatggaagtggtggctaacacctgtaatcccaacacttcgggaggccaaggcagg

SEQ ID NO: 1358 - DNA, 5504 bp, Homo sapiens
cacaaatctgtgattacctggcgggtgaaccgctccggtggcggggagagcgggctcccagcgctgggtaggggccgggttccggcgagcgccatcccggagcgtcagtttcccagtttgggaagtgaggagaacctgcctcgcccttccccgccaaggcttagggaagggactatggcagttccaagaggaaatcagggtctcgctctgttgctcaggctggattgcagtggcgtgatcatgcctcactgcagcctcgacctccctgggctcaagcaatcctcccacttcagcctccagagtggctgggaccacagtgtggctgtccagctgggctgagtcgcccaagaaggacgtgacaggtgccgacgccaccgccgagcccatgatcctggaacagtacgtggtggtgtccaactataagaagcaggagaactcggagctgagcctccaggccggggaggtggtggatgtcatcgagaagaacgagagcggctggtggttcgtgagcacttctgaggagcagggctgggtccctgccacctacctggaggcccagaatggtactcgggatgactccgacatcaacacctctaagactggagaagaggagaagtatgtcaccgtgcagccttacaccagccaaagcaaggacgagattggctttgagaagggcgtcacagtggaggtgatccggaagaatctggaaggctggtggtatatcagatacctgggcaaagagggctgggcgccagcatcctacctgaagaaggccaaggatgacctgccaacccggaagaagaacctggccggcccagtggagatcattgggaacatcatggagatcagcaacctgctgaacaagaaggcgtctggggacaaggaaactccaccagccgaaggcgagggccatgaggcccccattgccaagaaggagatcagcctgcccatcctctgcaatgcctccaatggcagtgccgtgggcgttcctgacaggactgtctccaggctggcccagggctctccagctgtggccaggattgcccctcagcgggcccagatcagctccccgaacctacggacaagacctccaccacgcagagaatccagcctggggttccaactgccaaagccaccagagcccccttctgttgaggtggagtactacaccattgccgaattccagtcgtgcatttccgatggcatcagctttcggggtggacagaaggcagaggtcattgataagaactcaggtggctggtggtacgtgcagatcggtgagaaggagggctgggcccccgcatcatacatcgataagcgcaagaagcccaacctgagccgccgcacaagcacgctgacccggcccaaggtgcccccgccagcaccccccagcaagcccaaggaggccgaggagggccctacgggggccagtgagagccaggactccccgcggaagctcaagtatgaggagcctgagtatgacatccctgcattcggctttgactcagagcctgagctgagcgaggagcccgtggaggacagagcctcaggggagaggcggcctgcccagccccaccggccctcgccggcctcttctctgcagcgggcccgcttcaaggtgggtgagtcttcagaggatgtggccctggaagaggagaccatctatgagaatgagggcttccggccatatgcagaggacaccctgtcagccagaggctcctccggggacagcgactccccaggcagctcctcgctgtccctgaccaggaaaaactcccccaaatcaggctcccccaagtcatcatcactcctaaagctcaaggcagagaagaatgcccaggcagaaatggggaagaaccactcctcagcctccttttcctcatccatcaccatcaacaccacttgctgctcctcctcttcctcctcctcctcttccttgtccaaaaccagtggcgacctgaagccccgctctgcttcggacgcaggcatccgcggcactcccaaggtcagggcaaagaaggatgctgatgcgaacgctgggctgacctcctgtccccgggccaagccatcggtccggcccaagccattcctaaaccgagcagagtcgcagagccaagagaagatggacatcagcactttacggcgccagctgagacccacaggccagctccgtggagggctcaagggctccaagagtgaggattcggagctgcccccgcagacggcctccgaggctcccagtgaggggtctaggagaagctcatccgacctcatcaccctcccagccaccactcccccatgtcccaccaagaaggaatgggaagggccagccacctcgtacatgacatgcagcgcctaccagaaggtccaggactcggagatcagcttccccgcgggcgtggaggtgcaggtgctggagaagcaggagagcgggtggtggtatgtgaggtttggggagctggagggctgggccccttcccactatttggtgctggatgagaacgagcaacctgacccctctggcaaagagctggacacagtgcccgccaagggcaggcagaacgaaggcaagtcagacagcctggagaagatcgagaggcgcgtccaagcactgaacaccgtcaaccagagcaagaaggccacgccccccatcccctccaaacctcccgggggctttggcaagacctcaggcactccagcggtgaagatgaggaacggagtgcggcaggtggcggtcaggccccagtcggtgtttgtgtccccgccacccaaggacaacaacctgtcctgcgccctgcggaggaatgagtcactcacggccactgatggcctccgaggcgtccgacggaactcctcctttagcactgctcgctccgctgccgccgaggccaagggccgcctggccgaacgggctgccagccagggttcagactcacccctactgcccgcccagcgcaacagcatccccgtgtcccctgtgcgccccaagcccatcgagaagtctcagttcatccacaataacctcaaagatgtgtacgtctctatcgcagactacgagggggatgaggagacagcaggcttccaggagggggtgtccatggaggttctggagaggaaccctaatggctggtggtactgccagatcctggatggtgtgaagcccttcaaaggctgggtgccttccaactaccttgagaaaaagaactagcagagggcctgggctcttccagcctcagtgtgcctctctggccgcccactggatgagcggtgagacgaacaaaagggaaaggaaaaaatgggggtggggggtggggggtggacaacattcaacactgcagaatgggtgacctcaaagatgccccctgtccaagccatcccacagctggaaggtaggggatgggggtgcccacactgagtgaggaagggaatggaccagggagtcccaggcctgggacccagagccaagaaagctgagatatcctgtgcaccatagggacttcaccaatggattacatgccatctgggacaggccatgtgggagaccccagttgtgcctttgctacagatctggaaaagacaaggtcatgggggcctccagtgtcctgcccctgcttggcccagttttgattgctggcatcttgccaccccaggtatccctggtattgtcctaagctgtatttgtgaattgtgctggtttcctgggcattgccacgcctaccacaggtgggtacattagaagccaccactggctttcaggcttgggggtgtcttctgagctcaagcctgcttctgggccaggccattgtcactgttagttgaagaaaaagcagttcccaggtgccagcaaagaccatctttcataactgtcactgtcttggccttgagaagagagcccgctctccgtggggcaccccatggaggacacagtaccagagtttacagagagggtgggcgaagccaccggtctcttcctaatctgcacagactattttgggtatttctgggcgggcagttcctttgcatgtttcgggagaggtttgttgatttggggcttatatgtcaggcctttggtttgcgtcttattttaggggttgtttgggggcctgggtggtcggcctcacatgggaaggagatgggtagtggatggggtttctgttgtatcttgtgggcgggtgattttgcttttgtttttgtttcacattcttccccctccacaagccaaagtcgtttcatttggtttccactgtgtggactgtgctggagcttggcgcctgccagaaaaatttggggctaggcaagccccaggttgcagacatggtgaagcagagaaactgttcttctggttcctgcacaacctcagaggggcaaaaaccctccccaggaaggaggagggtgttcaggagccagacttttggagagaaggcagctcccagcctgctgggtgaccgccattctgcgtgtgttccccagctgggcagggctggaagccttacgtatgaagcatggagaagcagccattgtccccactatgggcagaggggggacccggctggccccttgggtcagactggagccaacaccgccagccaccccctctggcctgctggcaatgccacaggtgcccaagaagatggaggatccctgtgccaggagccaacctggtcttcccgagggtcagtgccccagtgaagacagaagcgagagaataaagttccctgtaggtcctctgtcacctttgggttgtgtttttcaattgttgacatttcagaggggaccctccagaagcccagccggcttcccccaaggactcccccttcgctgggagtggatttccacacgtgcctttgatttcggacagattgggcctcacagccaccgattcagctgccagggtccctggactgggggttggtgttttctatagaggaggaaaggccctccctcaccctgctccccacccaggcagggcagcatgggacccagtgtctcagtgccttcaaaacccacccccacccctaccctaccccaccacaccccatcccagaggccttgcctgggcaaccctaagcccctgtccctcgccatacactgatgcctggcagctagagcaaatggctcgtgttctttgtcgaaggcctgtggtgagattgttttgtttccttttgttttgtgagtttgtttaaaattgaaattagttattttcttctgctggacagtattaaatagagcaggatgttgagttaatctgctagattgcagtactaatggtagtggtttagtgtcttcatgttaatattatttgtacttatttgaacaataatgataaagaagtggttcattattttttaattaatgcactttaaataaggtagaatggaaaaaacccagagagcaaagtgcattacttaaagatgcagtatatacttttctcatttttaaacagcacatatttattaagagaaaaaaagtaatttatgactatttaaaataaaatttaaaagtag

SEQ ID NO: 1359 - DNA, 2823 bp, Homo sapiens
atgatcctggaacagtacgtggtggtgtccaactataagaagcaggagaactcggagctgagcctccaggccggggaggtggtggatgtcatcgagaagaacgagagcggctggtggttcgtgagcacttctgaggagcagggctgggtccctgccacctacctggaggcccagaatggtactcgggatgactccgacatcaacacctctaagactggagaagaggagaagtatgtcaccgtgcagccttacaccagccaaagcaaggacgagattggctttgagaagggcgtcacagtggaggtgatccggaagaatctggaaggctggtggtatatcagatacctgggcaaagagggctgggcgccagcatcctacctgaagaaggccaaggatgacctgccaacccggaagaagaacctggccggcccagtggagatcattgggaacatcatggagatcagcaacctgctgaacaagaaggcgtctggggacaaggaaactccaccagccgaaggcgagggccatgaggcccccattgccaagaaggagatcagcctgcccatcctctgcaatgcctccaatggcagtgccgtgggcgttcctgacaggactgtctccaggctggcccagggctctccagctgtggccaggattgcccctcagcgggcccagatcagctccccgaacctacggacaagacctccaccacgcagagaatccagcctggggttccaactgccaaagccaccagagcccccttctgttgaggtggagtactacaccattgccgaattccagtcgtgcatttccgatggcatcagctttcggggtggacagaaggcagaggtcattgataagaactcaggtggctggtggtacgtgcagatcggtgagaaggagggctgggcccccgcatcatacatcgataagcgcaagaagcccaacctgagccgccgcacaagcacgctgacccggcccaaggtgcccccgccagcaccccccagcaagcccaaggaggccgaggagggccctacgggggccagtgagagccaggactccccgcggaagctcaagtatgaggagcctgagtatgacatccctgcattcggctttgactcagagcctgagctgagcgaggagcccgtggaggacagagcctcaggggagaggcggcctgcccagccccaccggccctcgccggcctcttctctgcagcgggcccgcttcaaggtgggtgagtcttcagaggatgtggccctggaagaggagaccatctatgagaatgagggcttccggccatatgcagaggacaccctgtcagccagaggctcctccggggacagcgactccccaggcagctcctcgctgtccctgaccaggaaaaactcccccaaatcaggctcccccaagtcatcatcactcctaaagctcaaggcagagaagaatgcccaggcagaaatggggaagaaccactcctcagcctccttttcctcatccatcaccatcaacaccacttgctgctcctcctcttcctcctcctcctcttccttgtccaaaaccagtggcgacctgaagccccgctctgcttcggacgcaggcatccgcggcactcccaaggtcagggcaaagaaggatgctgatgcgaacgctgggctgacctcctgtccccgggccaagccatcggtccggcccaagccattcctaaaccgagcagagtcgcagagccaagagaagatggacatcagcactttacggcgccagctgagacccacaggccagctccgtggagggctcaagggctccaagagtgaggattcggagctgcccccgcagacggcctccgaggctcccagtgaggggtctaggagaagctcatccgacctcatcaccctcccagccaccactcccccatgtcccaccaagaaggaatgggaagggccagccacctcgtacatgacatgcagcgcctaccagaaggtccaggactcggagatcagcttccccgcgggcgtggaggtgcaggtgctggagaagcaggagagcgggtggtggtatgtgaggtttggggagctggagggctgggccccttcccactatttggtgctggatgagaacgagcaacctgacccctctggcaaagagctggacacagtgcccgccaagggcaggcagaacgaaggcaagtcagacagcctggagaagatcgagaggcgcgtccaagcactgaacaccgtcaaccagagcaagaaggccacgccccccatcccctccaaacctcccgggggctttggcaagacctcaggcactccagcggtgaagatgaggaacggagtgcggcaggtggcggtcaggccccagtcggtgtttgtgtccccgccacccaaggacaacaacctgtcctgcgccctgcggaggaatgagtcactcacggccactgatggcctccgaggcgtccgacggaactcctcctttagcactgctcgctccgctgccgccgaggccaagggccgcctggccgaacgggctgccagccagggttcagactcacccctactgcccgcccagcgcaacagcatccccgtgtcccctgtgcgccccaagcccatcgagaagtctcagttcatccacaataacctcaaagatgtgtacgtctctatcgcagactacgagggggatgaggagacagcaggcttccaggagggggtgtccatggaggttctggagaggaaccctaatggctggtggtactgccagatcctggatggtgtgaagcccttcaaaggctgggtgccttccaactaccttgagaaaaagaactag

SEQ ID NO: 1360 - DNA, 24080 bp, Mus musculus
  misc_feature (8547)..(9492): n = a, g, c, or t.
  misc_feature (20171)..(20641): n = a, g, c, or t.
ggtggcaatcactgagtcagtgccagcctcgtaaaattgggacaagtgaggactcagaggatggaacggaagaggaatggcacccagaattgcctcccaggacctacgaggtgaagatctgtctgcctggtggcagctcatcaccattagggcactagtccttaaccactgtatgcaacaggacacgagggtacgaacggggtcagtcacagctgtggagatgcaaacagatgaccttaatgataactggccatttgccatcccagttctcagaaattgcacaagccttcgcatgcctaagccttcccaaccagttcccaaccagtacgtggacacccatttctcagactgaaactcaggctcagcggcatcgggaggcatggtgtatagccctaggtaagtcacctgagctctctgggattcatttggcttctctgggcagagggaaggtgaacaaggcttgtcagtatcaagaggttatactgtacatctgaaaagcagtcatgttggagaatgggagttggaaaagtttgaggaacatctaaaaacatactaattagcctttccaatggaggggaagcataggcaattgggaagttcacggtgacactgctttagataggaaatggacccaaaggcccgaatcccaagactgactcttgagaactgggatttttgtctacagggatcagaagggccaagggcaatagtccactctgtgactggttcttgcaaggctgtgactaagccctttcaagtctcccaaggagaaaacaaaataaaattcataatgaaaaggaggtgtagtctatcgctgaggaatgccgtgtgagagtagacaccggaatgagttatcaaagcaagtctggtattcttcctctgatggccttaggagagagacctagccgagtgtgggtggttgaaataggattctggctgaagccaaggggacgacgctacaaactccagtcttcccttttttggttcctaaaacaaacccacaagaacttccagagagtcttgttcacggacacttgccagcactgagcctgttatgtgatctgaagacagaaggcgtttgataaatgaagagattaagggactcagtgagttcacctggctgttgggaagtgttgcgagcctgtgtccctcactcacaggctctggctcacctgtctgcttatcctcagccccttcccacggactcgagagagtgagtcaaatggactaaggcttaaatattgttgtgaagctttgtcctaagcccatatgtgcatgcgcacacacacacacacacacacacacactcaaacacatacacacacatacacatgtgtgcgtgcacatacacacatgctcaaacatacacacacacacacacactcacaccacatacattcacacacatgtgcaaacacacacacacacacacacacacacacacacactcaaactcatgcacgtacaccggcacacatgacacacatatggcatacatatacatgctgtctcttgagtgcacacgcatgtccgtgcgcgcgcgcacacacacacacatccacacacagagcttccagtggagaggtgaatttgtcattatctgcaaacacagggtgatggaacacctgtgtaatagggcacagtcctctgtcaaggccttactcatctctagtgtttctgagctaacagatgtggggccaaatcaaccacgtgcggcatgtcttcagcgttccttcatgagatgcaatcagagaaagagatctaaattgcaaaaaaaaaaaaaaatattttcttcctttcaaagctcccatggctgttgcctggggaaaaaaaaacctgtttataaaaagcaaactctgggctggacctcaccaggtccctggggtaaacactgcctgtgtgcttacaagaccattgactgaaactgttcggtgactcaggaataagcctggtggtgaacccgaagagcagaaattacacatttttgtcagttgctaggagtgtgactgtgtgtctagcctgtttgcatcatcaagagaagcaagagagattgggactgatcccaaaggccccaattctccagggaacccccccttccacgctatgaaaaggagtactcagatgtggaccaccccctaatgtgaggaggaggaagagagaccatttggaaggagctttgggatttgacaggaagcaatcaggtccaatccaaagatgcgctgcctctcttctagcctcaactgggtctccttccctgccctaatctacattcacctcttgcagcctagcaaccactcagagagacagcaactagagctctcccacaatgcccgagccatggtcagtagagtcagacacatcagtctccatcttaaagatgggaaaacagagcctctgagaagagaggtgccacatctcagtacacaggctaggtaggttagatcttggtaagcctggagttcgagtgcctgggttcatagctcaatgacttccactgaattaaaacagggcgtcgagctttggcgacttggtttctgcacctttaaagtaacaagattaacggtacctacttcataaaatgagcagaacaaaaggaatcaggcaccgccagccattttggtgctccatacatacaagccattattattgttgtgttgttattattattacattcttgttttggacaggtagccaacaggtgcagtttctaacctgtttcccctttatccagttttgcaccgagggccagggttttacactgcctttccacaccatgtctctgtgtccctgatattgttcccattcaaaacctcgaaggcttaaactctttcctaagccagtggccacatgggctgttattcagtgttatggcaggcttgagggaatgtcacgcctccttacctttgtggtacatgattaagaaccatcaatagatatgggagtgaagagcctgtctcccatggaagactagggtggtgcgatggcagaaagcacacatggcctctccctgaagcaaccatcaactctaaataataccattaccaaatgacagaaggaattgggaagatgtttccggattctttgccctctgtcctttgcgttcttcccggttccttgcctgtagcaggtgggaagaagaaccagaaagaaagaaacggcctagctagggcttcaggcagatttgtccttagctgttctctgctggtggacatggcattcagtggtctctacactgactgcagagggtggtacttcagagaaagagtagcctttgctgcatgcggggggtggaggggtatctacattctctttagatgaggctcctggaggtccttgctcggcagtgtggtatctctaagggaaactgtttgacatagcatgcaggaaggccagcagaactaatgaggagttatctctgaggttctctcactgcctggaagacactgtgttcccatccagaactctactggctggaacacggagagcaatcacacttctgaactcaggtgatgggcatagtttaagaaaatgctagtaacagaaaatgtggacagatcacacaagacaagttttgttcctagggcatactgaggcaaaaatgccctatggtgggcttaaatttgctctacatctcaggcatgaaactgggcatcttcctgcctcagctttctaaatgtggaccttacaggtgtgtaccatctgtctcctaaatttccaatcactttgatagtcccaaccttttccttgaaaaagcagtcattcggtattttgatccttctgggggtgggggacaggggagggtggaacttgtatcttaattaggttactttaaacgtgtaacttggctttctgagcttagaccttgtttttcaaaggataaaatctgttttaaagtgtattacaaaaacttctacctcgagggttcccgttcttccccccaaccttccttctcagtaatggtgaattcattattcttggaagcagaaactcagaacttggagagaaataccatgaatcctcccttcctccatatctgaagaaaagctgttctgcttttatttgatgtgagctgtgcatcgcatgagctcaaaacacacagctctgaggccaatgcaacaaagtccatattctgggtctgcatcttgctgcagagacttgggcatgtcatgtcccctccctaaggcttcgcccccacatatatgaaacagaagagattagccgtgttctttcaggttggttatgagggacacagtgatgaagctagaatgataaagttgtgtctggtgcatagcattaagcaatgaaagtcatttaataagtaacaattattgcatatttaatatgcagcaatagtgtgctggcagcttcccattactgtatttaatcatcacaataacttgatggtcattccattcactttccagatgaaggaaccagggcagagcagctatgaaatgtggtgaaggtacacacagccaggagtggcaacgttgggatttgaatggaaaaccagaacccaccgtcttaaccctaacaaatggtgaccaccttggtgagattattgagatgaaaccccaaatgtctgtacttagatgttatgagacaattgctttggcagagatgccctgcctgacccttttgtgaacatgaaaccaaaagtttcgcgaattcgacattagtcggaagagaaaaaagaattatttcccacaacctggcaatataaacaggctagtaaaatagacatgggtgggtttcccagttgtaatgaccttcatttctcatgtgatcatacataatacactcaatacagaagctcaaagcaaatttggaaaggaggcgttggttttaagctcttatcaccagacttaacatctgttgaattgggcctgggttgaagtaatcgtgcaaatagttaacagccatttgcctgctcatctggttttcaaaagccaggtttagtaaagtgatctgtacgtttgacaggatgtctctctgctgccctgacgcatgctttcattttatacgggacaaagctcacactctcgttttcttattgaccgccgaggaatgtacttcattccaggattgaagccttttaggatgctcacaagaccgttgcctgtatttgctctccttggccccaatgccaggcatggaagatgatctggaaatctctacccacactggactttctcttcacaaatgtaccttgctttctcctgccccaaggcccgtcctatacctacattctccccgaaaccttctttccagagatcatacccccccacccccaatccttgcatgtccttcagatctgtgacaggtgaggtcctcagctggatattttgttttgttgggagcaaacacagccaccgtgatggtgcctttgagtgatgtgctggacaaactcggtgggattcggagctggacctgggtctaggtaccatcatatccctcagagtgtagcacatgctggaatcacggttgatcatcaagaaatagttttaagactctgcccatccactgcttgaaccagtactgatacatctctgaaatatggtcctaagggtcttgtccatattatctatgccactgggatgtcattaactttggctccacagctctgtcaggcatagcatgagctcagctaaaacccataggtcctcaagtttgtcctgagatactaggtgtggggagctatttgtcagttagcatttgtctggtttttaaaggccacgtgctttgtgccatcagaattgcagatctggtccttgcttgcgtctatggttaagggggatgctaaccttggctgcatctcccattctccaccagcagtcgcaggtgggaggaaaatgacatcacatgtgaagatatccaaacacgtttcttggcacatcaaaatgcatgtggtaaatcatttgacgtgtctcttgagtaaccatcatcctgttaacacactttgtagaacagctacgagaccgaccgaaagaaagtccaaaaccaccctgacaaggcattccttaggaccttctagccatctcccaactgcccacagtgctactttaccctcatcccaggcagcctgcatcaaaggaatctcctgggttttttttgacctcctctggaaaaagcaaatgagtctggcagcaaattgttcctgacttgatatcttttggagtgtcttattcacatgtagtgacaactctctctctctctctctctctctctctctctctctctctctctctctctctcgtcatttgtttgttgcatttttatctaaacactaacagttcaaatgctccaaagtagggaatcctggtctcaccttggtattccactcccacatctcagggttcttcctctccgtagaacagaatcacaccccctgccttcctcttacccctccttgcctccaggaaggataccatggggttgggttctcttaagacagcagcattaatatgcttggtcattccttccctggaacaggtctgcagagtcgctacattggaattctccctctccctgaaggggtctgtctgtaacagccccctctctcttgccttgtagccaccctctactaccacctcagcttcactttcctctgaaatgccaaagcaagatgaaattgatgaagtcggcgtgttcttccctaatggggtgagccaggctttctgagcaccccgcatagtgaccagggcaagggacttggatcctgaagaccgggcagcagatttgaactggaccaccaatcaccagctgcgagactttaggcaagttcttttagctttcctgaacttatctgtctaagctcgctggggctggcttgaaatatgtgctcttgattttgttccattatctacgctgactacatttaaaggtttgtactttttttttaaaggggggaggaagaaagtggggtatgggggggtaagtaaggctatcaaagactggttctcctccgatgttctggaaaggctgagagagggactggccccgggcatccttcagagcctggcctgcctcggggcagctagcctctattagcacctgcctcccctcccccatgtttagccatagctgggtccagcgaagctcttaagggtaggtgagagagttcttggaaggctcagcttccacagggttcccccccacccctctccccctttctagactccttgatggtatggaaccacttctcttacccccactgtcctcctctgcgaaggttggtagcggcaatccgccagcttcccgcgctccagtcagttctaccatcatcgggcgtcttgccctgggctggcttccctgctccccattctctccgccgcccgggagctccccctcggggcggcgcgaggcggcagcctgcggggttggcgacagcgcgggggagaggggcggctgctgcaatcctcccgcccacgtgcaccgacggcagcgaagcgccagcagtcgccagggcccgcgcctcccgcgcgggtgggtgcttcacctctggggctggtgggggacccgtaacctgagtcccaccgccgggacctctatttgcataacccgaccccccatttcttccctacccaggctggagatgagagtcgggctccccaccgaggcgtcgtcttgcctgtggtcagcgcgggggccgcgggactggccggagcgcaggcggagcgggctggcgcacgtggtaagagcaccactatttcttccttttctcccccctctcccttcgaaacagggctttgcagggtttttaagagggtgggatacccacagaggtttcgctgagcgttctctcctgtcccctttgaatttgatccccaattggaaaggagatcgcgcgcagagcacgatcgagaaactttcccagataatgcttttgggcgtttgaagtaatggcgaggaccattcccgggagaacaactttcacggttggcacgaggagaacagcgctgctcagagagcggcgacaagccggctcctggtggcactggggctcccctgaccaccgtactccaatagggcaggagccggcgcgctgcggccgcgggcatcgcaggtgatgggcgggagagcgcctgcagcgccgcgctccctccacggcgtggcgccgtggctcctgcccgctggggatcctcgctgctccgggtagcgtgggtcaagaaagagaacagcctagcccggtctgaatcccttttctgcgggactttgaagctgagaagggcagggcagtttcccagcttgcgtctgctatcccaggctacgtagatcccggagcctcgggcttgggtaccctgcagtagccagagcgcatcggaagagggctgggcgcgtggggaaggtgggaaccgagtgtccggagggccagcagttttagctctcttaaaagtttttggtcatttagcaggaagctttctcctggaagggcttgtttatttattgacttatttatttgccggggaaaacacgtgtgggggccatggctaccagaaactgtgccatttgttgtcactcagcgcagaggaagctctaagcaagggnnnnnnnnnnnnnnnnnnnnnnnnnnnnnnnnnnnnnnnnnnnnnnnnnnnnnnnnnnnnnnnnnnnnnnnnnnnnnnnnnnnnnnnnnnnnnnnnnnnnnnnnnnnnnnnnnnnnnnnnnnnnnnnnnnnnnnnnnnnnnnnnnnnnnnnnnnnnnnnnnnnnnnnnnnnnnnnnnnnnnnnnnnnnnnnnnnnnnnnnnnnnnnnnnnnnnnnnnnnnnnnnnnnnnnnnnnnnnnnnnnnnnnnnnnnnnnnnnnnnnnnnnnnnnnnnnnnnnnnnnnnnnnnnnnnnnnnnnnnnnnnnnnnnnnnnnnnnnnnnnnnnnnnnnnnnnnnnnnnnnnnnnnnnnnnnnnnnnnnnnnnnnnnnnnnnnnnnnnnnnnnnnnnnnnnnnnnnnnnnnnnnnnnnnnnnnnnnnnnnnnnnnnnnnnnnnnnnnnnnnnnnnnnnnnnnnnnnnnnnnnnnnnnnnnnnnnnnnnnnnnnnnnnnnnnnnnnnnnnnnnnnnnnnnnnnnnnnnnnnnnnnnnnnnnnnnnnnnnnnnnnnnnnnnnnnnnnnnnnnnnnnnnnnnnnnnnnnnnnnnnnnnnnnnnnnnnnnnnnnnnnnnnnnnnnnnnnnnnnnnnnnnnnnnnnnnnnnnnnnnnnnnnnnnnnnnnnnnnnnnnnnnnnnnnnnnnnnnnnnnnnnnnnnnnnnnnnnnnnnnnnnnnnnnnnnnnnnnnnnnnnnnnnnnnnnnnnnnnnnnnnnnnnnnnnnnnnnnnnnnnnnnnnnnnnnnnnnnnnnnnnnnnnnnnnnnnnnnnnnnnnnnnnnnnnnnnnnnnnnnnnnnnnnnnnnnnnnnnnnnnnnnnnnnnnnnnnnnnnnnnnnnnnnnnnnnnnnnnnnnnnnnnnnnnnnnnnnnnnnnnnnnnnnnnnnnnnnnnnnnnnnnnnnnnnnnnnnnnnnnnnnnntgctcgcgccttcttcccgctgaactctgcagtccggagtccccgctgcaggcaggggccgagagccccagacccgggtggttgtccaccggctgcaaatcgttcctggcgagctcagcggagcccgcgcagccaagcccgtatgcaaattggccatgtgacggcaaaagctgccaggcccagccctgttcctcagtccatatatgggcagcgacgtcacgggtattgaagacctgcccataaatactccgagcctaacactttccgtctgagagagcagcgattgattaatagctgggcgaggggacacactgactgttataataacactacaccagcaactcctggctccccaacagccggatcacaggcaggagagagtcagtgacggatagacttttttttttctttaagaagccaacaacttggttgctagttttatttctgttaatttttttcttttttttggtgtgtgtggatgtgttgtggtggtcttttctaagtgtggagggcaaaaggagataccatcctaggctcagttcaacccctctccaaaaaaaacggcttctctggcgctccaggtagcgagggagttgggtctccaggttgtgcgaggagcaaatgatgaccgccaaggccgtagacaaaatcccagtaactctcagtggttttatgcaccagctgcctgacagcctctacccggtggaagacctcgccgcctcgtcggtgaccatcttccccaatggtgaactgggaggcccctttgaccagatgaacggagtggcgggaggtaagccgcgtgtcttcttcggagcttgtgggtggggagcggtgggtgtgggggggcttggaggggagaatggggacttgaggtggacggcgctgaccacactggctctgaagactggaagtaggcgcagggggagcggaaaaagatagactagggctgcctggccgtgcgcgccagcagatgcacctggtcaccaaaagccacccgcatgcctgtagctccgggcgcgcccagctttggctaggcgcagggttgaagcatcatctcctggtccttgaagcaggtccatcagccggactctgcgctactgggctagggtcaaagagatgggaaagttcatcagtcgggttagagctgcgcgtctggagagctcagtgtcaggggagcgcttagggagcgcgcgggcagcgctctctgggcagagcccactcccggaggatctcccgagcgcgttgtccttctggggtggctgggaggcaccacccaacttgcgcatcgccccaaagtgaacagggttaacaagccgaggcggcggagcagggcaagtaacagcgagaagcggcaaggagaatgcctagggaggcccgcgctggcaccggtgtgcgccggttccttggcgatgctgtgtaaagtcgtcttcctcagcccccgcgccttcctagaagcgcagcctcttagtcttaggctaagacagggatgcgcgggtgtccggcttggccgaggatgttgggagggaagggaaccctagactccttcctccgctgcccgggttcacactggcagtcttcagctgaagcgcagcgggagagggagggggaggtggcaccaggaattagcttcaagaacatcacccacccacttatccattctggggttcccctctctcgcggctggcaccttctctgtaccgcctgggattgattggtcggctctttttattggtgtctgtatggttgcctcggcggtaagaccacaaggcaaaggagtgggagagaagtcagaggcagatgggaaattgtttgatattgttgctgctattgggtgtttttattgggaactagagtcacagatggccgggagatggaagcaggaaggggcatgccctgcttcttggagatacagtttttgagttccagactctgcctaacttcttactgtctctccaggcctcagtttccccacctgttgctctgtagtgttggaatcatgaaatggggattgccgtgtgtgtgtgtgtgtgtgtgtgtgtgtgtgtgtgtgtgtgtgtgtgtccgcgcgtcagcatgcgtgtatgtgaattagttcttgcctgtattctcattgtcccacctcttccctgacttttccctccccagatggcatgatcaacattgacatgactggagagaagagacccctggatctcccgtatccgagtagcttcgctcccatctctgcacctagaaaccagaccttcacttacatgggcaaattctccattgacccacagtaccctggtgccagctgctatccagaaggtatcatcaatattgtgagtgcgggcatcttgcaaggggtcacccctccagcttcaaccacagcctcctccagcgtcacctccgcctcccccaacccactggccacgggacccctgggtgtgtgtaccatgtcccagactcagcctgaactggaccacctctactctccgccaccacctcctcctccttattcgggctgtacaggagatctctaccaggatccttcagcattcttatcgccgccatccaccacttccacctcctctctggcctaccagccacctccttcctacccatcccccaagccagctatggacccaggtctcattcctatgatcccagactatcctggattttttccatctccgtgccagagagatccacacggtgctgctggcccagatcgaaagccgtttccctgtcctctggactccctgcgagtgccccctccactcacgccactctctaccatccgtaattttactctggggggtcccggtgctggagtcacgggaccaggagcaagtggaggtggtgagggacctcggctgcctggcagtgggtctgcagcagtgactgccaccccttataatccgcaccacctgccattgcggcccatcctgcgacctcgaaagtaccctaacaggcccagcaaaacgccagtgcacgaaaggccctatccctgcccagcagaaggttgtgataggaggttctcacgctctgatgagctgaccaggcacatccgaatccacacgggccacaagcccttccagtgtcggatctgcatgcgaaacttcagccgaagtgaccaccttactactcacatccgaacccacaccggggagaagccctttgcctgtgactattgtggccgcaagtttgccaggagtgacgaaaggaagcgccacaccaagatccaccttcggcagaaggaacggaagagcagtgctccctctgcacctccatctgcccagtcttcagcctctggtcctgggggctcgcaggccgggggcagcctgtgcggtaacagcgccattggaggaccactggcctcctgcacctctcgaaccaggacaccgtgagatgaagctctggctgacacaccagtttctccaggccccagaggccctctgtccgagctgccaacactaccacccttccctgttcctccccatgatcccgtgatctgggcaaaggaccttgatggagcccagctctgtcccaccttctcacggacggccttccgaaaacttaggccatttgaagggagttgactgtcactccaagaaatgggggagcaaaaagagggctgggtgagggcccctggcctacagggctgcgctctgaccctgactgagagatgtctgactatggtctgctagccctttccgttgaccctggatgccagttgttctgagactttttctacaataggttgggagttgctgattcctttgatcgaggacagcggaaaagactaaattaaagcaaaactgatgtggcactttaatggcttgggactgacttgggggtgggggtggggagttgtacagtgagcagagcctcatcctggctgctgcactctggccctagagcagtgaatggaggtttctctggccatctcaacccttaagcaatatgtcctagaaactcaagagaatggaagtgcaatgtcgggcaggacaaagcaatattggctcctttttttgttgtagttgaggaacaaagattattttttcagtgtatatccatttagattttgtgtatttttgatgtgcactgctctccgagttctgaaccttcgggaaaaaaatgtaaagcatttatgatctcttgaaatgagtcaaaggttaactaacttatttaaagggggacgtacataggatgcatgcagtgagtggtgttgcaagtgtcctctgtgccttgtgtgatgtgggcagtgttaacagggtctgcatgtgtacaggatgccttactatgggaacagaaaaatcactccttgggtttaagtatggctgtatatttctgcctattaatatttggaatttttttagaaagtatatttttgtatgctctgttttgtgacttaaaagtgttacctttgtagccaaatttcaggtgagaatgtgcttcaatgtcactgccgctgatttgtttggttattagctcttaatagttgtggagagagaaacaatctattctaacataaaaaaaccactaactggagttcagataatggatggcttattgactatggtgtaaataaatacttttcaacaatattctggttgcagagatcatttctgaagtacttactgggtggagttaaaatagttattgacatctgagaactaggaacaaacaccgctttagtgaggggttagcacaagccctccatgttcccttgctggcctgtggataacaagccctacctagctaggcttcagggatttcccgctgagttagtgaggaagccttctgactcactgttctgtcccctgtaacagcctatagcttctctctgctcctgagtgggctccggaaaataaatacttacaagcaagtgcccactcagagatgacaccccccagggctgctttcagaactctgaccacggcctggaactctgagttgtggctttgtggaaagtgtggcagcatggtcaaattagaaatgactttctgagttccaggattaatcttacaaccacaggaaactttttcaaagagctatcattccttcagatcaaacctgctcggacaccgctgatgccagctgatgccaatgaaacggcttcagcaattaccccaggactcatttctctccagtcctggcgtctcagatggttgcccatgtttggagggatcatttgtcacaagcttggtggatctagaaatgattctcaaaatagcttaagataggtagacacgaggctgtaaaactccaagacaatctaaacttactaggtaagctgcctcccccaaaacattataaaactctaaggtttcttttttactgggaacattttatcattttcttttaaactcaaaaccatctgacctacccacttgtgttatgcgcgttggcatctttactctgaaaatctggacctcaatatttataatgtccactgctccttatgcaatgtaatctgcgggtgtagccacactgctcagcctcaacagaaaacccctcccttgcttctggtccctgtaaagtccctgaggctgatggctactaatcaagggcttgcattctacagtggtggtcacatctttggcccttaacagcacaaggataagagattcaatttatggaggccactagtgcccctccccagtctccttcctttaaccccctttcatgggtatagaaacttctttccagaactcctaaatagaaatttcaaaacctttagtgtgggatggtttccttataatttcccactggactcgggctgtcaactaccaaaactattattgttacttatccaatactggcaactataaagccacaccacatcgtggtaacttttaaatacctttctcctgcaaaactttcattatttaaagatagtacacacctaaattttgtagtttttagctatctttaaaattttaattttggaccacattcaatcaagatcacccaagccaggattttaaaagcaagactaaacatcacttaaagaacaagacaaaaagaagtctccatgctaaagcacaccggttatgtgatcagttccatcctggtgtggtagcaaacctccccaacaagccataagattcagtacacctgaatggtcagagctaccctttctgcttctgtccccagttacttacatacccgatatctttaaccaactttctcagtttaaaagcattcaggccaattctcctgacatttaaaatttttgcctaagaaatcaccacagaatggtaaatttggttcttttaatccctcccctgcgtcccccaaatgtttcaggttttgtgcagagagattccttaagagattcatgccagagatggtttcatttgtataacaaacagctgatgaaacctaaatgacttcctcaagccaggatatttaatatccgtatcctaattgtttacgagaccaaggcaaatcatttcataaaagttttcaactgttggaacaattcagcatgtgtgtggaggcatgtagatagactcctaaatgctgccagtccaaatggtaaccatggaattactaagacaaaaaaaagagatgaaaacactttaagccttaagattttctttccttttaggataaaaattgactttgtttttcttgctagtttctttagattaaatacaaaagcagccttttctgttacagcaaaatagtgtaattagacagtaaatactctcagatgtattttcagtcggcttgcttcaaagaccactcacaagaaaacaaactaagtttataccacttcttggtctttgggggatctgtaggtcactggcttttgatacaatacaaccttatggaataaactgtgagttttcaacaataattaaaatagtaatagttatgtttcccttctccactttgcaataagcaacattatttctacgtaattttaaacatgcttttatttcccataagtacacacatcttactcagaaacgtaaacacccctgcactgtaagactgggtattgttaagaaatgatctcctttgacagcagaaacctcagcacaatggaccaatctgggttctgtataaccctacactctgaattcaggcctgcggtagaggagcaaacgctgtcaggagagtggcagagtgacgaagtgggggtaactgtctctctgctgggcaggacaggagagctaaagcagttgactcatttgccatcagagcaggtaggttctccccagatgtcaagttcaaggaacctacaagacaatgcaaggatcgagtggggaaggaaaggtgtacattttgacagtcatgttaaaaactcaagagaactcactcctattaacatagaaaacacattacctaaaaggcagggttttttttttgttgttgttgttttttaatgtaatcagcagcatgtggtagtaaacccatcaattctcaaaggagtaggaaggtatgaaaatcttacatcgatataactggtcactgatagaactacaaggttgaaaaggttcagtgtatttagacagacagacagacagcgtctcactcaggatctagttattgcatttattattcatcagaacagttaagtgacttaacaccattgtgctcattggtcttttctaagaaaaggagaaggtaacttttatcctaatttctagaccacaatctatattgtagacctacagggaaacacaacggcagaagttatagctaatagtttatgcatagacgtgcaaggatttttctgcacattttatcttagtaacgagcatattctttctcaagtggctcattaaaacatattacactgttttcaccgtaagtttactcagtttattagtgaaatgacagtttcactgttcctattgaactaatgaggaacacagtattgctgttttagctcagaacaatttcgttactcttttgaaaagcaccttagggtttttttccttccaaactgcttataacaaacctttaatatttctcctccttcttttgcaatgaaggccttcataataattgttattactagcccaattccaggctagacttctacaggctccatgaaaggacctccagagtatgctgtaaagtacacatgactctcaacaatccttgtaaaggaatcaacctttgctgcaattcaaaatctgtatgtggctgaaaaaccatattcattattaatattctatgaaaatagtcaaatttaaaaccatcacttcctatctagatgttcatacgagtggctcaaagagctgcttcgagaggctccaaaggcattttaaagaccatgatcagaaagaacttgaactctagcagccatggtggaagtgtttgggtgttgctcatggtttgtcaggtttaaagcaggtttccactggcctgttgttctcatttttattaaaatgaaacaaacaaacaaacaaacaaaaagccacaagccaagccagcaataatttgctgtctcgtaccactttaatgactgcaccgggaaggacaccccttcagcctggatgtgtatcctggatacatggagccaaaagcagtttgtttccctgccaggtcaacaaacatttgtcactcatgacagtaagtctccatttattgccgatattagtatattctattgccacatgagccatcaagagagcttagaagacagctgggcacatctgatttctacagtttgtctttatgaaaaggcctgtgataaaaaggaaccctacacatagtaaacaggggaaactggtggtccatggtcagaatcgatagacacgtctgtaaacatggtaaaggggctgagcctccgccagccataatactgcagcagcgctagggtttgctgcagtgttggcatagggtttagtctccaatcttggtgccctaaatggctaaattctcaagcatctattccatgtatccatttcatatgtgtgtgtgtacatacatatgtatatgtgtatatatacatattcatatgttatgtatacacacacatttatatgatggtgtcttatgcatccacggttccgctcaaattcactatgtagccaagtctgaccttgacttctgatcctcctgcctatatttcctaaatgctgtgtgctacacttggtttatgtggtactgaggattgagcccagggcttcttgcctgcttagccagcagcctacttccagagcccctcccagggtactacatgctctctacctcttcctgcaagagaaggcagtagtaggcagcactggctcttgtttaagggagtgctgggaggctatctcccggcagcacagctggaaccacacagctcctctgcaggctccctccacagagaacgcaaaaaaacaaaaacaaaaaaccaaaacagaacaaaaccaacaacaacaacaacaacaacaacaacaaacagtcaagagtatctttctcttctttcctaggaagaagctggaagtaaatacgagtatggaattcaacaggtggccagggcctttacattcagttatttggaagcatagcagattccgctcctcggaatcgtctggttagaaaacacataattattgtatcatctttgaagcacgtcaaggaaaaagtcagctgaggataataatcgtctttgctttaaaggcaaatccccaatagcaacaaaaaaatttgtttaaacgacagatcttgagacccaagggaaagacgagctttaagggcctgacaagagaattcgcgtatgtgaccttcttactaaaggttacctgagtacaccagaagtggctaccaagccaggggaggaaagacatcgtcctcaacacgcacagttatgagggtgaaccccagtgctagaaagatgtcttttcagaactcctcactttagatgctgagtagtttgtgtgtgtgttttaaccaaacgaataactaaaaaaaaaaaaaaaaaaaaaaaaaagaaaacaagaacaattcaaggtcatgcacaatcagtaataaattaaactattaaggagcaatcgtgggcaggagagaaaacaaatctgagtcaccgaagggaagagggattcaaaactacttagtgtattttgtagagaatgagaaacaaaaatggtttcattatggctttaggatggaagcgctttagggtccctgcccggttcccttaaatcaaagccttggtggcactgaggataccaggaatcaacctagccttccgcccacccgcccccataaccgtgcccggtggtggctgtactccagtgggccgtgttccccaaggttcctcaagatgtggcgctggtcactccagtaaatccatcgtccaggcgagggggcggagagaagagcccttatggaagatagagggcagccaggcctttcttgagcagggcagggtacatctttggcccacagttccccgggcggcaggagcttcaaggtaggaccttggggcctggatagggctctccctcgcaccagaagtcgtcggcctgtggtgtctccaggagccacacttctcggggaaggtcgcaggcagagccggaagcctccttgggtctgatgggctccactacacggtaatagtggcagtcccggccgtcctccgggtcgtagggtggggccaggatgtccaggaaggcagctggcccgtccacggcatcaatctggtgcaggttgtacccggtgtggagtgagcacgcagggcccannnnnnnnnnnnnnnnnnnnnnnnnnnnnnnnnnnnnnnnnnnnnnnnnnnnnnnnnnnnnnnnnnnnnnnnnnnnnnnnnnnnnnnnnnnnnnnnnnnnnnnnnnnnnnnnnnnnnnnnnnnnnnnnnnnnnnnnnnnnnnnnnnnnnnnnnnnnnnnnnnnnnnnnnnnnnnnnnnnnnnnnnnnnnnnnnnnnnnnnnnnnnnnnnnnnnnnnnnnnnnnnnnnnnnnnnnnnnnnnnnnnnnnnnnnnnnnnnnnnnnnnnnnnnnnnnnnnnnnnnnnnnnnnnnnnnnnnnnnnnnnnnnnnnnnnnnnnnnnnnnnnnnnnnnnnnnnnnnnnnnnnnnnnnnnnnnnnnnnnnnnnnnnnnnnnnnnnnnnnnnnnnnnnnnnnnnnnnnnnnnnnnnnnnnnnnnnnnnnnnnnnnnnnnnnnnnnnnnnnnnnnnnnnnnnnnnnnnnnnnnnnnnnnnnnatgttgtcgcggggcatgcttggcgcttcctgcgcggctcgcggccggcccgttccgcctctgcgccgccccttgcggtctccggcggccgccacggctacccgcgcggacccccgcgccaggcgggagacctccccgcaacaaccggccagcggggcgcgcggggccgccttgcacggtcgcccgcttagcgcgccaatggtcgggcgcttgcccgcgcgcgaaggcgagtgcgcacgcgcacggccgctacccgcactcacgctccggggcccagacaggcgctggcgcgggccgtgccaggcgctgcctcacgcgcggagctccattcacgcggcccacaccaacgactacagccgggcgcggcgggagcgccgcaaggcacgctgggatgtgtagtccgagcctgcgcttgcgcggggcacgaacgcgtcctgcggagcaggggaaaccaggatttttttaagaacttggcagaaagcgagcagcgcgttcgttttgcagagcctcagggtgtttacttgtttgataaaactgaactattattgcaagagatatagccagttaactacaactcccgccatccccgcagtcggggtgacatacttccggcagctggtggaggcttctcgccgctgggaaaaaaacggcacaagagggtcgttaaccttcttgtgccgctagggcctgctgggtcactcggggtcacctttgacccttgctccctaggaatgaggtttcggggtcaaccttagctgctcgtaggccacactgtgtgcgccgtggagatctgtggatggcgcttgtctatttttctgtttcttaggaggtgaatggggtcgggcgggtaaccaaagcggtcacccagcacagctgtgcgcagctgttgtttgcctctgggcctgatgacgctgctccttgactcactgatagcgggaagctttgagaggccatttgctacagccaagggttctgtatactagtggttatccatccgtagggcgcccgagaaacaccagttgaggggcaaggggcgttttgtcagaatagattatcgctgtcatgagtctctagagcaatgcaactatcgggctggtttatgaagttaggtcaccgcagagtgattattctctggactttttgcagacgtaggtggtggctggcaaaggaagatagtagatattatgaatttaaatcttacccttgaatttaaggtcttcttggactttcagaattaaacatgggtttataactgcagtggcccaggaaatccttttcagttaagaaggcaggcttttagtgtgtatgtgtgtgtgggttttgcatcctagccagtaagtgtggtattccaggtaccttgttaaatacattaaataatgagttttatcttagtaataccctcacagaaacttttaagacgtaggcactgactgtattattccccgcctgtacacgagagattaatttgcaggtgcgcatttggaaaagacgtaagtgcaacttaacgaaacacagtttgaattggtgtaaaaggaaccaagggacacaaggacgtagcttctgcagcttattgtggtgctcacaagctgtggctttctgcacagcgtacctttccaagtcctcagttcattcctccaaagaatgctgggtttgatgcatccagacttctgagtcattgtttctcacccaaagtccctcggtagcttaaagggcgattctagacgttataccccagggcttctgattcagtattggggtgaaggatagaattctggttgagaggtgcccactgaagtggttcgaggttcagcacccatgttggggggggtgtcactgtgagatctgtaaatggtgagccaaccccatttacattccacagtaagagcaactatttggctacgtaaatggatccttaagattacttgtgtttgagccgggcagtggtggcgcacgtctttaatcccagcactcgggaggcagaggcgggcggatttctgagttcgaggcttacagagtgagttccagggatagctagggctacacagagaaaccctgtctcaaacaaacaaacaaacaaaaagattacttgtgttttagaagctggtggtgtgccatccttaaatgcactatggaagttcatcatgtaaggaaatcccatgcagtttatttgtaaagtaaggaatatttaagagaaagttcttttgttttcacatacagatttttttgcttactggctttacttgtataaagagtagttagcaggagaaacagacaccaaagagcacagacctaagcagcatacagcctgcttgatttccacgccccccaccccctctttaatagttgtctgcagttacatgaaggaagctgtatttcatctgtcaactggaaggttagatacttatgcaaatgcccaatgatgcctttgggaacagagtaactaccacaggacaataggtattattaagatttttcagtggctacaagttaccctttagagaccaataggtttaggcactcagtgagtgctaaagcaggaatgtggactttaccggtttcagagcagagcttttcaaggttattttatttgctttgacctagtaatggctcctctcaggccctcatttttcatctgctagctgataaaagtttccagacaacctgcataggaaacactgggggtgcttgtccaaagggctcgtcccaaattacattaaaatctgcaggagaatcttttgtgtgttgaagttttggagacccagtgggtgtccgcctgtggtactttataagtcacagggccttcacagttccctttgatgctgtccttcagagctgcaccaaggaaggaggataactgagcctagtgggtttgcccaccagaagggctttgctcggcttttctgtcccactgttagtagcacagctgggcaggagactgtattcatggcctttaaaaatagtctttatttttcatttctccgtcttgcggtatgcagagtgaaaaccaaaggaagggtagaaaaaaaagaaatggtaacaaaagtcaggaaaatgcatggcagggaacaagtttgggatatgtggaatatattgtcaataaatagtatctagtggttacaaaacttagtgtttggaggctcaacaaggaacaaggagagacaaggtgttgtttcccaaggaatttactagcaactgtgcccatctctaagagcatacaatgaacatgcaatacccaaatccatacatccatgatagctggaaagtcctttgggaggtacatagattgatgtgtagtcccatgatgtcatcggtggtgttataagaagatagcgactgagtttgcatgcttgtctttctcactatgtgacactacacttatctcgctaagacatagcatactaccctccgccatgttacgctatagcatgaagggcattgc

SEQ ID NO: 1361 - DNA, 2862 bp, Mus musculus
agcgattgattaatagctgggcgaggggacacactgactgttataataacactacaccagcaactcctggctccccaacagccggatcacaggcaggagagagtcagtgacggatagactttttttttctttaagaagccaacaacttggttgctagttttatttctgttaatttttttcttttttttggtgtgtgtggatgtgttgtggtggtcttttctaagtgtggagggcaaaaggagataccatcctaggctcagttcaacccctctccaaaaaaaacggcttctctggcgctccagctgcctgacagcctctacccggtggaagacctcgccgcctcgtcggtgaccatcttccccaatggtgaactgggaggcccctttgaccagatgaacggagtggcgggagatggcatgatcaacattgacatgactggagagaagagacccctggatctcccgtatccgagtagcttcgctcccatctctgcacctagaaaccagaccttcacctacatgggcaaattctccattgacccacagtaccctggtgccagctgctatccagaaggtatcatcaatattgtgagtgcgggcatcttgcaaggggtcacccctccagcttcaaccacagcctcctccagcgtcacctccgcctcccccaacccactggccacgggacccctgggtgtgtgtaccatgtcccagactcagcctgaactggaccacctctactctccgccaccacctcctcctccttattcgggctgtacaggagatctctaccaggatccttcagcattcttatcgccgccatccaccacttccacctcctctctggcctaccagccacctccttcctacccatcccccaagccagctatggacccaggtctcattcctatgatcccagactatcctggattttttccatctccgtgccagagagatccacacggtgctgctggcccagatcgaaagccgtttccctgtcctctggactccctgcgagtgccccctccactcacgccactctctaccatccgtaattttactctggggggtcccggtgctggagtcacgggaccaggagcaagtggaggtggtgagggacctcggctgcctggcagtgggtctgcagcagtgactgccaccccttataatccgcaccacctgccattgcggcccatcctgcgacctcgaaagtaccctaacaggcccagcaaaacgccagtgcacgaaaggccctatccctgcccagcagaaggttgtgataggaggttctcacgctctgatgagctgaccaggcacatccgaatccacacgggccacaagcccttccagtgtcggatctgcatgcgaaacttcagccgaagtgaccaccttactactcacatccgaacccacaccggggagaagccctttgcctgtgactattgtggccgcaagtttgccaggagtgacgaaaggaagcgccacaccaagatccaccttcggcagaaggaacggaagagcagtgctccctctgcacctccatctgcccagtcttcagcctctggtcctgggggctcgcaggccgggggcagcctgtgcggtaacagcgccattggaggaccactggcctcctgcacctctcgaaccaggacaccgtgagatgaagctctggctgacacaccagtttctccaggccccagaggccctctgtccgagctgccaacactaccacccttccctgttcctccccatgatcccgtgatctgggcaaaggaccttgatggagcccagctctgtcccaccttctcacggacggccttccgaaaacttaggccatttgaagggagttgactgtcactccaagaaatgggggagcaaaaagagggctgggtgagggcccctggcctacagggctgcgctctgaccctgactgagagatgtctgactatggtctgctagccctttccgttgaccctggatgccagttgttctgagactttttctacaataggttgggagttgctgattcctttgatcgaggacagcggaaaagactaaattaaagcaaaactgatgtggcactttaatggcttgggactgacttgggggtgggggtggggagttgtacagtgagcagagcctcatcctggctgctgcactctggccctagagcagtgaatggaggtttctctggccatctcaacccttaagcaatatgtcctagaaactcaagagaatggaagtgcaatgtcgggcaggacaaagcaatattggctcctttttttgttgtagttgaggaacaaagattattttttcagtgtatatccatttagattttgtgtatttttgatgtgcactgctctccgagttctgaaccttcgggaaaaaaatgtaaagcatttatgatctcttgaaatgagtcaaaggttaactaacttatttaaagggggacgtacataggatgcatgcagtgagtggtgttgcaagtgtcctctgtgccttgtgtgatgtgggcagtgttaacagggtctgcatgtgtacaggatgccttactatgggaacagaaaaatcactccttgggtttaagtatggctgtatatttctgcctattaatatttggaatttttttagaaagtatatttttgtatgctctgttttgtgacttaaaagtgttacctttgtagccaaatttcaggtgagaatgtgcttcaatgtcactgccgctgatttgtttggttattagctcttaatagttgtggagagagaaacaatctattctaacataaaaaaaccactaactggagttcagataatggatggcttattgactatggtgtaaataaatacttttcaacaataaaaaaaa

SEQ ID NO: 1362 - DNA, 1413 bp, Mus musculus
atgatgaccgccaaggccgtagacaaaatcccagtaactctcagtggttttatgcaccagctgcctgacagcctctacccggtggaagacctcgccgcctcgtcggtgaccatcttccccaatggtgaactgggaggcccctttgaccagatgaacggagtggcgggagatggcatgatcaacattgacatgactggagagaagagacccctggatctcccgtatccgagtagcttcgctcccatctctgcacctagaaaccagaccttcacctacatgggcaaattctccattgacccacagtaccctggtgccagctgctatccagaaggtatcatcaatattgtgagtgcgggcatcttgcaaggggtcacccctccagcttcaaccacagcctcctccagcgtcacctccgcctcccccaacccactggccacgggacccctgggtgtgtgtaccatgtcccagactcagcctgaactggaccacctctactctccgccaccacctcctcctccttattcgggctgtacaggagatctctaccaggatccttcagcattcttatcgccgccatccaccacttccacctcctctctggcctaccagccacctccttcctacccatcccccaagccagctatggacccaggtctcattcctatgatcccagactatcctggattttttccatctccgtgccagagagatccacacggtgctgctggcccagatcgaaagccgtttccctgtcctctggactccctgcgagtgccccctccactcacgccactctctaccatccgtaattttactctggggggtcccggtgctggagtcacgggaccaggagcaagtggaggtggtgagggacctcggctgcctggcagtgggtctgcagcagtgactgccaccccttataatccgcaccacctgccattgcggcccatcctgcgacctcgaaagtaccctaacaggcccagcaaaacgccagtgcacgaaaggccctatccctgcccagcagaaggttgtgataggaggttctcacgctctgatgagctgaccaggcacatccgaatccacacgggccacaagcccttccagtgtcggatctgcatgcgaaacttcagccgaagtgaccaccttactactcacatccgaacccacaccggggagaagccctttgcctgtgactattgtggccgcaagtttgccaggagtgacgaaaggaagcgccacaccaagatccaccttcggcagaaggaacggaagagcagtgctccctctgcacctccatctgcccagtcttcagcctctggtcctgggggctcgcaggccgggggcagcctgtgcggtaacagcgccattggaggaccactggcctcctgcacctctcgaaccaggacaccgtga

SEQ ID NO: 1363 - DNA, 24370 bp, Homo sapiens
attccaagcatctagcataatacctagcatatagtaggtgcttaataaatatttgctgaatggataaaggaacactatgagctagtctgggcatttggaagtgagagaagttaccctctggttcacctacctgcttatccacagcccctggctcagcataatgtgggctgagcctctaagttagagcagtggccttcaaatcccagggaatttggacaagctgtctgttattagtcagggttctctagaggacagaactaatggaatagataaatatataaaggggagtttattaagtattatctcacacaatcacaaggtcccacaataggctgtctgcaggctgaggagcaaggatagccagtctgagttccaaagctgagtctgatgttctagggcaggaagcatccagcatgggagaaagatgtatgttgggagactaggccagtctctcttttcacatttttctgcctgcttatattttagctgcgctggcagctgattagactgtgcccacccagattaagggtgggtctgcctttcccagcccactgactcaaatgttaatctcctttggcaacaccctcacagacacgcccaggatcaatactttgtattcttccatccaatcaagttgacactcagtattaaccatcacagtgtctcagtcctcttcatcaggaatttgcacagtggggaaggagtcaagtccactcaggttccactacagccacccacccatcttttacctaatatttatacatattgggcttccagatactagtttctatttgtctggtaacagtccactctacttgctattctgtgagagcaatctgtgattttaaaaagcctgaaacacaggaaaagtgaggaataagctcccttgttaaagcaccttccatctctaggatttctgagtaacaggtgagaggacgaaaatggtcactttggacatgtttttggtgccgcttgtttcatgaaattcaaataaagggaagaaaggctgtaataaattgttccagttttcctctttttgaagtgttcatgggttgttgtctgaataatcgtattttaaaaaagcaatctgtctaattccaaaaggctgggggttgccaggtctctggggagactctcttttgagcatacaaggccattgattgaaattgttctgttagtagtgagcacactggcaccacaacagcccttagagggaagcacacaatctagttaattatgaggatgcgagaaggagtatgaccatgtgtctgggcctgctattagtatcaggagaagcagacccaccaaggcctagttccaaaggccccaagactccaagggacatttccccactcccctatctccacatgagaaggaaaacacagatatggaccactctgcactgtgaggagaggaaaagaggccactttaaagggccttaggattggtcagcaagcaaacaagtcacaagtgagttcaatggttgatgccttgtcctggaatcataaacttggcctcccaacctaccccaatctatattcagccctgcctctgaaggcccagcaacccaaacaattgccctgggagacaacaattatatttgcagtattgtcctgcttttcagaatgtggtcttccttggatgtctcgcaatgctctggccaatggcacttagggcaggaatacccagtctcattttcaagatgaagaaacagaggctcagagatgctaagtcacttgtctagttacaccggttagagtaggtactgggaacaccagtaatggagtcagactacttgggttcacgtcttggcacttccacttaatcagctctgcaacttgggctttggtgactcagtttcctgagtataatgatatctgcttcatagtgtgattggtagattaaaacagataaagcatcccagtcatgaaagtgtttagcatcctgaaatgctcaataaatatcaaccattattatgatggagaggcaactattaaggccaattcctaatctcatggtatttccagtacacagtgttgtacccagcaccagcttcttgcattttctttctgcccaatcctctcccctgctccctccacctttctcactcaaaatagtgaagatgtaaaactctttttctaaacattatggcccccttggctgctacttaaaattctggcaggcacaaggggatgtgatgtctctacctctttgtggcatgaggttaagaagcatcactggatacagggaaagaaaagcctatctcccaaggctgtcactaaaggtttgagtgatgtgactgcagcaagcacaggtggtgccttctagcatcaaccacctaccccaaatagcaccatcagccattgtcagaggcagaactgaaactctgtgccttgagtcctttccattccccaggctacctggattgccctgcatctgggactagtagtaggtgggagaggagtcaggaaggagagggggtggctcactgctggctgctaccatgtcagtagcactcactatcctgaagacagagagtggcccctcagaccttaatgatttaaacctctgcaaaaggggatatctgaggacaaacccttcagaggatgctttctagggtccttgcccttgttctgaatacaacatctccctaagaaactgttagacatagcatgcagtgggatgggtagaattaattgggaattatctgacaagatagtataaaaatctcagatgcctctcgtcactggaaaggcatatattggattcctatccagaactttgcttgattggaatataaacagagaacacatttctgatgtccctgccttaaggagatttataataaagttgaaaaagtaatggcatggagaatatgtgagaagatcccacggggacatgctcctacatgggttgtacaaggctaagaatgccccttatggagcactgtctctagatttcgcaggaaatttgctaacacattcttcctaaattttatattttggttctatattcccaaacctccttggaagaacaacagtgctattattatgcattatggtctcactggaaaaaaagatgatatattaattagattattattaatgtggaacttggctttccaagtttagatgacattttccacaaaggtatagcttgttttaaattacatgccaataacctctgccttctgggttcctttttcgcctgctcagtaatgatattatcaatgttcttggaagctgaagctcagaattttggaaaaaagcgacaaatacttcatatatcaatgtttgaagtatggccactgtcttgcttttatctgctgtgggttgttctacattatataatgtacttgaaacatgtgggctttggtgattgagagaacagagttcatattctggttctgtgtgaacttgggtgagctgtgtatcttccctgagctttagttccctcatcagtaaaatgagaataaacagacctgtttctcaaggtggttgtgaggaatgaagcaatgaacctagaacatagtaaagtgtctggtgcagagtgaacagtcaataatagtaatgatttaatagctaacaattactgaatagttattatatactgacaatatgctatgggttttacatatattattatatttaatccttaaaataactctataatcattctgtccactttatatatgaggaaatagaggcacacagaagttatggaagtttttttttgttattttttttcctttttttttttgagatggggtctcactctgttgccaggctggagtgcagtggcgtgatcttggctcactgcaacctccacctcccaggttcaagcaattctcctgcctcagcctcccgagtagctgagactacaggtgcgtgccaccacacccagctaatttttgtgtttttagtagagacagggtttcaccatgttggccaggatggtctcgatctcttgacctcatgatctgcctgcctcagcctctcaaagggctaggattacagtcatgagccatcgcgtctggccagaacttttgactacctagatgtttaagtacatatagccaggtagtgtcaggatttgggtttgaacccaggacctcaggatttaaatccaggccatataggcctccagagcctataatcttaaccgtaatcatgagaaatagtgaccattcttattaagattatctgattgaaatatacaatttgctttcttttttggtttaatgctgcaaagcaactgctctgacaactggatgcactgactggcctggtccttttgtcagtataaaagcaaagcttctacaacaagtatgacatcatttggaagaagaaaaattgctccccgtaacctggtaatataagcaggctagtaatatgtgtctaaaaatccgtaagctcctcagttatagcaaactttattttttatacaattagagataataaattaaaggtataagctgaaagaatagaaaatataaaaaggcatgattttggatgaagattatgctttgagcctttatgatcagactgacagcctatcacttattaaagtggacatcaggtttgtatgtaccttgtcttaaacagtcatgatataccatgcattgatttaccttttgtcttttgccagcaatggtaaagtgatctgtagatttgtcaggatgtgtttctactagataaaactgcacttacaaactctattcatttaaaatgggacaaaattcacacagtctgtcatttccttattaagaaatagacaactaagaaatgtttttcattacgactgtcaccaagacacaatgctaatatcaataagcatttttgtgtatgttctccttgctgaaaccttgtcagcatgttctcatttgtctgcagaagctgagtggtaaaaaatttcaaatgtaaaaattctaatgtcactgtcattagccagaaaaagaaatggcagagcaaagaaagactcttggagaatgaaatctctccggagacactccaaggaggatgcctgtattggctaccttcagccccagtgcactagacatggagatggcctcagaagtttccaccaaccatggactttctccattcttcaaatgaactttgcttccctccaccttggcacctttcaacacctgttctttctccctggaatgctgtctccactgaccttcccccaatccttgcacatccttcagatctctgcttagagaagtcttcctcaacctcctagattcaactgggtcctttgtcattttctttcattgggatcaaacactgtcattgttcatagtcatgtatttgtgtgatgcacaatgctaattccatggggtgggaaccaggcctaattttaggcaccattatatccctggggtttggtgtagtgatggacacctggtagagaggcacacgaaatatctaaagggaacctgagcacccactgcttgggccagtgctgctgcttgtgctgctgcttctacaaaattagatcatagagctcttatctcctcctgtccagattatttgtgccaatgacacgtgacttaagttgtacattggactggtgcaaagcaatgctttcctcaagcttcacaacagttctgattggcgtagcctgggcttggtttatagcctctgggattaccagattagtagtgagatgctgaaacgtagagaaccatttatcactttttttcagcatgcaggggcactttaggtggatggcagagttggcaattgatctgattttcaccgaagtgcacatgttctatgccattcaagtttgaggtccccaccctcatgagtgtccacagttaaggcaaattctgaccttcttttgtcttccactccagtaacagtattagtatggaagggaacaaaaatgacattacaataggtagagcctataatgatgtgcaagaatgttaataaatcaaaacacaaatatgaacaaattatttgtgacatccctcttggctgatggtgatcctgtcaccacactgtaaatgagaatttcaaatctgggttaaaaaaaaaaacctgaaaatcactcgggagactctggggtccagctaggaccctcaggttgccacccctgcttgtcaccctaaacactctcccgcaaccccaggagcaagcctactaaagggtttctctgcatcgttgttattttactttctggctctggaatctggacaaagcaaattggaatctggcatgagtttgctactcttttaatagccctgatacatcttggagtgccccatttagtcgggcatttttacaggtctattttaaagaaagttgtttctttgttggatttttaatcaaaacaaaaaagttcaaatgcttaatagtagggaccatggtacatgtttgtattcaactctcacattctccatccccacacccctccacctccagcacagtatcttgctcagtaaaccctttggagtttttacttgtccgcacttctttcttttctcacctcttcttgtctccaggaaggatactgtggggctagcttctcttatgacagcgcctattagtatgctggctttgtgccagcctggctattccatccacaatctaggtctggagagcccaagaactcaaattctccctttacagtgggcagggggcgtgtccatgacagtcccttcctccttgcctgtagaaagccctgacctcagctttgctctcctcagaaatggcaaagaaaggagatgaaattggcggaggcggcctgattcttccctagtgggctgagtcaggctcccaatcctcaaagaagtgttcacttttcagacctgggttttcctgagggcacgatgtagcgaccactgtgcgctgtacttggattcagaagacccagctgcaagtttggacacgaccacttaccagctacgtgactttaggcaagccactttagctttctgagcttatccacagggtggctggcttgaaagggtgcgccttgattctgttccattatctgcactacccatatttaagggttggtacttcaagagacactcaaaaaaacaaaggttacgagagttatctactgacttgtttcagcggaggttcaataaaggcctcccaggactggccccaggcattccctggcttacccgcagctgccgcccgtccccgcccccactccattccctgcgcaccccaggctgatgcagcgtagctcttagggggaggtgtgagtccttggaaagctcacaagaatttcagagggtcagtcactctcatttactctaatgtgctttcaagactccttgatggggccccctcctccacccgccttctactggcatcctcctccgggaaaggtggcagccgaagacctcgcggttttccctcgctcaggcaccccgccccgcccccagccccggtcctgccctccgcgccctgctggccgggcactcgggcgtccaggagctccccctcggggtggcgcgcggcgaccgccggcgggtttggcagcagcgccagtcgcggggcggcccgggcaactcgcccgcctgccggtccgcccacgtgcgcagagaggagcgaagcgcgagcagtcgcctcgcccgcgcttgctgccggtgggtgcctcacctaaggggccggcgggggccgtaacccgagccccatcgcagggatccgcatttgcataattcggctttcccccgttctttcggactcagggcccgagatgcgagtcggactcccttccgaggcgtcgtcttgcccatggtcagcgcgggggccgcgggacccgccagagcgcaggcggagtgggctggcgcacgtggtaagaacgcagctatcttttcttgcttttcttttctttctttctttcttgagaaataggactttgcacatttttgctggggtggggtatctactagggtgctaaccttgctgcgatttctttccatgtccttttcatccccaattggaaaaaagcgcacagcgcgagcgagaaactttcccaaatgtgctctgggtgacttaagtcagagagatggccggccgctggataccggctgttttggagggagggggagaagcagcgcttcagtggaagagcagagggagagaccgctcccggcagcctcagggccctgaccgcggtgcgctgggcccggcgagagctggcgcacggctgcagcggtcgaggcaggtgagcggctgaagacccgcctgcagcgccgcgcttcctccacggcgtggcgccgtggctcccgcccgccccggcccacactaagctagggccgctccgggcccggggtgaaaaagggacaggacaggcctgcgaggctgaccctgcgcgttatccctggcctccgcggctttggagcgggaaagggctctggggcagttcgcaacctgcacaaacgaccatgaatgagtcatgcaggcggcggtgcgctggacttgggcacccgggaccagcctcctgtggggccccggacaggcccggctatccattgcgggctggggcgcactgggaggtagaagctttgcgcccagcaagccagaacctgctgctatttggactttggaaaagtttttaaaaattgctttgggaacgaaacagaagggtttctaccggggtctcgcaaagtaaaacgagtgggttgggggatggggatggcgtcttgaaagtgattagagatgctttcggccgtcactgaggaccgcgctgggctcaccgaggtgttttttggggagggagagaaaatatttattctagtacgtgtatcttggctcgggtgcgggcagggcgcggtcctggatcctgggctatgggggtcagggggattctgtggctgcagggaccggtagtgaaggttaggccagtgtcttcatagaacctcctgtccagcgagcccggagcccgctctgccgccgggacactgctggcaacgacggcgcgcggacgcagtcaacagggaggtgtgtagtgtaaggtgtgtgagcgggtgtgtgaagagggcagcgggggcgggagtgtgtagcggaagtggagcgagtgtgagtgtgtgtgtatgtgtgtctggaggggcagggtgagtgtccaagcttccatctggacgcccccacgcagccgaccgcccagacgcgccgggaagggcgcccgctccgcgcagcagctgaaggggggcggggagcgcgcgggcagaggaaggagggtgtctccggctgaggatttctctcgaagctccccacagtaattctgctcctcctagggtttaccctcccagtcccaaggtgcccaaaatacttaaacaaacaaacaacccaaacctgttccgttttcgctcctgtataaatagaacagactttccaaaaaagcaatacgcattcactcttatcaccagccacttctttccaccaagtaattcagaaaaaagcagtcagcttccgtgaatgcatgtagctttttttttcttcgctgcctccttttgcttgcggttttgagctgccaagaaagtgagtaggggtttgactgtagtgtctcggctccgctcggtttctttccgaagtttaattttccggaatggctcccaaacaagggctagggaggcggagccgccggcaccggatcttcgccttttttggaaagtcccagagaaccggaattcctccccgccccgggaggctgagccgcagcctggagcagctcgctctcctgctgtggctgtgactgggtccatggcgcgccctctcccccgcgatccctgcgccccggacccaggctgcagctagggccgcgcgcccgggaccccagggatccccgccgcctgcgagctggaagtcgcgagcccggcggagtccgcgcggccgagcccgtgtatgcaaatcagccatgtgacggcaaaagccgcctggcccagccctgttcctcagtccatatatgggcagcgacgtcacgggtattgaagacctgcccataaatacttagagcaacactttccgtctaactgagcgaggagcaattgattaatagctcggcgaggggactcactgactgttataataacactacaccagcaactcctggcttcccagcagccggaacacagacaggagagagtcagtggcaaatagacatttttcttatttcttaaaaaacagcaacttgtttgctacttttatttctgttgatttttttttcttggtgtgtgtggtggttgtttttaagtgtggagggcaaaaggagataccatcccaggctcagtccaacccctctccaaaacggcttttctgacactccaggtagcgagggagttgggtctccaggttgtgcgaggagcaaatgatgaccgccaaggccgtagacaaaatcccagtaactctcagtggttttgtgcaccagctgtctgacaacatctacccggtggaggacctcgccgccacgtcggtgaccatctttcccaatgccgaactgggaggcccctttgaccagatgaacggagtggccggaggtaagccgcgtgtcttcgcaggcccggacctgcgcggcccggaggtggtggatggggtgcagtgggtgtgcgggaatcgcaggagaggattggggctccaggtggacggtgctgactgcactggctttgaagactggaagtgggtgcaggaggaacctgcgacagctgagaccagggcgcgcgggcagatgcgccaggtcgccagcaaacaggcgtgcgtgcgccccggcgcgcccagccccgggcgagcgcagggatgggggtggaagaggcgtccccccgggtttcgaggcttgcgtaggccctctggccggcagcacttcgacctcccctctcccggggcaggggcaaagtgacggtaaagttcggggctctcggggagagctgcgcgcctggagagccgagcggcggagaagcgccaggggaaagcgtcggtagctccctcctgggcagagccgaccccgggaaaatctcggagcgctcccttcttgcggcctggaggcgcgcccccacctgcccgccgcccgcgaagttgagggggttagtaaggcgggggctccggccggcggaggcagcgagtgggtggtggaggagggcgcgcaacggcgggaagcagcccccggactgccgagggaggcccgcgggggcaccggcgacgccggtttccttggcgatgctgtggaaagtcgtctctcgcggcccccgcgccttcctcgaagccgggccactggccttgggctgaggcggggacgcgcggctgtcgggaaaggcggagaagattgggagggcacggaaacctacggactccttcctctacatcccccattcgctccagcagccctcggctgaagcgcagcgggagagggagggagaaaaaggcacaaggcgccggggatggggagcagccgggaaatcacccacccccttctcgggctctcctctcggtttggcaccatcacggcactgactgggataggtcgattcttgggtggtgtttgtcttggtgcctcagccgtggaacccccaggcaaaaaagagggagaaaagctccgggcggatgaggctttttaaaatattgttgttgctattattgggtgttttttattggggactagagccacagatggctgggggtggaggggagttgggaaaagctcattctgcttttttggaggtagttcttgagttccatactgtcaatgggttgccacagttgggctggcctcttcttacagtctgtgggcctcaatttccccaccttttggactttgccacagctctacagtgctgagactctcggccttggaaatggacctatgtgagcgggggtgagaagggagtcctggctgtattttcattgttccacctccattctgcctttcccctccccagatggcatgatcaacattgacatgactggagagaagaggtcgttggatctcccatatcccagcagctttgctcccgtctctgcacctagaaaccagaccttcacttacatgggcaagttctccattgaccctcagtaccctggtgccagctgctacccagaaggcataatcaatattgtgagtgcaggcatcttgcaaggggtcacttccccagcttcaaccacagcctcatccagcgtcacctctgcctcccccaacccactggccacaggacccctgggtgtgtgcaccatgtcccagacccagcctgacctggaccacctgtactctccgccaccgcctcctcctccttattctggctgtgcaggagacctctaccaggacccttctgcgttcctgtcagcagccaccacctccacctcttcctctctggcctacccaccacctccttcctatccatcccccaagccagccacggacccaggtctcttcccaatgatcccagactatcctggattctttccatctcagtgccagagagacctacatggtacagctggcccagaccgtaagccctttccctgcccactggacaccctgcgggtgccccctccactcactccactctctacaatccgtaactttaccctggggggccccagtgctggggtgaccggaccaggggccagtggaggcagcgagggaccccggctgcctggtagcagctcagcagcagcagcagccgccgccgccgccgcctataacccacaccacctgccactgcggcccattctgaggcctcgcaagtaccccaacagacccagcaagacgccggtgcacgagaggccctacccgtgcccagcagaaggctgcgaccggcggttctcccgctctgacgagctgacacggcacatccgaatccacactgggcataagcccttccagtgtcggatctgcatgcgcaacttcagccgcagtgaccacctcaccacccatatccgcacccacaccggtgagaagcccttcgcctgtgactactgtggccgaaagtttgcccggagtgatgagaggaagcgccacaccaagatccacctgagacagaaagagcggaaaagcagtgccccctctgcatcggtgccagccccctctacagcctcctgctctgggggcgtgcagcctgggggtaccctgtgcagcagtaacagcagcagtcttggcggagggccgctcgccccttgctcctctcggacccggacaccttgagatgagactcaggctgatacaccagctcccaaaggtcccggaggccctttgtccactggagctgcacaacaaacactaccaccctttcctgtccctctctccctttgttgggcaaagggctttggtggagctagcactgccccctttccacctagaagcaggttcttcctaaaacttagcccattctagtctctcttaggtgagttgactatcaacccaaggcaaaggggaggctcagaaggaggtggtgtggggacccctggccaagagggctgaggtctgaccctgctttaaagggttgtttgactaggttttgctaccccacttccccttattttgacccatcacaggtttttgaccctggatgtcagagttgatctaagacgttttctacaataggttgggagatgctgatcccttcaagtggggacagcaaaaagacaagcaaaactgatgtgcactttatggcttgggactgatttgggggacattgtacagtgagtgaagtatagcctttatgccacactctgtggccctaaaatggtgaatcagagcatatctagttgtctcaacccttgaagcaatatgtattataaactcagagaacagaagtgcaatgtgatgggaggaacatagcaatatctgctccttttcgagttgtttgagaaatgtaggctattttttcagtgtatatccactcagattttgtgtatttttgatgtacactgttctctaaattctgaatctttgggaaaaaatgtaaagcatttatgatctcagaggttaacttatttaagggggatgtacatatattctctgaaactaggatgcatgcaattgtgttggaagtgtccttggtgccttgtgtgatgtagacaatgttacaaggtctgcatgtaaatgggttgccttattatggagaaaaaaatcactccctgagtttagtatggctgtatatttctgcctattaatatttggaattttttttagaaagtatatttttgtatgctttgttttgtgacttaaaagtgttacctttgtagtcaaatttcagataagaatgtacataatgttaccggagctgatttgtttggtcattagctcttaatagttgtgaaaaaataaatctattctaacgcaaaaccactaactgaagttcagataatggatggtttgtgactatagtgtaaataaatacttttcaacaatatttttgttgcagaaatcatttctgaaatacttactgggtgggaattaaacagtcattcagtctctgtgggaatattttttaaaaacagcactaagcaccagtgaaaatgctttgaccaaaccatggtctccagatcttctttgctagcctgtggacaccaaccccaaagcaggctccattcataatcaaacactagtgttctggggatttcccccatgcattagtgtaaaagtggggaggcgttgttttgactcattgttccgttgtctctaacagcctatagcttctctctgctcctgagtgggctccggaaaataaatacttacaaacaagtgcccactcggagacaacacatttacagtcgctttcagaaccctgaccagggtctagaactcagacgagatgtggctttgtggaaagtgtggtggcgtggtcaagctggaaatgactttcagcttccaggattagtctcatgaccacagaaaactttttgaaaagcactatcatctcttcagatcgaaaatgcccccagacgctgctgatgacagcatgaatgggttgtcaaaggaattaccccaggactcatttctctccaaccttcacttcccaattgattacccctatttgatagaatcattgatctgccaaaggtttggtgggtctagaagtgacgatcaaagtactcagctcattagataagataggtgcctcaagaaaatctcaaagataacctaaactaaataggccaatatagtcctccatggtactggataaaggtttgcaaagaatatactgtagggttcatttcactgcaagtcttttgtagtggttttaaaatataaattcaccaaaaattagttaatttagccacaaagtaaacagacgatgcctttgtgaagttatcatctttactgtaaaatctgggcctaaaaatcatttaagttcacccacttctggatccttacacaaatgtaacatgttgctgcagcgtccactgtttagctgacatctgaaaatccctttgactatttgcccttcagcactgttaagactccctcagactcaacctgtatttcagaataacagatgattacagctactctggaaaccaccttttgcccttaccagcactagaatttgagatccaatttgtggagggaatgaatgcctttcttctgtatctcttctccatccctatttcaaggatgtcgaatctctctattctattactacgaaacaagagttttcagaacttgtttcatatttttttagtgactggtgttttcccattagttcctatttcccagcttgttggcgtaatatcatccttgcttgtccaactttggtaagtataagacaatgccacattttgataattacgtgattttaaagaatacttccctcctaccaagatttcattatattaaaatatacccaaattttgtaagatatatttgtcttgccaaattctaattttagaggattttcaatcaagataatcttaacaattacttacgaagcagtagactaaaagtcatctcaaaaataaaatagaagatattttgatgacagcaaaattggttacataatcactttcaccctgacgtgggcttggtgaggtagcattaacacacataccataaggaacaccacatctcagcattttctcagagccaactttgtggcttttactagtagatttcaacatgtgaggtcagtatctttaatccgattttgctctctgcttaaaatgttcagggtgcttcttgcacgtctcattttttacattgctcaagaaataaagcatagaaaaatgtcttcttctaatcttgtacatacacttttggagaagaattccttaaagattcgtagtgcttttgagatatttcaattcatattaaaaatgggttgataatacctacacaaggcttacaagttttcataaacctggctatttaatttcattatcccagctgctaataagattaaggcaaattgtttcatatatattaaaaatggctgcagtgacattttaaccacttaataaccacttttgtgtgtgtgtgtcggtggggggggggcagggggaagagcggtcagcattaacacaagtcccaaaaatgctgccagcagaagctaaaactaaacaaatactacaggaaaacaaaacaaaaaataaggaaagaaaataagtcctaaaactctttccttccagaatgaaagtatttttgttttcttgtatagtactatcttattttccttaggttaaatacaaagtaagcttttttctgttacagcaaaatagtccaattagacattagcttcagatgtgttttccttcaggctgtttcaaagctcactctcaaggaaataaactatttttaagtgtatattacttgggctttagaaatctgcagaaggccactagattttagtacaacataatcttacagtatatactgtgaacctttcatggtaatcaaactgtagacatcagagcaggtaaggttttccctatctgtcttgcaataatcaagtaagaattatctctaaacaatttgaaacatgtcttcattttccataagtacactgatttttttttcctttcttttttgagatgcagtcttgctcttgtcacccaggctggagtgcagtggcatgatcttggctaactgcaacctccacctcccggattcaagcgattctcctgcctcagccttctaggtagctgggattacaggcgcccactaccatgcccgactaatttttgtacttttagtagagatggggtttcgccatgttggccaggccggtctcgaactcctgacctcaggtgatctgcctgcctcagcctcccaaagtgctgggattacaggtacactgattttaatccagaaatgtaaacatccccagatttgggtttgaagattcaatatctataagggacttgacaaatggtttccttctttgacaacagatgcctcattgcaatggaagtgatcagtgattggcttctgtatatacgcttaagttatttagacctgcaattacaaaagtagcactgctctcaggttagagttggaaagcaagaggcaagccctgaattaaagatatattgcttcttcactgggctgtagagctagagcacaagattcagaatcagtaacagatgagtaatggcagagtcctcccgagatgccaggactgaggcacctagaaggagacaaggaaaagggggaataaaaggtgtggattttggaagaagttcagggttactggtgttaaaagctcagaaaaccctctcctgttgccaaaacacatattacttaaaaagcaggctaccactttcattaataaatagcagttggtgtaaatgcaacccattcaaatcaggcttagtaaaaatcaattctcataaaatagtaagtaggtacacaatactctgcattgatataactggccagtgacagaaccagatactttaaaagcttcagaagcatttagacagacaatttctcacccatgaggcaattattgcatttattattcaccataaaagtgattaatatcattgtgctcattagtctttccaaggggaagataacttttatcccacagttgttattaaaacattatctatattggacggagtatatagaaacacaatagcaacacaccaagtcagtcacgactaacagtttatgcacacaggtgcaagatagtttctgcaccacattttgtctttgtaataagcatattctttcctcagtggctcactaaaacaagttatattttgtcttcaccactaatttactcagaatttattagtgaaccaaaagtttcactgttcttattgaactaaatctgagatatcatattgctgttttggcctgcaacaatttcagttactcttttgaaaagcaccttaggttttttcttccaaattgctcgtaattgaaaactttaaaacttctttttttcataatgaagtcataattcttcctttattactatcctacagccaggatgagttttcgtagctttaatgtactaagttgtattataacacatacattgctattaataatcttggtaagctaatcaactttttgctacaatataatccaaaaaagtatgtgattgataaccacattcattactgtgctatggaaaaaaaaacaagatcttttattttgtgaagttttctaagaaaatcatttgcatatctagaattttattttcaaactaagtggcatgaagaactgcttcaaactgcccccaaaggcattttaaactacaccagaatgtggagctacaataaaacaattttagcaacaatgcaggaaatacttggtactatgcctgtgtcaggttttataataaagtggcatgtcctgtggaatatctttttgtgttttgttttggttttatttttaaatcactcaccaagtatttgcttttttatactatcttaaaaactgggaacaaatactccctcaccctgggtctctgtgtgcataaagaggcaaaggcacgtactgtttctctacatacggggtcaacattccactaataatagcaaatctccctttattatagatattagaactctattgccacttgggcaagtcaatcaagagggcttagacgacagctgggcaaattttaatgtgtttatttctacaatttctttttattaaaagtcttgtgaaaaaacggaatcctataaatagtaaaaagggagaaacagtgctccatggcctgaagcaaatggtgtcaatacatgtgtaaacaaggtaagactgctcggactattaaaagcacaaaaataaaactagtcacagatagcaagacttcatttcaggagttgggagtgggaagtaggaagtgtttaatcccaagttttggtgccctaaaatggctagtagtatagttaattctcaattctctagctgtgatcttctgtgccttctatctcttcctaaggaaaaccacattagatgaacccagggctcagtcattttagggagagggttgagacaacactgccagcaacacagctggaatcacccgagtcgggaacattaaagttcctgagagaatatgaaacaactatcaacataatatttctccctacttttacagtaaaatattggaagtaaataaatatagggaatgcaacaactggctaggagtgttttacattcagttgtttggaagcataacacattcagctcctttgaatcttcccgttagaaaatacagaattactctatcaccttttaaggtacagtaagacaagaaaaaaagtcatgtgaggataatacagtctttgcattaaaggtgaatctgcaacatgaaatctgctcgactcacagatctggagattcatagggaagataagctctaagtgaccatgtcacagagatatgcaggtgctgaatttcttagtagatgctgcctgagtaaaccagatgtggctactgggcaaagggagaaaagaaaataaatcttgtcctctacatgcatagttatgttgtgagaatgatccccaaactgaaaaaatcatttagttttcacaaggaattaattaggcaggccagctcactttaaacagtagctcatctccttaaacctagtttttaccaatgacttgaactaaaaacaattcaaaccactgggtcatgcacagtcaataagttaaaaaactataagaaaaaaaggcataagggcatgagtggaaaataaaccctatttaactaaggggtagggagtgggagcaagaaaaccacttagtattttgtatagaatggggaagagaggaagatattttcattatggctttaggatggaagcgcttcagatagtcccctgccccattcctccaaatcaaagccccagtggcagtgacagtaccaggaaacaatctagcctccccgcccaccccgcccccataaccgtgcccggcggctgctgtccagtcgcccgtgcttcccaaggctgccgaggaagcggctgctgctcattccagtagatccaacgcccaggctagggggtagagacacagcccttgtggtagggtagggcacgtcttcggcccaccgctcctgggcgccagtggcttcaagggaagaccttgggacctggatagggttctccctcgcaccagaagtcatcggcctgtggggtctccaggagccacacctctcgaggcaggtcacaggccgagctggaggcctccttgggcctgaccggctccagcacccggtaatagtggcagtcccggccatcgtccgggtcgtagggcggggccaggatgtccaggaaggcggcaggcccttccacggcgtcgatctggtgcaggttgtcccggtgcggtgtgaggatgcaggggccgctggcctcggtgtactcggcccgcgaacgcagcacgcccggccgcacggcttctcgctcccggggctgcagcggcggctcgaactgctgctcgggcggcaaggcccgcggccgttgcccgccgcccgcgtctagcttgtccatgcagctgatgcgcacggtgccgtacagcaccttgagcatgccgtgcatgcccgggtggtcgtgcagcgggatggacgtgccgctcttgagcaggaacacgcccaggctgaagccgtccgtctcgtagatgtgcatgtaggtgactggcggcaggttgggcggcagcggctgcagtgtggccttgcgcggggcgatgttcaagtcctcggcgcggagctgggtcaggaggctcttcagcttgctcaggttctcggggaagcccggctgcatcggcgcctccgggccagaagccgcgtcgcgatcggaagcgccgcggccgcccccgctgccccggaaggtgaggcaagcctggcgggcgatccgttggatcaaggaggccatgttgtctcggggcatggtcggctgctcctctgcgtgccgggaccggccccctcctttcctccgccccttgcggtccccggcggccgccacggctgcccccagcccgggtcgaggcgggaggccccgcaaccaccggcccgtcgggcgcgcggcaccgccgccaacctcagcagccacgcgcccgcaactgcccggcgcgctcgccttgagccccctctgagcgcgcacgcgcacgccccacaccccgcactcacgctccgggagcagatagcggccgcgcagacggtgccaggctttgccttacgcccggcgctccattcatgcggcccgcacctacgacggtggccgggcgcccggggaccctgcggagcatgccgggacttgtagtccggccttccgcttgagctctgagatagttcagtttgttgattggaaaatagaggaactattacacatgttgggcataaagcgatctttttcaggatgcagaggtgtttttcttgttttagaaaagatgaatcggggtggaagattagtagccacttgactacaactcccggcactccccgcagggtggagtgacgcacttccgtcagctggcccccggagtagtggaggctcttggccttcataaggaaaggggcagggagggtcgttaaccttctggcgccgcgctggggcctggttagccatgcagggtcgccttcctttggccttgcccctgggaaggaggctgttgagtcagccttagctcctcgtagcggcctaggcagcactgtctcccacgggaattgcaggagggcgcttttataattttgtgtttcctaggaggggagggggtccaggccgtcctctgtgatcatcaaggttactcggcccagctgggcccagctgggcccagctgttgtttgcatcaggacctgatgacgctgctcttctggttacagagcagtatagctttttgctggagagacttgagaggccatttacagtggtcgtggattctgaacatactagtggttatcaaatcttggtttgcctgagaagggggagcgggcttttataaatgcagattccctgtcgtcacccagagatggagttactagatggttctgaggcatcctaggagaaatagtggtgtgcaacagtcagttcagtcagtaattgtgaaattgtttcactacacagaggcatccttctccttggcgtgaactaacttttggcataagtaaatgactagaaaagcaagacattagatactatgactttaaacttaaccctgagtttaaagtctttttggattccaaagctgaacatgggtttcttgtacattttgtaattggagtggttcagtgaatcctctccagttaaaataggcatactttttaaagtggattacataacctggctaatgagtactcacaatatgccaggcactgtgttaagtgcattatataatgaatgttatactatttaatccttgcagcaactcttaagaggcaggcactattattattcccagattgcagatgagggaataagttgtaggatagtgaatactaagtacccagcaaagcatgagcagcagagcagaaataagtacagtcttaccaaaaacagcagcttgaattggtgtaaaagcaccaaacgagagtcaggatattgttgttccagcctactgtgtgtacttacaagctgtgtgtcgttaggcaaatcctacccttttagggcctcaatttattcatttgtagaatgccggtgttaagggaacaaaagttctgaaccctactcatcagaaccccctggagagcttaaaaaataaagatcttggggtcacacctcagagattttgattcagaagaactggagtgaagcctatttttttgtgtgtggtttttttttgtttgtttgtttgtttgttttgaggggtaacaaggtttatcgtgaagagcgaaataacaaagcttccacagcttggaaggggaccacagcgggttgcccctatgatttatatttaagatgcttcctcaagcaattattattattatttttttttttgagacggagtctgggtctgttgcccaggcgggagtgcactggtgcgatctcggctcactgcaagctccgcctcccgggttcacgccattctcctgcctcagcctccggagtagctgggactacagatgcccgccatcacacccgcctaatttttttttctgtatatttagtagagacggggtttcaccatgttagccagaatggtctcgatctcctgagctcgtgatccgcccccctcggcctcccaaagtgctgggattacaggcgtgagccacggcgctcgtccaagcgattcttgatcattagctcagtttgagaaccactggtagagctgtaaatagtgaaccagctttcattagttaagagggtggttatttgctttaggaaaggattgttaagactgattcatttttagaggttgccatgccattgttacgttatttaaatgtactttcaaagctgataaataaatttcatacagtctttttctaaagtgagaagtatttgagagtaaaattcttccccttcctttatttacaaatatggacttttatttattggttttacttctattagggtataattagtggtaagtatagactccatggaacacagactatattaacatgcagatctcttgcacttaatggttgtccacacttacttaactgaagctcaaaattttcatctataaaatgggataatatacctgtgtaaatcactgatgacactatgtagaacatagtagctgccccatgacagtagctattataggtttaaaatggctataagttgtacttaaagaccaatgaatttaaataatactaagcaagtattgaaatggaatttgacttgttttgagaatcagcttcagggtagagataaaaaagattattgcttaaaccatttacctggtaatttgctagtcatcctttggcctgagttcaaagtttccgaagactgcctgtatcagaatcacttgggagtgtctgtcaaaagtgcagattcccagatcacgtc

SEQ ID NO: 1364 - DNA, 2984 bp, Homo sapiens
taactgagcgaggagcaattgattaatagctcggcgaggggactcactgactgttataataacactacaccagcaactcctggcttcccagcagccggaacacagacaggagagagtcagtggcaaatagacatttttcttatttcttaaaaaacagcaacttgtttgctacttttatttctgttgatttttttttcttggtgtgtgtggtggttgtttttaagtgtggagggcaaaaggagataccatcccaggctcagtccaacccctctccaaaacggcttttctgacactccaggtagcgagggagttgggtctccaggttgtgcgaggagcaaatgatgaccgccaaggccgtagacaaaatcccagtaactctcagtggttttgtgcaccagctgtctgacaacatctacccggtggaggacctcgccgccacgtcggtgaccatctttcccaatgccgaactgggaggcccctttgaccagatgaacggagtggccggagatggcatgatcaacattgacatgactggagagaagaggtcgttggatctcccatatcccagcagctttgctcccgtctctgcacctagaaaccagaccttcacttacatgggcaagttctccattgaccctcagtaccctggtgccagctgctacccagaaggcataatcaatattgtgagtgcaggcatcttgcaaggggtcacttccccagcttcaaccacagcctcatccagcgtcacctctgcctcccccaacccactggccacaggacccctgggtgtgtgcaccatgtcccagacccagcctgacctggaccacctgtactctccgccaccgcctcctcctccttattctggctgtgcaggagacctctaccaggacccttctgcgttcctgtcagcagccaccacctccacctcttcctctctggcctacccaccacctccttcctatccatcccccaagccagccacggacccaggtctcttcccaatgatcccagactatcctggattctttccatctcagtgccagagagacctacatggtacagctggcccagaccgtaagccctttccctgcccactggacaccctgcgggtgccccctccactcactccactctctacaatccgtaactttaccctggggggccccagtgctggggtgaccggaccaggggccagtggaggcagcgagggaccccggctgcctggtagcagctcagcagcagcagcagccgccgccgccgccgcctataacccacaccacctgccactgcggcccattctgaggcctcgcaagtaccccaacagacccagcaagacgccggtgcacgagaggccctacccgtgcccagcagaaggctgcgaccggcggttctcccgctctgacgagctgacacggcacatccgaatccacactgggcataagcccttccagtgtcggatctgcatgcgcaacttcagccgcagtgaccacctcaccacccatatccgcacccacaccggtgagaagcccttcgcctgtgactactgtggccgaaagtttgcccggagtgatgagaggaagcgccacaccaagatccacctgagacagaaagagcggaaaagcagtgccccctctgcatcggtgccagccccctctacagcctcctgctctgggggcgtgcagcctgggggtaccctgtgcagcagtaacagcagcagtcttggcggagggccgctcgccccttgctcctctcggacccggacaccttgagatgagactcaggctgatacaccagctcccaaaggtcccggaggccctttgtccactggagctgcacaacaaacactaccaccctttcctgtccctctctccctttgttgggcaaagggctttggtggagctagcactgccccctttccacctagaagcaggttcttcctaaaacttagcccattctagtctctcttaggtgagttgactatcaacccaaggcaaaggggaggctcagaaggaggtggtgtggggatcccctggccaagagggctgaggtctgaccctgctttaaagggttgtttgactaggttttgctaccccacttccccttattttgacccatcacaggtttttgaccctggatgtcagagttgatctaagacgttttctacaataggttgggagatgctgatcccttcaagtggggacagcaaaaagacaagcaaaactgatgtgcactttatggcttgggactgatttgggggacattgtacagtgagtgaagtatagcctttatgccacactctgtggccctaaaatggtgaatcagagcatatctagttgtctcaacccttgaagcaatatgtattatatactcagagaacagaagtgcaatgtgatgggaggaacgtagcaatatctgctccttttcgagttgtttgagaaatgtaggctattttttcagtgtatatccactcagattttgtgtatttttgatgtacccacactgttctctaaattctgaatctttgggaaaaaatgtaaagcatttatgatctcagaggttaacttatttaagggggatgtacatattctctgaaactaggatgcatgcaattgtgttggaagtgtccttggtcgccttgtgtgatgtagacaaatgttacaaggctgcatgtaaatgggttgccttattatggagaaaaaaatcactccctgagtttagtatggctgtatatttatgcctattaatatttggaattttttttagaaagtatatttttgtatgctttgttttgtgacttaaaagtgttacctttgtagtcaaatttcagataagaatgtacataatgttaccggagctgatttgtttggtcattagctcttaatagttgtgaaaaaataaatctattctaacgcaaaaccactaactgaagttcagatataatggatggtttgtgactatagtgtaaataaatacttttcaacaat

SEQ ID NO: 1365 - DNA, 1431 bp, Homo sapiens
atgatgaccgccaaggccgtagacaaaatcccagtaactctcagtggttttgtgcaccagctgtctgacaacatctacccggtggaggacctcgccgccacgtcggtgaccatctttcccaatgccgaactgggaggcccctttgaccagatgaacggagtggccggagatggcatgatcaacattgacatgactggagagaagaggtcgttggatctcccatatcccagcagctttgctcccgtctctgcacctagaaaccagaccttcacttacatgggcaagttctccattgaccctcagtaccctggtgccagctgctacccagaaggcataatcaatattgtgagtgcaggcatcttgcaaggggtcacttccccagcttcaaccacagcctcatccagcgtcacctctgcctcccccaacccactggccacaggacccctgggtgtgtgcaccatgtcccagacccagcctgacctggaccacctgtactctccgccaccgcctcctcctccttattctggctgtgcaggagacctctaccaggacccttctgcgttcctgtcagcagccaccacctccacctcttcctctctggcctacccaccacctccttcctatccatcccccaagccagccacggacccaggtctcttcccaatgatcccagactatcctggattctttccatctcagtgccagagagacctacatggtacagctggcccagaccgtaagccctttccctgcccactggacaccctgcgggtgccccctccactcactccactctctacaatccgtaactttaccctggggggccccagtgctggggtgaccggaccaggggccagtggaggcagcgagggaccccggctgcctggtagcagctcagcagcagcagcagccgccgccgccgccgcctataacccacaccacctgccactgcggcccattctgaggcctcgcaagtaccccaacagacccagcaagacgccggtgcacgagaggccctacccgtgcccagcagaaggctgcgaccggcggttctcccgctctgacgagctgacacggcacatccgaatccacactgggcataagcccttccagtgtcggatctgcatgcgcaacttcagccgcagtgaccacctcaccacccatatccgcacccacaccggtgagaagcccttcgcctgtgactactgtggccgaaagtttgcccggagtgatgagaggaagcgccacaccaagatccacctgagacagaaagagcggaaaagcagtgccccctctgcatcggtgccagccccctctacagcctcctgctctgggggcgtgcagcctgggggtaccctgtgcagcagtaacagcagcagtcttggcggagggccgctcgccccttgctcctctcggacccggacaccttga

SEQ ID NO: 1366 - DNA, 96600 bp, Mus musculus
  misc_feature (7789)..(7808): n = a, g, c, or t.
  misc_feature (9978)..(9997): n = a, g, c, or t.
  misc_feature (14125)..(14144): n = a, g, c, or t.
  misc_feature (20780)..(20799): n = a, g, c, or t.
  misc_feature (27797)..(27816): n = a, g, c, or t.
  misc_feature (31149)..(31168): n = a, g, c, or t.
  misc_feature (33786)..(33805): n = a, g, c, or t.
  misc_feature (34873)..(34892): n = a, g, c, or t.
  misc_feature (45961)..(45980): n = a, g, c, or t.
  misc_feature (50121)..(50140): n = a, g, c, or t.
  misc_feature (53877)..(53896): n = a, g, c, or t.
  misc_feature (55271)..(55290): n = a, g, c, or t.
  misc_feature (57012)..(57031): n = a, g, c, or t.
  misc_feature (60915)..(60934): n = a, g, c, or t.
  misc_feature (63387)..(63406): n = a, g, c, or t.
atgcaaaggaaaggaatgtcagaatttgaaggaattccttgaaaaggaaccccatgtctgtgattacagctctcagcagatggaggcaggaggctcgggacttcaagactagcctctgctacagatagaactagagttcagctgtggctacatgacatcctgtccaaaaccccaaaataaaaacaacaagttagccgggcgtggtggcgcacgcctttaatcccagcactcgggaggcagaggcaggcagatttctgagttcgaggccagcctggtgtacaaagtgagttccaggacagccagggctatacagagaaaccctgtctcgaaaaaacaaaaacaaaaacaaaacaaaaaaccaacaaaaaaaccaacaagttatatgttataacttggatgaagtttgatttaagagtattatgcgaagtgcaatatgctagtcgcatataacagcagcacataataccatagaacccagtgaatgcagccatcttagcacataagtggatactacgatgcttgtacaagaacaaaattgcctaatgtggtggtttgaataggtttggctcctagagactcttgagtgtgagtgcttgactatagagagtggcactgttaggagttgtggccttgtggagatgggttttgagacctcatagaagctcaagtctgaccagtgtgacacaatccctttctgctgcctgtggatcaagacgtaaaactccgagttcctgctgcagcaccatgtctgcctagaggctgtcatgcttcctgccatgatgataattgactgaacctctgaaactgtaagccagcactgttgcgggaaatatctagagctagcccctgcaccagacgatctaatttgctgggtctctcagcgcagcaattcaccagccctgccacatgtctcccaccaggccatctctccaatggggccccgaagctcctctcaatttcacgaaatgccccacacatccctggttagccatttcaacacctagttaccagatagaatcaagactcttaatgtttaattagccaatcagatatatgtatcagtaataacacaatttataagatgccaatacaataatttcagagccaaatgataatgataaagctttaacacaattgttctagccttttgataacaccttgtcagcctccattctgttctcctcagatctctctttgtctctgtctctgtctgcctctctctctctctctctctctctctctctctccttaactccttcatccacctcccttctcctgtccaatcacaagcctcccactgccctaatgtgattggacagggaagaatcctgcaacacagccccaattaaatgtttttctttataaaaagttttcttggtcatggtgtttctttacagtaatgaaacccactagctaagacacctaacgatacatttcacaaaacatctcagggctcagccatgggtaagcacacttggtagccacacaaacatggtaacctgagttcaattcctggagctccactcgcttccaccaaaagaaagtggaagttgtcctctgactctccgacttttatccgtgttccgtgtcatgtgcatgctcacatacatcatgtacagaggctagtaattataaagggggaactctttgagacatggtctcacagtatagtcctgactggcctggaacttgctatatagaccagtctgaccttgaattcacagaaatctgcctctccttgcctccctaaaggattataggtgtgcaccccccccatacctgatccataaatgttaggtgatatatgtctctactgtatgatgtcaaagaaatgatatctataataaaaaaattcataggagtgggaagaatggtaactgccaggatgaaggaacagagaatgggagtttctaacagtatggagttttagttctgcaatatggagttttgcactttcattgggcccagtggcccatgcttgtacacctagcaaccaggaagttgatgcaggaggattgtgagttctaggtcagtctgagctacaaagtgaaaccctaaaaacacagttctatatattgattatataataatgtgaatatactcattgaaagtggctaagacagggctaggatgtagctcagttagtgtctgcctcacaggcatgacacccttggtttgatcctcagcacttcataaactggaaatggtgatgcccgtctgtaatggcagcattctgagacagagacaggagaatccgtaaattctttttttttttttttcttttttcttttttttgagacagggtttctctgtgtagccctggctgtcctggaactcactttgtagaccaggctggcctcaaactcagaaatccgcctgcctctgcctcccgagtgctgggattaaaggcatgcgccactgtgcccggatgaatctgtaagttctaagtcatgcttagctctatatcaggttgacgagcacactggacagcatgagttcgtaccgagaaacaagaaaccaacatccccaaataaaatagaaaaccacaggatatccagttagctgtcagtaacatttgaatgataaggctgtgtagctgaatcacgtaagtgatgcaatcatatgtaatgactgtacatctgcacttttgaaagtcagactttctaacaatatctgtgcatgtgcattgtggtagcagaactcaacacttatcacttacatctcctactctcaaatttttcatgcttaaatttgaaaataaccacccccctaatacatttaaaatgacttgagataaaataaggtgaaatgtcacttcagggctagaaagatagtccagtgggtgaaaggcttgctgccccagcttgacggccttagaaattcaaaggaataaagtactcgtgagtgtgttggatgacaactgtccctaccctggcacgctatggagcctgcaaatcattactgacagaaatcaaagttgaagttatggcttagtgcagagtatttgctgaaggaggttaagaagaagcacgttggaagtagtaatgttcaattcccagcaccatgataaggaataaatagcttctggaaatggaaagatagtctgtgttaagagggcaatctgtagtaacacaagcctataggcaaacaatcgaaacaaaagaatctcttgaaagaacgactttgggacactttggtgaaatcggaacaaagtggtcatctagttgatactctatcaatatcagctttgcaaatttaagatttttactctttacttaaataaacccaactctggtgtgacagctgtaatcccagcacttggcaggggctggcaggaagatcaaaaagtcactgtcatctttaactacatcatgattttgagatcagcctggacttcatgagacacccttctcccaccacataaagaaaataataatggccgggcatgctggaacacgcctttaatcccagcacttgggaggcagaggcaggcagatttctgagttagaggccagcctggtctacaaagtgagttccaggacagccagggctatacagagaaaccctgtctcgaaaaaccaaaccaaccaaccaaccaaccaaccaaacaaacaaacaaaaaaaaaccaaccaaccaaccaaccaaccaaccaaaaaacaaaaaacaaaaaacaaaaaacaaaaaacaaaaaaaaaaaaaaaagaaagaaagaaagaaagagaaaagaaaataataatgatgacaaaaatcccttataggctggtatagcctctctctctctctctctctctctctcacacacacacacacacacacacacacacaaatgaacacacacacacacacacacacacacacacacacacactttgttatttaaaagaaaaattggtctatgttctttcactcgtcatggcttagaattagtttgttgtattcaatcaaaaacagtattgggaatttggttaaaattgctttgatctgtgcgatcagtttgaggatctattatgatgtgaatcaaatggagagaagatttttgcaaaaagttgaaccccgtggggattctaacaaatagaaagtgggaagaaaaatcttgaccgtttgatcatttcttataattgtatctaccctgcttcctaccacgtttgcaaagtgggaggagagaggacaacagagaggatgaacactaactggtaggcatccagtgctcttctcaatccgggttttctctggtatgtttcctgaggacacactatttgaaacaggggaattgaaggtgagggttgaggggaaaaaaaaagattcaaagaatgcagttgaatatgcgtcaggaggctataaatgttaattgttgaagttgctgttcctaatgcctgtgagaccctgaagttcaaggacaggaattctgcatggggactggggactgtagagacgcgatatttaagctttagggtggggttgggggaaactcggtgagagttcctaaatgccaggggttttgaggtgtgacagtgctgcacggattggagaagaagttacaggtattccaaacacttggaacaaacaacacgtgcatgggtgtgatggaggccagatgtatttggaccgataagtagaggtgtgattgtgcaaaaccatgagtaccaggttaaggaccttggagtttgtcctgcgaagccagtggatctggaacagaaaagcagaacccacaccggctttaagattactgtggctgcgatggaggaaagcaggtggtcctgtcctggccagccgagccaccctttcacctgcagtgagcgcggtcccggcctggcgtcctccccgccccttcccttgacgctccaggtcggatgagctcggaactccgctacaatgcctgggcgctcttgctttgggatgcgacgagggagtacagacgcgcccccgtgcgtcacctccgttctggcagtgaggctgcctagcaccgtggagtggcgccaaggcgagcgtctgcgcttgcgccgccagtcggaggccctctgcgcgagaaggacgcgtttgtgcctggcgttgctatctgctgttctgggtgtttgcttttgtcctaagagatgtaggcagacagtttgcaaaggctcgatggctccacgacttcccctcttgctactccgctaggaagcaatttcccttgagccacttgctttcagtctgcagccagaatttcacactggtgaaaacctaacctggccgacaatccatgttcccagggcttgctccctttgtacttcaatcagagtcctagtgcaaggggatcttggagttcagttaccttaatgctctctggtatcttgaagtgagcttatgtagattttgctcgcacagtcccaaagatcaccaattttccagcgatagctttatggaatatttgtttgtttattttgagaaagggtttcactatgtagctcttgactgtccaggaactcactatgtagaccaggctggcctcgaactcctctgtcccaaatgctgggactaaagacttgtactactacacctggcaactctatgtattcttactgcacgtttcctctatgcaactttgatgccattaaaagcagtgcttcctgctgtgcatacgtaataaatcctgggatatgtaatgagctacatacataaaatgttgattttttttttttttttttttgcatttacattctagtgaggggagttcacaaatagatgtttgagtgcttggaaagagttatacaggatggtagttaattagactgatcagaagaggcttcttggagattttgatgtttagaactagccatgtgaacacctaggcactccagactgggaggagcggtgctttctgggaatacacaggctagagttgactagagtgtgatgaaccatgattgacagttgtgagaaaaccttatgttttaagtaagtgccagattggtaactttgtgtagaactttgaagtgtgtgttcttttagattttgagatagcatttcatgcagccctggctggattggaacctaccacacagctgagattggccttgctcctctgcatctacctctctcctgagggctgggattagcggctgcatcacttctcgcagcttgaaatgtgttttaataacgagaagccaaggaatagttttctataatagttgatttggttcagtcacttaagaccacacaaaccagttgttgaaaataactgatatatcagttgttctctgaaattccttttctaagtccttcctaagctataattcctctgcctttctctttaaaaaattatatttatcttgtgtgtggtgcacctgccattggccatgtgtagagatcagacgaacttctgggagtcagtttttctgctcccagcgtttgggtatctaagacagaacttgggttcccagtcttggctgcacctgctctttcctggctgagccctcccaccagcaggtctgctgttgtcttactactctgatggttaatggatggacttcaaactattactgaacacgttcaaaatgagggggacttctttttttttaagatgcaaatctgtacatgtattataaaaggaaaggcttgtagatttcattcagatcctaagaggtagtctaaaagatggtggtttcaaacatttttcatctgtgagatcttgtttattgtactacaaaacagcatggttcttccaactgtcttctcatctatgaaatgaaaactgaaaactaagacgttttactaagaaagcgttcaatgatagagcacatgtgccacagcgttgcacagtgccactacaggaagcaagtccatccttaggatggacggacaattcatagatactgcttttatagcattctgtgattttcatatctctatcctgggtcctgtaccaaggcgaggtgagggctggggggaaatccctcccttccagaagctaattatccagttgaagctatgaaagatcccaagcaggatggactaaatccataaataaaagcttgtgggtttgaatagacacatgatcaataaatactacacgtatgcgttacgtcctcatggcatggaaaggcagatggaaacaggcaatctctcctcccactagacaaacactgagcagtcgggccttttgttttttttttttttttgttttgttttgttttgtttttgtgagagggatctatcttttgtgcaatctgtttagtatacagtgcatgctcggggcactccttatcttcgtgctgggaacaaagtacacacaccccttttctgaaacacagggcctaggatctcctagagctggatgggctcccgggctgtgggaccacacaaaaggggcgcttcgcctgctcgcaggcccccacacccaggttctcgggtcgcgggttcgccttcagggtccttcagccccgcctctgcgagtgccctccccagcctctggcgcgcacccctcctcatccgcgggcagccggaaaacccggagcgaaccggcccgggccagcggcgcatgctcagttgcgagcaggttcagtttgctagtaggaagctccggcgctacaccggcggcggcagcggcagcggtagcagcagcggcggcgacggccaagcggccggattccccggcagcgacctcgggccctccccgttccccaccgacccctgctcccgcttcgtcccgttctgggcctctcgcttgagttccccgctggcgagcgggcgccaccggccggagcgtccatccacgcgccgtctctcggcgggccaggccgtgccggggagcgnnnnnnnnnnnnnnnnnnnncagaggcaggcagcatctttgtgagtttgaagctagtagtggtctgcataatgagctacaaaacagccaaagctacaaagtgagaccctatcttgaaaacaaacaatcatgcaaacaacatcaacaaggaatctcacagtctcagttttacatccaactttgtttgtatatttttacgtttggcttttctactggggactacaatctgttttagttaattcttgtacacgaagtgagctggtggtcccacttcagaccttttcatgaggagatagagttgtcccagcaagtgatggaaagcgtctcttcctcatgtgttgtcttgtcatcctttctgaaattcagctgagcgtaaatgcaaaggcttccttctgggctcccagttctgttgctttgttccatccatctagctttctgtcaacactgtgtgcctcccttcctgagagcctctggggcgagagaaggaattgccatgcttcattgtcctgcttcttcattggctggagccatcctgggttcaggactgaggtagcttgagaaagagctctgagccaaagcacacaaggtatacaatgtgaggatcaaacttggatttgaacttttaatgtctgaagatattttgagtactgaccttgcctgtcaagcacaacattgaaattgacaaatttgtagagggtagagaatgaaatcaaaacaaacaaacaacaacaaaatcagaaaaggggagatgagaaggatgctgggcaagcaagcccataattataattttgaacccttgtggtttcaagctagtctctattctgtttcatagttcctgaagcagcctgagaaacttcccattgcaatgtcaatcaatacaactgactagtccatccttgatagtgaggtattagtgattaattgtatgtgaagtgtttttaccttcagaatctacatctcgtttaagaaaactgggtgtattcaaggaaaacaaagcatagtgtatactccactgtgttataaatggtgctagatatgtttaaagggggaaagaaaggagcataagttaggatatttaagttatatttcaaggataaataagggtttagataatcaaagatggaaagagggtattgggttgtgtggacagacaggtaggcaaggagaactgaggccaagggggaatccagcttagctccagggtgagtgccaggactgcagagagaccttctgtggtagacttaggcatggctctgtttgaagaacgcctccctcctccctcaatgatccttgatgaaggagaaagtccttgtttgtccaaactgttgattcatgatggaagaaggatgcatacaacttactcagggtgaaccagagattaaatacctcttggaggaagggatgcccaggaagggaaactcattagcttgcgactctaggcctatctagacacctcattagcattagatacctctaggctctaagctatgtgaccatgactggatgtcatggtcctcttagtggggtgtcatcgtcatgtactccaggacagaaacctggtttggagtagattcaaatgcctgctattcttaattatgagaattgctggagttccttaatctgctccaccttgcctgttcttggtctggtggcatggtttcacttgccccacagagtgcaattgtacttggggtctcccaagcacatgagtaggttttataagaagacctgttaaggagtgatctcaagattttgggggctaaaccaagtaagtttgtagatgagcagcctgttttgttttctttaggcagaagcagactactgagaactttccatttggggaaagtattcccatgttagtctaggcattcagagtagcaaaggtgactgattctactttctcaccaaaatgaataccaaggctacctttgaatgcgttttgtttgccttagctgcctgacaaagttcatagacactggaaagaagcaccaatggaagtttccatagctatgtacttagctaacctcagatcaggagtatttaaaaaaataaaataaataaaaatccacagtctgagcttgcctcttagcaggtccttgctccaggaaagctgctctatttcttcattgtctctcaagcacatgatttctttacctatctccctgttcacatttacatgtagaccatgtannnnnnnnnnnnnnnnnnnncaggcgcagcagctgccttacgagtttttcagcgaggagaacgcgcccaagtggcgggggctgctggtgcctgcgctgaaaaaggtaggggcgcggaacccgcttcccggccgcagtccgcgcggggctgggcgagggtggggaggcggggcgccactgtcgtctttcttcccggtctcggatctcggggaggtctgctcgggctgcgaggttccccgcgtccgctgctccagctgttgacactcgcccggggtgcgtgggaaggccgcacacagtcggggagggttggtctggatcatccaagcgcggaggcgggggttggaggagcctcggttttccgtggaggtcaacgaaggccattgcctaccttctcgatcttccgaactgcggtcaacctctcgttttaggagtccggtactctcactggctcgaaagtgccttggccacagtgcttgcctaagtaattgcgaggttgcctgccagcaagaacatggcctgctcggctgtgctcgtcctcagtcataactccccgttttcttgaccccctcccccattacagcggtgatgcacatgccactgtattcagattggttcttttgaagtgtctgagaatctttgaacgtcatttggtttggtgttttgcatctttttatttggaaatgttgctacactttaaaagcttctaaagcaactgtctgtcctttggttaggcattttggatttttgtttgccagtggttaaagttattcgtgaatgttgctacattttaacagcttctacagcaacacttagtgacatagtaaatactgtactaagacatctgaaacaggtgtgcttgaatggattttaaaacaaccagattggtttttgttttcatttgccttacctgtagaaattgttttacaatttaatctcccatttcttgttgctcagatgattttcgtgctatctttgctaaaatgcagttttgttactactgagtacctggcgtttactgtgccattatgcagagcctttctattttaccagaaagtcttgaaaggtatttcatactcccagaggccagtacctttcagtttctcgtctgccctgttctccccttcccctcttggtatgttatgtggaaactgttggctttgttggaagactttgcttttatctttcagacttaggttcctgcgctttatcctcaagtgtctccctacttacaaacctctgtatgttttctaagaaaatcaaagagaccaccttgttgtgcatccttaatgactccatgagacttcagtccatttctacattggctttacctgcacaattgcctgcttagcttggagaattggagaagaatgcctcatgatgctagaagtttggtattttgacaggacaggatgaagacaaaaaattgatttatatgtacaaaagctctcatagaaccagtttgaggtatatggcttaaaagcaatagctcctattctaaggaaacctccaaaataacactcgaggctcctttagaatggtagacagagcattgtagaagttggcagactactctaacttgccacttgggtggtccttgctgaaatctattttgtgtggctggcattgtggattttgttttgtttttcaatgtatgtaattagtcaccagtttctttttttcgagacagggtttctctgcatagccctggctgtcctggaactcactctgtaggccaggctggcctcgaactctgaaatacgcctgcctctgcctcccaagtgctgggattaaaggcgtgcgccaccaacctcccggcagtcaccagtttcttaaaatgagaactatcacataaactctgaggtttgtttgttttgaattatagatggactggccatacattttcaccatcagtaaactgctagagttttgagtgactgctttctttggaaagggttttgtctccagttcatcagtgttgcttgtgttctatcgcttcatggttggttggttttccatttgaagcagagacctccctgtagaagtgatatgaagagggagtttacagagtctccctaatgtgtgaggttctttccctcatttacatttccacctgcaatgctcttaagacacccaagacaaggttggatatatttctcatattctgaatatgctcttttgtttttttttttttttcccgagacagggtttctctgtatagctctggctgtcctggaactcactttgtacaccaggctggcctccaactcagaaatccacctgcctctgcctcccgagtgctgggattaaaggcgtgcgccaccacacccggcctgaatatgctcttgtagctgaaaacttgaattatggtatgtgtgtagatgtgtccttggacattctgtgtgggtgtctccttatcttgagctcttcagactttaaactacttgcgtagtgcccgactgtgtgttttcatacctgaggctttttggatagcctgtgcattttctctggtctaatactattcaaccccagagatttttctcaacctagtggcccatcctaactcaacagtgaattttaagtcctaatttacttgtccatattcacattagctaccctattggacttgttgtacacaggtgctaggccttacacctgttagcactcattttggttgttttgtttgtttgtttgtttttgtttttttggttttggtttttcgagacagggtttctctttatagccttggctgtcctggagttcactttgtagaccaggctggcctcgaactcataaatctgcctgcctctgcctcccaagtgctgggattaaaggcgatgaacaagtgtctttgtaggttaccttgagtttgtcagactttaaagtaaattatttagaaatcttgctacatttttttaaagcttctaaagcaacattgtaacttagtaaatcttcacatctccctccttttggtttggcgttttgaatttctaccctttgtatgcttcatttagtttgccagtagttaaagttatttggaaatgttgccaattctgtaaggggatactcaaaactgacccccaccaccagtttttaacttcttgattaacggctttaaacttttatttaattggctcaaaactgaagcctaggactcctttccgtactgctgcctgccttcaggccaaaccttctgcttatcaacctctaacatgctcttggactctgctctgctaactgcttggagtttccgaggttactgtggtaacctctcagttgagttccttacccccaacccacctgcctttacatatttcagaagttataaagtactttcgaacatgttatacatttgttcaaaattgttgatgtcctttaagttaaagttagggtttgtttgtttgtttttttaagatttttatttattttatgtatatgacaagtacactgtagctgatctaggaaacaccagaagagggcatcggatcccattacagatggttgtgagccaccatgtggttgctgggaattgaactcaggacctttggaagagcagttagtgctcttacccgctgagccatctcagcagccctaaagttaagttttttaagcatggaatttataagacggctttaccttggccttcctgtttgatttcctacctagatctttctggagagcactgctccttttcctgaatgtatttattaggccccacagtgtctttcctactgcatctatcacatcccacaaatacttgattcttgtttcagaacaggtatggcctttggcactaaggataaatgacatatattaagaagactaagtcgagggaaggtggtagtggatatgtctggagagaggacttgtttttaagccagggattttgtttttgttttttttgttttttttttttttattagatattttctttatattcatttcaaatgctatcccgaaagttccctataccctccctctgccctgctcccctacccacccactcccgcttcttggccctggctttcccctgtactggggcatataaagtttgcaataccaaggggcctctcttcccagtgatggctgaataggccatcttctgctacatatgcagctagagacacgagctccaggggtactggttagttnnnnnnnnnnnnnnnnnnnnagtgacccattggagcagtagtccttaacctgtgggtcaaaactccccacaggggattgcatatcagatatttacattataactcttaacggtatcaaaatttcagttatggagaagcaataaactatctatcagttctgctgacaagcagctgtattaaaggtcacagcatgggaaggttggaaaccactgcattagtgagtgcagaaatgctgggccttcctcatgctttctccacctctcagaacactgtatttctccttcctgagaacaggatggtatgcgagcctccttctctgtttgaatattgcatttgagggaagatgttatgccattggtcaatgagtccagagaattagtgtctctgaatgtttgttttagatatttgaatttcagtctaaaccatttaaaggcaaagaaagtgaaacccaacaagttcaatgtttagctagcgagatgtttacccatgaaacaaaaatagacacaatattatgatcactacaaattctaaccagctaaaaattctctgtcaggacataaaaagtgaattttttttccttttacctagccattgcaaaacaaaatttctaactattgactgttttaagatgggaccaaagtacccccccccccaagggtactgtgctaagagcaaattgacctggagaatcccatacacttagtggtaaaacctggactatcagaataggttctaatcatggcctaagagaaacacttttcaaacctgtttgattttatatctccccctttgaaaatgggtttataataaacctttccgtgatctcaaggtattggcacaataaaaacaaagtataaaaaagccgagagtgctttgtcaagaacagactactgaaggtagagtgcccttggcaatgtagtcatggctgtttagctagcagaactctgagcctttccacaggaaatgagtgcaaatagtcatcacagaaaaatcttactcactaaaagccatttctcagtggaaaaaaccctgctatcatgcatacgtatgcatgcacatatacatatgcacacatgcacacaggtgtgtgcacatcagtatcactcaagagctaaacacttaatgggatgtggtaaccatagttacaaaatctagcacttgggaagcagaggcaagaagatcaggagttcaaagttttcattaactacatagagagattgaggccagcctggttaaatgacactctgtcccaagaaaaacaaaatgaagaggggaaaaaaggaggagaagaagaaaggagagggaggagagaggagtgaaaaagagaaaaagaaaactaaagaaaaaaacaaaaaataaaaaatgaaacacaaagaaaataaaatgctatgaaaagctagtatttgcgctgaacaattccttgtaggtgagacagaagcatttcagggtgacacaaggtcagagttttttggcagggcttcatccttttaccagtttccagactgtcatcttgctgagtcttcacttggtagactgatagcttaccctctgagctatatccagcaataccagcttcactcacaaagccctcttcaccttcatgacataattcagggagactttaccttgactacaatccttctgggattggagtttccacatatggatttggtggcatgggactcacgaattcaccctattatagcacgcacacacaccctttttgagacagaattggtgtcctggaacttgctctgttgaccaggctgggccgaaacttacctgcctctgctaccctcatactgggaaaaaaggcctgtgataccatggccaatttacggcaactatatctaagatggaacaagagacaattatttatgtaaaaagagaccgcaaaggagtactatgtaatagtcttttgaaataatcgaaagaaataaaaactccgaggtggcagaacttgatttaaataggagagagagagagagagagagagagaaagagagagagagagagagagggagagagagagagagagaggccctgatttcaatttccgacaagtggtgagtggagcacacaatggaaaatagatactgtaggaatatatagagtcacaagggagagaggagatagacagtccctgtctgaagagctagtggaatttgatggctgttgtgagagaggcagtcagttttcttcagggatgcagccattgggtggttacccatgctctgataggttgttccataactgtgcatgtataggtagcactgagtgactccagtttgaaagagtacatggcgttgggaaggattagtagtggtgggatatagagagaaattggagtggaagggtgagtttgatcaaaatgttttattgtcttaattactttctactgctgtgaaaaagacaccaaaagtaacttggggaggaaagattggatttgtcttacatttgctgggtcgcgccgtctactgagggaagccaaggcaggaacccaaggctggaagctggaggcaggaaccaaagcagaagatttgaaagaacgcagatggctagcttgctccccatggcttgctcagcctgttttcttatagtactcaggaccacctgtctagtgggcactgtccccagtgaacatggtcctctcctgtcaattatcaatcaagaaaacaccctacagacttgcctaaagaaaatctgagagagacaccttctcaactgagatttttttttcttcccagataactctagcttatgtcaaggcgatgaaaagacttaacccaaacatgtatgtatgaaaaatctcaaacaataaaaaatatttaaaatgatatgagggaaaagccttatagaacacttttaaaaaaacagttcaaaaaacaaaacaaaaacaaaaacaaggaataagatgcctttggacctttgttgaagaaagtattgaagagttatcttcaataacccggaacaccaaaaaaaaaaataaataaataaaaacaaaaaaaaaacaatagcaaaacaaaaacaaagacacccccaaccaaacaacaaaaccccaaactacaggaaagtttaaatatttttaacaaacagaacaaagactacaacaacaacaaaagagaccagggtggcagaaaggaactttgcatgttctctcaatttaatttagggaatgattgtctaataaattagaaggatgtgggatagaaatggtgattgtttcatctataatatcagaaatacaattttacaagacattatttcaggttgataggcaaatagtaggagtaaaagaatatttaaccaacactaagaaatacaattttattgattcaaagagcaggcaaggaactgacaaaaacatagagaaaatataccattattatcattggtttttatatagaattaatggtataaagataaataggaaattaaaaatgtagactttcttaaatataaaaatccacacatgcatgaagcagattactgtggaaagacttgaaaaaaatacctgtccttagatagaacaatacgacagaccaaaggccagacacatctttcatgtcaataaatgtaaatgaatatgacccacctaatataaagaaaaacttttcacattgcagaccaaaggaaccttcatactttgttctgcattcaggagacacatctaaaactttcagaagagttaaaattaaagtcgttcttgagatgtcaatatcagatacagtggaattcaggatgaaaagcactttacaataaaggtcttttataatgccaaaggggacaattgatagtgaagatataaaagtcacaaaaaatctatgctccaatcaaaagcagtaacacccatgaagctgaaatgataaaaattacagggagaaattaacaaaaacacacaaatataagagattaaggtcttaaaaaaattggcaaactttattttacttttaaaagtggcagctgttctttatgtttccttattgtgtacaacatgttctaaagaactccttaaatttagctaaatagcaaatttgtttcattaattagtatttttgagatgagagcatataatattcactatttcatatttcaagaatataatatgtcttaagttgctttctactgcgataaaacgctgaccaaaactaacctgggagagaagctttggtggcttacaagtcacaatctatgatgaaagaaagtcacgcaggaactcaagacaagaacttggaagtaagaactgaagtagaaagagcacaagaatgctgttattggctgcactttcgactcacgcgcagctatctctcttatacttcttgggactaaagcccaggaatagaactccccacagtgggctgggccctcccacatcaatcactaatcaagaaaatgctcaaacacacttgcctacagtcaatctgatggatacaatcttcagctgaaattctctcctcctggatgactctttatctttgtcaagttgacagacaaatttaaaaaattcgatcattggtatccatcattgaatttgggcttctggagatagctcagtcaataaaggttactctgtaaaagctcagacatacaaatatgcattcctcacataaacatgtacatgcatatgcagatgtatacatataagtacagagtgaaataaactttgatgaatcttaaatattggtcctccattatcaaaacatgtctacttcgaatgtctatggactcatgaaaattgaaatatttcagatcaccgagtaatcatcagtggatgtattttatcacaaccaacttaatgatcatgatcaagcaaaatcagaaataagccagaaaaaccaaaggccacttcatgtgataatacaaaagttttaatcatatataattaatgtatgcaaataaaaattttgtgaggttctgacttgtgacacgtacccacaaaagggctataatgcaacattaagcaatttctaaaagcaaaacaaaaccaatggaaaaaacaaaggtatgtattaataaataaaagtaagtttaaagaacaggaaaaaagataattttaaaccttgagtcttggcagaaaaagaaaagaggaatctggtttactggggaaaaacaaggggaatataattatataaattagaaagtgacaatgtgagactaaccccagaaggaagccattcaaagaattctaagatgactcaattctatgcaaataaatggaaaaatctggattaaatgaataaattaccataaaaattagtcagtgcaagcctaccaatttttaagaaatacccattgtcaacaatgtccaaaaaaaattaaccagccacagacaactttacaggaatatctgtgaaacatttcagaaaaatgacttgtgtgcagctggactgttccaaggatgggagcagtttaagttgtaagtctctgtttctcacatgggcaatatctacacagagaattcaacgcagaggaagaactcatacagaaggcttaacatagggaaagtcatttgtggcgatcagcatttcagacagctctttttgtccattaatttcctaatttaatgtggtcttaattaaaatactagggattcatttcacccagaaaactggctcctaaatttcacatagaaaagtacaaacagtgataacaacaaacgcctaaataattaaacatggtgattcttttctatctaatttaattttattcaaacaatgtatttccatcatctcgtcccttctccaacttcttccggattcttctcacgcctgtgcccactcaactccatgttctttctctccatccaaaacaaaaataaacatttaaaaaaaagggggaggcggaggcggaggggctagagagattgctcagcagttagcagcactgactgatcttcctgaattcaactcctagcaacccagtcaccactggctcacaaccatctgtaatgagatcggatgccttcttctggagtgtctgaggacagcaacagtgttctcacatacataaaacaaaatttttttaagggtcgctaataagacacacgtcataatgaaacaaactaccctgcctttacaaatgggggtctatgaggaaaaggaggaagagcgattgcaagagacacaggtggtcgatttctccaaggaaagcagtgtcgtccagatgcaacagcctggtgcacagatgaactcacacattctgaggcagcacacatacaacatgcacacgttccagatggagtcccagcacgagggggaagtggacagacgttactgtcccaaaccaagaagctattgcaattcatatctgcaattcaattttctcccatgcccaggaacagctgaccaacccaaaacatgaagattctttttttttttttgaaggcatagattaagaatttattatgttttttttttttttggatgtgatcataacaaaatatcttcaccatggtgtctttgatgctaagtaagaacctcaatattataaaaatttctttgttatttcatttaaaatatattgacagacagggtttctttgtgtaatccaggctggcctggaactagctctctagaccaggttggccttgatctcaacaaagatccattgcatctgcttcctgagttctcagataataacatgttactaatacatannnnnnnnnnnnnnnnnnnnttagtgctcttacccgttgagccatctcagcagccctaaagttaagttttttaagcatggaatttataagacggctttaccttggccttcctgtttgatttcctacctagatctttctggagagcactgctccttttcctgaatgtatttattaggccccacagtgtctttcctactgcatctatcacatcccacaaatacttgattcttgtttcagaacaggtatggcctttggcactaaggataaatgacatatattaagaagactaagtcgagggaaggtggtagtggatatgtctggagagaggacttgtttttaagccagggattttgtttttgttttttttggttttttttttttttattagatattttctttatattcatttcaaatgctatcccgaaagttccctataccctccctctgccctgctcccctacccacccactcccgcttcttggccctggctttcccttgtactggggcatataaagtttgcaataccaaggggcctctcttcccagtgatggctgaataggccatcttctgctacatatgcagctagagacacgagctccaggggtactggttagttcatattgttgttcctcctatagggttgcagaccccttcagctccttgggtgctttctctagcttctccattggggagggctctttgtttttagacagtctcattctacagctcagactaatcttgaacttgtagcttagctgtcctggctcatctaccctagtgctagggttataagtatgggctagctagcacacctggccagtgaggtgttttaagtagggagtaacacctggcttgaggtttagaagcctcactttggccaacgaagaggaagaataaggcctaaggtaagggagagaagcaagaaggctgtctaagaggaaatacacatttggattaagatggatgctgtgtgagtggtgttgaaaaggcagacccgttgggacctagcatttcactatgtgactgtaggaatgttaaggaagtcaagtttgcttgcagctagtcactgaactttgggatggagagacaggtaacataatgaaatgatttggaacatgttgatctttttttttttttttttggtttttcgatacagggtttctctgtgtagccctggctgtcctggaactcactttgtagaccaggctggcctcgaactcagaagtccacctgcctctgcctcccaagtgctaggattaaaggtgtgcgccatcatgcccggcggaacatgttgatcttaaaggccttttggatcgtctaggccttgttctccagttggcagcccagctttgatacccaatgcagcagattttgaagtatgaagtagagtagatgaagtgtatctatagaaaaacttatgtatgagtcaggtttgatggtacaggcagtagtagattagagcacacacctagtgtgtataagatcctgggtttagttcccattattgacaaaagaaccatatgtatgaataccgtggcaggtctattcagctccacacagcaatcgaaatgtatactatccgtaatcgacaaggaaatgagtgaatgaactgtggtgcagccgtatagtggaatacatgggaatgtaggttactgatgcccatgcagtgtggccaacccgctaaataaccaacaaaccaaactaaaaccagcatgttctataggcttcactctcataaacctgtaggaaatgcaaactgatacagatgattggttattataaaaacagacgtctagatggttatgctgacacaggcctgcaatcacacagatgagaaggaagcgcaagaagaccaggagcgaaggtctttcttagctacacagcgaaagaacagcaaaccaaaaggagacgtctatgtctacttatcttgagtatgctatagtgctaggtggtgtcaaatcatacaacttagatatatgcggcttagtgttgactagttgttctcagtgaagaccaatgtagccatcagcttagaatctgctactgtctcactgtgtttgctttatcacacctatccactttccctcccgttaatctgttgttgtgttttgagacagtctctcccagtgtagcctgaaaacactgtgaagcccaggctggtctcagacttgtggcaatggtcctgtctctgcccctccccctccagtgatgagctaacaggtatgagctgctctgtccagcttatctaatttttttttttaaagacagggtatctatccattcattcacccatccacccacctgtaactctaagccagctctggctgtcctttgcccacctctgccttccaagtgctgggacttaggggtccactaccacacctggcacttatgtgatatcctgatgaattttgtagttgcaggtataagcacactttattcctaaatccttcaccccacatcagtaactagaaatcaatagctttttaaaaacagttccttttgttttagtaggaagttcctatgcagtggaacatacagacgttacttggagtgcttaatgaatgtttactgtcaaagcctctattaaaggatggaccactcccatggctcttgaggttcccttcgtgcccctcttcccagaggtagccgccactgctgcaacatttcagcacctcacatcggttactcttgtctgttctggaatatcatgtaaatgaatcaagtagtgtatatatatttttttattgttttcttttttttcaattttttattagatattttcttcatttacatttcaaatgctatcccgaaagtcccctataccctccccccactctgctccccacccacccactcccacttcttggccctggtgttcccctgtattggggcatataaagtttgcaagaccaaggggcctctctttcccagtgatggccaactaggccatcttctgctgtagtgtatatttttagtgaggcatttgagagtatgctttaagaattccgtcctttttttcccaccatgtgaactatgtcacagtttatctagtggatggatagctgatgctttcaattcggagctattattaaagctgccataaatgttctttaaaaattgcatctatgtgtttgtgcatgtatgcacatgcatgcacagacgtggaggtcagaagacaacttacaggaatctgttctttccttctgccatgtggatctctcaaatcaaactggcgtggtggcaggtgagccacaggctcaaatggtcttgttgagatggtgtctcatgtaaccaggcttgccttgacctcctggtgctcctgtgtttgtctcctggatgttgggttacaggtgtgcacacttagcccccatggttcttacaggagtctgcttagagacagcttttattgcttgtacactagtaccgagacattgcttgcaggatagagatctgtttatgagaaactgctagacctttccccaagatggccaaaccatttaaaagtctctcacagtgatagatggtggctccttgccagtgtgtgatgttactagtctttaactttagtggtttgaagtgctatcttattttaactgtgtcttgtatcccatggtagataattacattgatcacttttttatattcttttttgcactgtgtgtgtgtgtgtgtgtgtgtgtgtgtgagtgagagagagagagagagagagagagagaatgaatgagagggggcagacagacagacagacagagaacagcttacaggcattgatactctcctttcactgtatgggtcttcaggatccatttgaggtgatgaggtttggcagcggcagcagatacattctgcccccctagtcaccttgttggtaccttctgcttttatgttcttattagtcattcttgtttattcctttggacagtgtctgctcaactcttctttcccataaaacattgaattatttttttctttttagtattgaattgtaagatgccttacatattctggataactgtccttttgataaggtatttttatgatatttatctatctatctatctatttatttatttatttatttatttaaggcctcatgtaactcagggtcataatggttcaacttccttgagtgtctgcatcttaagtgtgtactaccgtgctgggtacacatcatttcttctagtctttgatttgcagatttactttctagtagtagtgttttatgacaagtaaagttttaaatatccacacatctatccatggtgtcaagcagcccacattgggctcggccttactgtgtggctgaggctgactttgaactcctgatcctcctaccttcatgtccccagttctgggattatgggcctatgtcaccgtgtctgctttgtttttgtgaggtctaattctgtagcccaacttagcttgaaattcactggctgaccttgagctcataatccttgtgctctaccttccaagggagccacctagtccagccagatagaaattctgaaggatcactggcatccacatggcagctcacaactgtttgtaacttcagtgccatgggctctggtgcccttacagaacaacaggcaaagcaaaaacaaaaaaatttatctttgattttacagtgctaaggaaaatttgccagggtgtagggagtctttgagtgaaagttgactgtcacaggaatgctgcatctctgagaaacggagtctgccttcgtctgcttgccatgctcagtgatcgactaggaggggctggttacaggcatggcccctgcacaaacacagcggtggatttcagagtgcagcagctggggcccttagtcagttatcctgcctccagccagatctgagagggccattgttgtggccaaccaggctcttctctggctatgaattgcctgattgggataaatcatatacagttttccccgtgtaaagtaggtgatttggccccttcaacactttaaatgttacaaaaaaaaaggtatcttagagtaaataaaaataaaaacttaattttcattagaatttaatagtatgtaatttgcttccgctgatcaaataaactgtttcctagtgtgaggctggtttgtgcagttaaatatgtagttagcaaaaccacagataggacggtaactctgaagaaaacagctcagggatgcctagataatcactgccttaactaaccaagtgcagccttggaccctgcttactgaggtagacagaaacaatggccggtgaagttcctcatgaaattaatcttgttaaatttccagtgggattggaggtacccaggggagaaagtaataaaagtgggaaaatgttttcttcccagtttttgaggcattgtcctgatgcatagctaagactagccatgaactcattcttctagcttcactgaaaagtgatttaaaattttagaattatggacacttaattactatgatgttattattttgaaacattattttatataatacttatttatgctttatgatagtatgtgtgctttgatgtcagttttggagagtgtcaccaaatagttttcagggacttgaacacaggttgtctgtcttggcattggaccttttcttgttcagtcatctccctgggccctcatatgttattctaagatagggatttttaaactgtaaaatgattttgagactctctttaaaaagtacactgtgtgtgtgcattacacgggcttgtgtttgtgggtatgcagttacgcgtgagcatacatgcatgcattcatgatatgtgcttgagtgcacgggtgcatgcaggcgtttgccacactttgtagagctcagagaagcaagcttggtgatctgagttcaagttcaactcctgcacgttgtcctctgaccttcatgtgcattcctgggtatgtatgcacatacatacacacaacacataccagataataaagggaaggaaggaatgtgggtaaaaatctattctgaaatttgttgaatcttatgtcttaaaacacagtcagtttaaaatttctttctttttccttttaaagtgtagttaagggctagagatggctctgtggttaagagcatttgttgctcttgtagaggacgcagatttggttctcagtatccaaatgatagctcacaatcactcaactccagttgcagggatctgatgcccctgtctgacctccacagacaccaagcatgcacgtgatgcacagacatatgcaagcagagcactcatagacatgatataaaataaataagtctatgaaaataaataaacctatgaaattaattttttaaagctatcaaaaatgtcagaagtttcaatatctggaaaaacttttttgtcttttgctttttctggtcagagtatcactcagatacagtttatatgtgtccacagaatttaaaatgacattatcagagaagtcagagatctttcagtagaaattcacacatgggtttataggaataattacacaaaataagtgatccctcactacatttcttttaaagcatttttatttttttccagacaaggtctctctgtattcttggttctcagtgtagttgatgtgtagcttacagttatcacttaaatagcaagtttgcattcattatgaaatttataacttgtttgtttcttgggcaagctctcatatagcccacattgacctcaaattgaataagtagtggaggatggccttgaactcttgatccttctccacctttgtagtcctgggctacaggcatctgccaccctgccctgtgttaccattttaatgtaggtattgtccctattttatagagtagggagtaagtatgtctgtcatctttcaaattaaagaagtggacttagaatcatatcttaaattactcacatgtgtaaaagtgccctgcatagagtcctcatttatttgtacaataggggaaagtcagggccgtcttgtatgcgtgtttaaaaatatgcctccggtcttctaagatttaacaaagtctttatttagttaaatnnnnnnnnnnnnnnnnnnnnttcaccatggtgtctttgatgctaagtaagaacctcaatattataaaaatttctttgttatttcatttaaaatatattgacagacagggtttctttgtgtaatccaggctggcctggaactagctctctagaccaggttggccttgatctcaacaaagatccattgcatctgcttcctgagttctcagataataacatgttactaatacatacatacatacatacatacatacacacacactcatatatatacacatatatatacacatatacatatatatacacacatatatacatatatacatatttatatgtatatatttatatgtttatatagttaaataggttgaatcaaaatatcataaacactccctggtaatgggcaaagggacaccttgttgttggtggtgttcttatatcagtcaggggcagagcagatgacagtcctttttcatcctatcttgatttctggcttggcagccaaagctgtttaatgcctaggacccataaaagtcaaatccaatcctatccaattgtgtcagcgaagaaggaggaagacagagacctgcgaactaccatgccacccacaaacctgccctccatcacacggaacaggcgaacaggcaggcaggccatagacatccgcctgttgccacactctgaagtacggatggaggatcttgcccaggggctcgctagttgcttggccagcttgcagcaggagccaccataatgtgtgaatacgtgatggtcagttgggagagaaagagaagtacagtaccgtgatcattatgaagagagatgggactggaggcgtgacggtggaaaggagtagcctgttatgtcaccagctctgccacctgagttagcttgtagcccaaactgccactgagggacatgtctgagtctatggctacaaagcagcagcggtccatgttgatgtgtatgactagacaacacagggatgtcctgtgcagggccagcctctagagaccacgtgaatattcaggggctgtgcttaaatggccccgcccctcactgaatgcagtgctctgtagagcttgcctcacccttcactggtggcagctctgggagccctgtgccttgcacaggcaccactgtagagctggttctggcagtggggttatgtgggtgagccaaccttgagggcatgactgtgggagagctgaccctgccgctggtctgccatggagtggcattggtgcaaaggtgatgcccacctcccactctgccccttgccacctctggcagtcaagaaagctgcccccagtgtcttgagcttgagagagcttgccctgtcccttaccagctgcagcactggcactagggagagtgggcactgcaccgcgtctggacagcacagtagaactggccctggcgtggggggggggggggcgcatgcgagccgactccgaggtcaagagcatgagagagctggccctgccactcatctggaggtgaaatggctggatctggaaatgatgtcttcccccttcctccctcaccacacgcagtagtggggagagctggggatcatgagagcaagagtcccgactcccacccccttactggctgtagcactaggaagagagggtcctgcaccttatctgggcaacacagtggatgtggccctgttggggaagacacaggtcatccattctgaggatttgagagcaggagggctgttctaacccctcataggctgcagcatttgggaaagtggtccccgaacattgtcagggagctggccctggaggaatgggtgcaggtgagccggctccaagggcatgagagcaggggacctgaccctgcctcctgccaatgatagtaggtggcctagctggagtagtaaaggagggcttatcttggaagagctgatgggctgagcagctcagttgctatccaggcccagagccagggtcctgagttggcccaccccaaaatctgtatcatctgcgaatggttgggaattcgtgaaagggccaaccaatcctgttgttccaaagctgcagtatctccatgacacagggcaaaaacaggataacaggaaggaatttcaatgaggatccaataatgatgttgtcacagaagccaaagatatcaaaccagaccaatgactcatgtaatgaacattcgcaaatgaagatgtctatgcagtataccgaggggtatattgtgggacacacggagccacactgcagcttccacgatagattttttttttatgcttttgctttttattgttgtttggttgtgtgtatgtatattgtgggacacacggagccacactgctgcttccacgatgagatggttttttttatgcttttgctttttattgttgtttggttgtgtgtatgttttattttgcaggggatatgagagctcagggagatgagtgggaatggggtgcatcacgtgaaactcacaaaaaaaaatcaacaaaagggtttttttgaaaaagtagaacaaaactagccaactgtgatttatgactgtttcaaaatgtttgtattttatctacttaaagaaattttgcctagtactgttagaataactaacatcataggctcttgatagaatttcaggtgtcttttatgttgatatgtaactttactttcagaacctttaaatgtgtttcaggacactgtgcattttaatgttttccatgtttgctgaaataagcaaattctaaaatgacgattaaagaatatatcataaacagagccaaatacctaagcacttgatttctttccccttgaagcagcacctccaatgctctcccatcaggctccacttctcaagggtaccactgcctcttagcatcttcaagctgaagaccaagcttctatctcaggaatgcttgggaggcaaactgttttgaaagcagagcacctcgtagaaagcaggattgcacagcatcaagatctctgctttgcagtataagccctcggctggcctagaacttactatgtagaccaagatattttggaactcacagaaatctgcctcctacctccgagaatttaaggcatgtggccctatggccagcttgattaagctttcttaataagctgacttgtcaaagagaaagtgtcttggtgacaaagtctaattaagttgagccttttggtgtggttttagaagctgtcactttagcttttgatcttggccattctgaagggtgataaatggaatctcagaatcattttgatttgcattttcctgctgagcaaggatgttcaacatttctttaagggtttctcagctcttaagagagtcctctgttgagaattctttatttagctctggatnnnnnnnnnnnnnnnnnnnntatagcccacattgacctcaaattgaataagtagtggaggatggccttgaactcttgatccttctccacctttgtagtcctgggctacaggcatctgccaccctgccctgtgttaccattttaatgtaggtattgtccctattttatagagtagggagtaagtatgtctgtcatctttcaaattaaagaagtggacttagaatcatatcttaaattactcacatgtgtaaaagtgccctgcatagagtcctcatttatttgtacaataggggaaagtcagggccgtcttgtatgcgtgtttaaaaatatgcctcctggtcttctaagatttaacaaagtctttatttagttaaattatggttttgggttttgtttgtttgtttgtttgtttggtcttttgagacagagtttctctgtatagccctggctgtcctggaactcactttgtagaccaggctggccttgaactcagaaatccgcctgcctctgcctcccaagtgctgggatcaaaggcgtgagccaccaccgcccggcataatgtacttttacaaatgtattacttcacaattaagatttaatttgtatttacttattattgtgtgtgcattaccggggggggggggcgggggaggaccacagctttatgtctaggatgacttagtaaagtcacttttgttgtttcaccgttacgtgggttctgggtccttacacgtctgtccagtacctcccactgaactgtttgcctgtggatatgcatgtgcctctcaacgtgtgcacacaaaataagtcaaatgcaaatgcttttcttgaactcatgtgtgactctaaaaagtaataatgtagctgggtgtggtaatacacacccacatgcaaaaacaatactcagagccagttgcagtaggatttggagctgaaggccagtcccagctagggcgagacccgtctttaaagagaagctgatgtgagaggtgtggtctgagagccgatgtgagaggtgtggtctgagagctgatgtgagaggtgtggtctgaggctggagaggtgtggtctgaggctggagaggtgtggtctgagagctgatgtgagaggtgtggtctgaggctggagaggtgtggtctgaggctggagaggtgtggtctgagagctgatgtgagaggtgtggtctgaggcttgagaggtgtggtctgaggctggagaggtgtggtctgaggctggagaggtgtggtctgaggctggagtgaagccttcctggtgctttgatcatcacttttcagattaactttctagacctagggaaagcttgcagccagcagtgtgtgaatgagaatcatcctagctctaggtgggtgtaggtggatctctgagatcaaggccagcctggtctacaaatagtgagcccctgtctcaaacagaagagtcaggggtaagatgttgttttctgttctgttcaccccctttcatgaaagcctcaggagcagatttacaataaaataatatatatagtgctgaatatttgcttacatttcaaaaatttagaattccctgttaccatcagagagattttataaagttatagaacctttatttagtgtacatgtgtgtgtgtgtattattgaacatacacagtgtctatatctaaagagagtatgatttcccactgtgtttaacagatcttggccatttcaggagttaagtgtgattatatggtaaagcccaatcaaagtgaaaggatggattttctttcagaatttgaactgattgcttccataaaagttaaagacagacaattggctaattaaattctaactaaaaagcatagtttgatttcacttaaatgaaactaaaagagagaaactgtattaaaccactatccatgcctttgtgtgaattaactttacctttctttctttctttctttctttctttctttctttctctctttctttcttttcttccttccttccttccttccttcctttcttaaatttgtttattttatgtatatgagtacactgtagttgtacagatggttgtgagccatcatgtggttgctgggaattgaactcaggacctctgcttgctctggccccactccctctggcccaaagatttatttatttattatatgtaagtacaccgtagctgtcttcagtcacaccagaagagggcatcagatcccattacagatggttgtgagccaccatgtggttgctgggatttgaactcaggaccttcggaagagcagtcggtgctctgaacagctgagccatctctctagccccatgagccttttattttttttctccttattctgaagtttgtcttggtttctcatcgcttaagattgaaattaaaaacagaatttgcgttttaaaaacttatgaccaaactcattggaatgacttcattagtgttaaaggttgaggattaagcacattccgtgaattctaattggattaatattctttctcagaagcactgtcttgctgggcggtggtggcgcacgcctttaatcccagcactcgggaggcagaggcaggcagatttctgagttcgaggccagcctggtctacaaagtgagttccaggacagccagggctacacagagaaaccctgtnnnnnnnnnnnnnnnnnnnncttaaggactcagtgttgtggatttgattgcacggattcccaaattacactggagttagaacatctgcttgtaagtcgcttgagggtcccagcccctaattggttttgatttggaaataaaattgctagcagccaatggctgggcagggagacagaggcagaacttttagaattcctggacaaaggacaaaggaataggagaaggagaagccaccataagaagtgcgtaggacagaccaagcagagaaagtgcaagagggtaagatggcagaaatgtaggtgcaagaggaaggtggccctaaaggggctgtccaacagggcccagggcagcaaggacccaagagagatttaccaagtgttaactcaggaaggaatatcagagaggagagtatgctagccgcaaggaggtttagaaacgaccagccattgcgatgcttagtgcatattaaaaataagctggggctggtgagatggctcagtgggtaagagcacccgactgctcttacgaaggtccagagttcaaattccagcaaccacatggtggctcacaaccatctgtaacaagatctgactccctcttctggtgtgtctgaagacagctacagtgtacttacatataataataaataaatctttaaaaaaaataaaaaataaaataaaaataagctggcataagtatgtctttcattcaccacttgtagaggaggtgcgcacaccctagggaagcatagagcgggtttaattatttaccgcaacagctgagccatatctcctgactttaaatgaataatatacacaatcaccaagttagagggaaaaaaaaaccaaaagcataaatacaaagagagaaaacaaacaaacaacaacaacaaaacaaccaataactccataattgaagaaaaacttaataaaaataaatatggacaaaagcataatttaaatttaatctaaagttgttaaacagaagaccagagagtcaaatatcagtcaattctaaccaataataaaaagagaatttattaggaaacattggctgcacgttttgataaacatctttaaattaagagnnnnnnnnnnnnnnnnnnnnctggccccactccctctggcccaaagatttatttatttattatatgtaagtacaccgtagctgtcttcagacacaccagaagagggcatcagatcccattacagatggttgtgagccaccatgtggttgctgggatttgaactcaggaccttcggaagagcagtcggtgctctgaacagctgagccatctctctagccccatgagccttttattttttttctccttattctgaagtttgtcttggtttctcatcgcttaagattgaaattaaaaacagaatttgcgttttaaaaacttatgaccaaactcattggaatgacttcattagtgttaaaggttgaggattaagcacattccgtgaattctaattggattaatattctttctcagaagcactgtcttgctgggcggtggtggcgcacgcctttaatcccagcactcgggaggcagaggcaggcagatttctgagttcgaggccagcctggtctacaaagtgagttccaggacagccagggctacacagagaaaccctgtcttgaaaaaccaaaaaaaaaaaaaaaaaaaaaaaagaagcagcagcactgtcttatataatagctgcatagaatttagtttatatttcagttagtctatcatagtttttctaagcatttatttattttattatgtttggtgtatgggacagagaataaaactgagggccatgtgtgtgtgctagctaaacattactgtacctctagtccaccttgtaggtttttaaatagttaattaactttactgccaattaagtactcctattcatagacagtacattctaatttgcttatttctaggctgtcagtgcaaaatgtttaccttttccttatgtataagtacaaaggccaggtttgtagctgtatcctttaaattatacaactttccttcagtgtcatgtgagttccccagctccacctgccgggtacccttgcttgctgaggcatcctacaggcctctgattttggaagtttgtttattaagacagaatgtagccggggtttaccctgaacatctgatccttcagcctctacctcccaaatttttggattatacacatgtgctaccacatcaggctggtattctgaatttttaaaaaaggttttttgttttggttttcttttttatgtattttgcctgcatagtcaagaagatggcaccaggtctcctggaagcagagttccagttctgggaactgaacttggatccttttgaagggaaataagagctcctaactgaggagccatctcttcagccctcccttaatttcttaaaggtttgaagtctatcacaaacagtgactacaacttaggagtttgtttaaagaataatgaaatacaaagtcatttatttttttgtttttgaaacaaggtctcattatataactcaggctggccttgaactttctatgtagtccagagtggcctggaactcttgaaaatcctcctgccttagcttcctgagtgttgggattacacgcatgagctatcattttcaactgaaataacatttagaaattattatcatcatcattactgctttacacgtgtgggtgtcttgcctgcacgtatgttcatacaccttctacatgtctgttgttcactgatgtcagaagaggatgccagatcaccttgactgagagtcatcgtcatcgtgtgggtgctaggaattgagcttggatcctctgcaagagcagtatgtgcttttaattgctgagccatttctccagactctttaagctgtccctaactacattatatagcacatgcctcttgccttcatccactgagtgggggaattacaggaacgaataaccagtctcatgtttaacaatttttagtttttgaatttgtttgtttatatgttagcttcccagttttgtctcttttaaagtagattatacttcagttgcttcactgaccattttcttgttgtatgtacacagtgtgttctgtggttggttcccagtactgttcattgacttgacagtcatttgattttgtatgttcaaatttgctcagctgttattgctgttcttattttcagaatgatttcatataaaactttattttaaatttcttcttgaattctttgatttatatgttaacaatatcattctttattgttttttatataaatcttttcatgaatttgatttctttttttttttctttttttttttttaagacagtgttttctctatgtagccctgctatcttagaactgtgtatagaccaggctggccttgaactcatagagatccacctctgcttcccaagtgctagtaggattaaaggtatgaatcactgcctgacaaacatttcaagaagttatttttagatactgtattagttacgtttccattgctgatgccatgaccaaagcttatggttccagaggtttaggtcagtgatgatggagtgaaggcatggtggcaggcagctggaacagcacctgagagatcacggtattgatccacaagcaagaggcagagagcacactaggagtggcacaagtcttttggaacctcaaagcccacctctagtgacaacacctgttctaacaaggatacacctcttaatccttgacacacttcctctaacaaggctacatttcccagtccttcccagatagttgtaataattgggaattaagtattcaagcatgggagtctgtggggccgttctcatttaaactaacacatacaggtttttgtttgtttgtctgtttgtcatttgtagttcaaagctgcttgtatagggtatataggttcccaggtttctaacttgtaacttgcttatagccagatatgtaataagtaccttgtggggaggtataatggtccgtttttattactgctatgtgtaccagaagattggtagaaccaggaagataggaaatgttcttttttcattacatccacgtgtaagccaggcatggtggcctatgcctgtaatcctagcactctggacattatcagggaggattatgagttcaagtacaacctgggtaagatactgtctcaaactgaagatgggatacaagaagagaaaggtcagtataggctcagtgtgtctggggagggacttgttcttgggctacctgctttaccttaacagttgcaaggggcctcttgtattttccataacagaacgggcacaggataaaacatggatgaccccagtaacacataacaccacttctgtgtaatgttactaccttggcctctgctattgaaacctagatgaagggaagggccagtggatggctgtgtcaaagctttactgggctcttggttcaacctgctatgaaccctaaatggaggaaagggtggcagtagatcttatcctgcccccccccccccccaaggtacaggctgaacagagagggagttaatgattggcactggagaaatagcctagaatggagatgagagtctcatctgaggtctgtggttgggagttcatggtgagatgctagaattggctagtcagggttcaaggatggggacctgggagtgagggtacagggagctatgaggactagctaggaggacctcagacgggagtgttggttaaggatctaggaccctacaaacacagattgtcagggtacagacatcccttagccccccccctccccccccacacacgctggctgctgacacctccccccaacaccctagcaatgtcagcatctctgctagcagctacaaaagagcccagagctttagtcaggcctttgtcatacatgatggtggtaaaggactcagtctagagctttgaagggagccagcctgaaaatagatgtctcccccaaaagtgtatgtgaccaccaaaagcgaaggcatgggagtggtcagcagtgaaaaggagcagcgtgtcctgctcataggtaagctgtcctgccttcttaatggcagtaaagcatgatggtttagtcagccgctcggtaagctatgccttcatcgtgattttggttgatgcaacgtagacgtttcaggttctcctgcacagcaggtccatggtcacctctgtcatttccattaggggtgagtgttcagccttttagaggcctataaggtggtctgtcacaggtctaggcatgcctgaatgaactttgtactgttgtgttagttgggtattcagcatctgtatatctttgggaaacattaatttatgggacagagtatcatgtcactgtctttgtgggaagcgagctatatggagtgaccttgcagtcagctgtgctccaggaccgaggcaggcctttctgaatctaagcacagttgcagtgtaaggtgcaagttaggaaggcttgtgcaccgaggtggtgggtgattgctttcacagacttctcctggtttctcagtgtgatacattacagacgaatctcattgccgcactgatgtatgtgtgcaaatcagtgaccttgacattggctcttaactcctcagaggcaggctatggatgtgcctgtctttggggatctgcctgtctatgttgtaattgctctgcgtccattaggacttgggttcagatccctaggacccacattagaataacaaaacccaggcacgactgagtacctgtaacgtgcattggtgagagacaggcagatccctagagctcacagccagcctgcctgcctatccaaaaaggcaagcttccaggtcaagaagagacattgtctgaaggcaataaagtaagacacctgtgtcctgctctgccttctccattatatgcaattgaacactcatgtgcatacaggccggtgcgctctctcgcacacacacacaaacacacacaaataaaggaaatagaagatctaggctttctaaagcctttttagctttttatagagagacattagctagaaagggctattaaagattcatcagaattcatcactgttttctggcagtttacccaagggttcctgagtatctctggacagctcatatatcagatagacagaaattcatacaaaatcttgtaataatagcaaataaaatgttgtataatgtgctagagtttactgcagataaagtgaaccattgccagtttaaaatttgtaaggtgctatcttttattgaacatggtgattgtgtcttacaaatggaattgctgtcactttcagtaaaattcctgttcatgtctgttattgaactcaaggcatatgccttgataactggctctgccttgtttttaaagacagggtctctcgctaaagttggagtccactaattggctagataggtgaccgaccccctgtcttatctcaccaggacaggtgttattggtacataccacacttggcaggtgaaggattgtttttttgttttgttttgtttttttgcagtttttgatttttaagtgggctctagtcattcaaacatggtcttacgtttgcatgacaaacatgagactgaacctccctcactaataactaataattagaaaggaacttggttgatagctacttagaagcattgctccaagtgactttaggattcactgctagtaaattagccatgaggatatagaaagtcagtttgaaccataaaggcacataattcagtgtgcagaagtaaagtgtgttcccagagtgtttaaaagggtaatcgcatcatgctaagtgtatgcgggagtgaatttatcacaatgcctatatacactagtcagagtatgttggtgaatgaaagactggatttaaaaccctgaaccctcagttctccattattttaactgtgcatagccattgtcttttgtcagggttcattgctgtaaagagacaccatgactaagacaactcatactaaggaaaacatttcactggagctggcctccaggttcagaggtttagtctattatcatggcggggagcatggcagcatgcaggcagacatggtgctggagaaggcgctgagagttctacatcttgatccaaggcagccaggaggggactgtgtgtttcacattgtgtatgtgtgtgtagcttgagcatataagatctcaagctgctgcccccacagtgacacacttgttctctaacaagaccacacccactccaacaaggccacacctcctaatagtgccactcctatggccaagcattcaaacacacgagtctatgggagccgttcctattcacaccaccctagtcatctagtaaagtagaagaactggtaaaccagttatcattaggctggcaggcaggtcatatattgactatggttaaaaacgtgtgggtaaatggttgcagcttccagggctgctgcttcactggtaaaatcactcaagttttaaatattctcttacgcagttctgagttgttagaattattttccttcaaatatttacctttaaaattatataaagtggatatgaatgtacttggcatatacattttttaaagaagaatcaccattagtatactaataatgttttcccccagccctaggctgtcaccctccccatcctgagtgctttctgtcagtaggtgcatgtcttaaaacgcatcactctcatcaggagaggtttttcttgccattcctagcttgttgttgagtaatagttctgacccacagtaagcgataaagggatacaaaactgttttgctggttattaaaatgcaagcttttagtagccaacagccttaagtgattatgaaaaaaagtcagggaaaaataaagatcattaaatgattgttcattttttcacagtatagcagactaagtcacaaattgtaaaagcactcattgcccacccggtgagagtgtgtgtgtgagaaagtgtgtgtgtgtgtgtgtgtgtgtgtacatagaaaagttagaggacaacatgttttgggtgtgagcttttcctttccactttgttgaggccggcactcagggtctctctatttttccttttgtgctgactcttccctgctgtctggcctgccaggctcttggcagttctaatgtcttaggctcccatctggctgtagagtgctgtgcttacaaatgtgtaatttgtatgtggatcaaactctgtggtcaccaggcttgtgcgtctatcgtctgagccacctccttggccccactttggtgtaaggtgactttgtgttcactgtctgtactgggagtgctttgcacagtaggtactagatgctggagactcattagtgaacctcatagacggacccccgcggtctcaacattgtgtaaggaaggtggagttaaaaggggtcagagacccatcagaggtcagtttcatccaagaagaatgctgactgactgtcctgactggttctgggcaggggtcctacataaacaatgttttatcaccatcttagcctctccctcatgtttcccatttctacaaggcactgcaaaccatagtatatgcaaagaatactgaaattacagttaggtaactagatttaaaaaaaagaatagcatgcatggtgtatgaggctgggaacaaagattgtgaagccctgattttttggataacattcaatctgtatttgtaggctagttcatattttaattacttgcctttttgtttacaggttcaggggcaagttcaccctactcttgagtctaatgatgatgctcttcagtatgttgaagaattaattttgcaattactaaatatgctatgccaagctcagccccggagtgcttcagatgtggaggtatggcaaatgaccgcttttgttttcttttaactgcatgtatctcgccgtacgttggctgtaatggcagtgaaggagaaaagggctctccagttcattcttccatctctgtaaactttgaactgggtatgtggtagcttctatgtgtcttagctgtgaaacgttcagattgtacttttcagcttaaataaacagcttcatgttactactagaatggtctgaggcaaaccctctctatgtaaaccaggatggccttgaactcagagatccctgttcatacatacatacaaacatacaaacatacatacatacaaacatacatacatacagacagagtgcacgcaaaggttttagtcccaaaacatttcctttaaatttcagagagtcaaaaggctgataataaaatatctcaaagtatctgagggagaattatagaaacattggggtcacaggatgaacatacaagttccctggtaaaagttacaaagcaaatgtggacatgtggtgacacactagagctgaaggttcccaaggtatggacggcatttaaagagttaagatgccaatcaccagtattgtggtacaaacctttaataatagcacttaggaggcaggggcaagaggattaggtttccagatcaatttaaactacacaggggagttcaaggctagcctgggctatgtgagaccctatctgaaaaagcaaaacaaaagagttcaaagagtactttatttttacctttagctccttcaagtcccaggacttcagttgggtgggaaggcgtgggacctgacatgtgagtgtggagcattgatgtaaggggtctgtatagcttattgactacatttcacgaagccttaccccatcctcagggttacagagggggtgatggacggaaggaggggaagaagaagaggaagaggaggagggaggagggaaagagagaaaacaaacaccaagtaacacgtttagtcaggtttagaaaatactgtatcctgggtaattctcatctctcaactcatttacagtagattctttgtggtggtttggttttgttgttgtttttgagacaggatgacatatagcccaatctggccttgaattcaacttgctgctgtatagtcaagagtgacacttgctctgcctgcctccatctcccaattgctgggatttcacgagtttcctaccaggcctgattggtttcttctgtaaagtcagacttttaattcataatttcttttaaatatgtgtttatgttgttgtttcacagagatcttgaatagtatggcttgcatgactctatcacattagcaatttcacttgggttttctttgatcctagctataatcttccatggtttggcagaatccagacttacaagaaaggctcacaaatctcaccttgtttattatattgatgttggtacattttagaaatttgctaatctactgacattgcaaacataaatcagatattcctatatatatatttacataactatgcttgtttaatttcatctttaataaaaacaaggaacagaaaaccatatgaaattctcatgtggaggttttggtgctggggatagttttggtgagaacatgtaagaatatgactaatagaagtaccagtcacgtatgtaatcagctttattatttctttttaacatatctattggcattgcatacagttttatcatctgtacacatctgtgtgtaagtatttacatgagcgcaggcacccacagaggccaaaggagttggatgcctgtcttggttaggatttctactgctgcagtgaaacaccatgaccaaaaagcaagttggggagaaaagggtttatttggcttaccctacataatagcattgacgtgcatcatggaaggaagtgaggacaggaacccagataggggaggaatctggaggcaggggctgatgcaacaaaggctgtggacgggtgctgctttttggcttgttccccatggcggcttctacctgcttgcttatagaacccagaaccaccagcccaggggtggcaccacccaaaatgacctgggccctcccccatcaattaattactaattaagaaaatgccttgcaggcttgcctacagcccagtcttatggaggcattttctcaatcgaagtttcctcatatctgatgagtctagtttgtcaaattgacaaaaacctagccatgaaaatctgaagttataggcagttgtgagccacctgacatcagttctgggaatctaacttaggtcttttggaagaacattacttggttttaaccactgaaatttaataatttcaaagtgctgttttataaaattctgtatcttacaacagttctatgggggtatgggaatatctttctctttgcttgcatatttgaaaattgaccctcagaacagtattgacataaatgaagatccaagaaaaaaaatcaattttccagggctggagagatggctctctgggccataaaatcactttagtgcattgatcatacaaaaagaagtagactagaaaatactagtgtgcttcataaaataagggcgaggtttatttaggaagccctcttacagctcagtttctttataagtgtataatataaactattgaaaagttattatctaactactgtatgtatttgtatgtgaatgcacaaagggatcggcgtgtgggttctgggcatcaagcttggtcgtcaggcagggctgccagggccctaacttgctgggctgtctgcaccagaatggaaatgtagtattttttactgcattctctccctctctccctctctccctctctccctctctccctctctccctctctccctctctccctctccctctcccctcccctcccctcccctcccctcccctcctctccttactttatttttttacgttcacatacaaagtagtgtgtgttttttttaatattttgtgtgtgtgtgtgtgtgtgtgtgtgtgagacagacagacagatagacagacagacagagagacagagagacaggtggggagggagggatgtgagtgtaagcgtgcgtgcagtgtgcgtagaagtcggaggacatcttctggagtctgttcttcccggcgtgtggatttctgagataagtgacggacacaagtcctcagggttgtgcagcaagcgcatgctccgagctgagctatgtcacggccaggcaggatgggcagctcccagacacaggtgaatgtcatttatacctagttcttacgcattctatccctcatttctcctttttgctggcttttcttccctcagataatcctcccgtctactatcatgtactgtgtctactttcgtgtactgtgagttgaggnnnnnnnnnnnnnnnnnnnncatagagcgggtttaattatttaccgcaacagctgagccatatttcctgactttaaatggataatatacacaatcaccaagttagagggaaaaaaaaaaccaaaagcataaatacaaagagagaaaacaaacaaacaacaacaacaaaacaaccaataactccataattgaagaaaaacttaataaaaataaatatggacaaaagcataatttaaatttaatctaaagttgttaaacagaagaccagagagtcaaatatcagtcaattctaaccaataataaaaagagaatttattaggaaacattggctgcacgttttgataaacatctttaaattaagagaatttcaggttaaaccgatagtttagaggaaagacccccatccaatgggggctgaaaatatgactcagtcagtaaaatgtttgcatactaagagtgaaaaatagaaaggtaagatgttcaatgtggccttttagaaagatttgaaaattaagagatgttacaattctggatggaaaaatcacataagtatggtgaccctatatgtaatctagtggttcagtacaatttcagccaaaagtcagcttggtttggaatctagattaagggaattgccttctcagacaaaaataggggtcatagaaatgttaaacaagaacacaaagaccaccatgtaacaggcagtattccaaaattaccttttaatcctgacacaacactcagaggtgggtaatatcatcactttttacagatgaaggagttgagtctcagaggcattagacaataaataaatgagtcagtcagactggctttaacacatgtcattggaaatcaaggtcagctttctactacaaatataattcaagttcacattgcacactcaataactggtgttaagacaattaaggtatcatttgtaggagaatataactggatccttaattcctacctgacagtgaagcaagttccagagtaacaaagtgtatataatatgcatatatcagagaacaacagaccaacagtcacataatcaaatgagaaggaatgcacttctaaacataacattaaaaagcataatataataaattaactaaagttatttaacgtgtaagtttacttctacccagtaattaaacaaatgccaaataagtacacaccaaagcctactaagtttcaaataacaattacaagacaggaaaaaattctaacactatcttataaagtcattaaataaatatatggccatcactttgtagacttcagagctttttaagaaccagttccatgagataagattaaggacaatggtgatgtccttggaagacggtgtgaagagctcctctgaaattcatgagggtccatggattgacaggttattaaaactattcagggaaaccccagggaatatgatttctttttcaattagtcatccaacaatgtttatctaatccctttctggactagtttctagggtctcagtggaaatggagcatacactaactgtagcgagcttgaattaaggcaactgagacactgagacagagcagctctgttaaatctcatacaaaaagccaatcgatactgtgacgggaagtgaattgtacagacattggaaggtagatgattcctagggaagggattgtgatagtcagggaactgatgatgaaatcaagggctaagttggcagtggtagagagagaggaaggagaatggattatattttggaggcaggtttacaatttgttaatttggatgctacaggatgagaagaatcagtggccctgttagtattttttgctactgttacttagagggcagaagttatgaggcgagtagacaatttagaatagaaggtacatgcatagaatctgagattcatgagttacctgccacgataggtttgagattccaaagatatctaaagagggatgtcaaataaccagatatgaagaagtgatttgtttgtttgttgttgtttggtttgtttaggtttgactaacctttaatgtaatcaggttactctccagatgagcatatcagtctacctgagaatacgaagatcagtttgtccaggttgtaagatacctggtcactcatgccatatatgttcgcatctttgcttatatattcttctaaagaggctacaagtgaaaacaagtaccaaagaaattatccttatgaccaaccaacgtttaacaggaatctattacaaagaagtcctaatcaaggtacgagaatgtctaggtcttcagtttgattccattgataaacatgttggtttttatgacaataccatgcactttttattactataggtagtacaacttgaaatcaggaatggtgatcccttcagatcttcttcttcttcttcttcttcttcttcttcttcttcttcttcttcttcttcttcttcttcttcttcttcttcttcttcttcttcttcttcttgttcagaattgttttagctatctcagggtttttgtttgttgttttttcatatgatgttgtccttttcaggtctgtaaataattgtttcaatgttaatggtgattgcattgtatctgtagattgctttttggtaggatggtcatttttactaacaatccatgagcattggaggtttttttaatcttctgatatcttcttctgcttctatttcattaggggatataagtctgtttaaattatttatctcaccttgatttaacttttggaatttgtaattatctatttcttttggattcttctaacttgttgaagtacaggtttttaaagtatgtctttatgagtctctgtgtttctttggtttctgttgttaagccttcccttttacttctgattttgttattttggatattgtctctctctgccttttagttcatttggataatggtttgtctatattgttgatttaagaacttagtctttatttcattgactctttgtaatttttttctttgtttctattttattgatgtcagccctcagtttgattatttcttgccatccactcctcttagatatgcttactcctttttcttccagagctttaagtgttctgttaagtttctggtctctccagttgtttttgtttttttgtcttttgtttttaatgaaggcaattaatgccatgaacttgcctcttaaaaccactttcactgtgttgcaaaagtttggatattctgtatattaatcttcattgaattataagaagtcttaaatttttttctttatttctgccttgaccaattttccattctgtagagagttgttcagtttccatgaatttataagctttctgttgtttctgttgttgatatccagttttaatctgtgatagtctgactgagtgcaggaaattttttaaatgttcttgtatttgttgaatcttgctttctgtctagttggtcaattttggagaaaggcccaagaagtgctgacaagaagatatatttttttgtgtttaggtgacatgttctgtaagtatttgttaggtctatttggtttataatgtcttttagctctggtatttctgtgtttagtttttgtctggatgacctgtccattggtgagagttggagagctatgtctcccattaacagtgtgtaggtttaagctgtagtaacatttcttttataaaagtgggtgcccataagtttaggtcataaattttaagaacttaaatatcatgtggattttggctttgatgaatatgttgtatcctcccctatctctttcaactagctttagtttaaagtatattttgttagatgttttttctttttatcattttgtatggcttcattttgttagatattaaaatggctataccagcttgcttcttaggtccatttccttggaaaatctattcccaaccctttaccctgatgtgatttctgctcttgatgtgagagggtgaatttgtacagagagattttggcatcactatcacatagttaacttttaattttaggatctagatacaagttttcaaggcccaaatgtaaacagaaagagaagaatattgagaaaataacactaaacttgtggtggtttaaatttgaatgcctctaataggctctattatatttggatatttggtcattagggagtgatgctacctgacaggaattagggaggnnnnnnnnnnnnnnnnnnnnttgtactagagttaggtaaatttgtgttaaaagttaaagtgaaatggttctattagcctatatgaaacttttactttaaagtagtaactctgttttaccaatggccattctgttgaaaaacagctcctttccccaatttcagtatcgaagaaaaaatatacttaggtagctagctacttgtaaattgctccaagctgaacaaagtgcttagaacttgtaacttgttcacaaaattcatgctaaagaagattaaaattaagattattgaatagagtctcacaagtatttcataattcctctactgggctcaaggacctaatgacagctggtgagaggagaaaaggaagaccaaaacagttatataaatgtgcaatattattttagcttatgaaaccttgtgatggaaaagatgttctgattccacatagagatattgtactgatgggtgtattgacattattgaagtaaagtgagggttgatcatttttgcagtgtggtcctgaataggaaagcttcacctgtcttttgttgatgataggattgctgctaaaggatgaaacaaacaattagatgaatcactactaccattattattgcttgagaaaggccgaataactaactacccttcatgatgggtgcaggtggacatgcaggcagaagtgcaagtatgatgtaggaagaggtatagaggcaagtgcagatgtaaagacaggcggaaatgcagtgccagaaaacagacagagtaactgcagcttccttcttcctcttggactctctcctcctgcaagcaactgcatcttcactcctgtccaggctatttctgcacgagaactcttgtccttgataaccttgtagaagacccagtcctctggttcttacaatctttctttccttcctttaaaacaatctacctcctatttatttttcaatattctttgagccatagatgtaagggttgcaaaatgacgaatttcccagacttagggatcagaatgatgtcgctgagctaagatgaatgtatgtcctacaggagacccaagggaggatttgcttttctattcttctgggtcccacaggctgcccatgtttcctggcttatggaagattgctcttccctttgctgtagacttataaatctctgtctctgccttccttttataagaacttctctgaattggtacatttacacaatggaatactactcagctattaaaaacaatgacttcataaaattcacaggcaaatgcatggaatttggaaatattatcctaagtgaggtaactcagtcacaaaggaacacacacgggatgtattcactgataagtggatattagcccaaaagttcagaatatccaaggttcaattcacagaccatatgaagcccaagaagaaggaagaccaaaatgtggatgcttcaatgccttttagaagggggaacaaaataactcacaggaggaaatatggagacaaagtgtggagcagagactgaaggaaaggccatccagagactgccccacctggggatccatcccatatacagtcaccaaacccggacgttatggtggatgctgtgaaatgcttgcagaggaaagcctgatatggctgtctcctgagaggctctgccagagcctgacaaatacagagggagatgctcccagccaaccattggactgaacgtggggtccccgatggaggaattggagaagggactgaaaggagctgagggtgtttgcagcctcatggggggagcaacagtgtcaactggccagacgcccaggagctcccggggactggaccaccacatggacacatgagacccttggttctggccacatatgtggcagagggtgaccttgttggtcaagggaggagaggcccttgggcctgaggctgtttaaaaccccagtgttggggaatgccagggagggaagacaagagtgagtgggtgggtgtggaagcagcctcatagaggcagggggaggagaaatgggatagggggttttggaaggggagacctagaaaggggtaaacatttgaaatataaataaagaaaatgtccaataaaaaattactgaactataaaaggaaagaaagaaagagaaagagagagagagagagagagagagaaagaaagaaagaaagaaagaaagaaagaaagaaagaaagaaagaaagaaagaaagaaagaaccaactactgtgttgacattgggtctgtgtggataatccaggagatattttcacctaaaatccttagttcagtcacatctgcatagtcctttggtcatggaagatgatataggctctggggattaggacagaacattttagaaagcccctcatttagcccatgaccacattcactgttattgcatcagatagtcaaggaaaaaatgcgaagccgaagcaagctttttcttcctctttttatttaatatattttcatacagtactttttagtcatattctcccttcccacgactcctctcaaatcctccccacctccctacccatttattttctatctctcaacaaaaatcacacccacaaaacaaaatcaaaccaagcaagaaaaaaaaccaacaaaatgaaaagctcacaaaacaaacaaaggaacaacaaccacaacacatggggttcattttgtactggacaatcactccggagcccagggcctgtcctggagtatagctggtgttctcagtgacagtcaactggagattttgctttgccaacatgcaaatagtttcttggttaagggtgagattgcatgcccacttccccttctcagtgctgagattctgtttggcttcttgaatctgtgcatgtcttgtgcttgttgtcacagtctctgtgagttcacatgtacatttttccctttgtatctggaagacactgtttccttgaagtcatcaaacatctctgtctcttacaatctttcttcctcttcctccacatagatccccaggccttgtgggggaaggggtttttgatgaagacatcccatgtaagaccgagtacactaaagtctctcactctctgcacattgtccagtgtgggtctgaaggcatcttttaaaattaataacaagagctggagttgcccacaaagtaaaagttgttaagtagttggtaatgagattatatttgagtgagttaataatttaagaataccattttggtttaaagccagggtctatataatccaataactacccaagtataacttgtttgaaaccctatccagcgacagcaaactggacaatctaattatttcttttcaaaggcacatacccagttagaaaaagcgtactagaaagatcagaaggatatgtggtgatgagtatgtctccaacggcctttgtttttgagccactcagtagctccttccagaggtaaccagacaccaattttctccacctgagtcatcatttccttaccctgaaattatgttgattatttagaagtcttgctctagaatcatttctgcaagagttaatccattcccacttttaaaacagtatctatactggttggtcagccatgaggaacatttcaattgagccaggttgattgtgtgtctgcaatttcagaaggctgaattaggaagcttgttgcaagtttgaggacatcctgggcattggtagagttcaagatcagcctaggcagtagaatgagactctatctatctatcatctatctatctatctatctatctatctatctatctatctatctannnnnnnnnnnnnnnnnnnncccatcatgtatttgaatgcttggtaccagtcaataaactgttacaaggcatgtccttgttggaataggtatgtccttgttggaggaagtgtgtcactgggactggactttgaggtttcaaaagcctacaccaggcccagcgtctctggctttctgcttgctgccttggatcagtatataaagctctcagctctgcctgcaatttcctgtttgcatggccccatgctctctgccctgttgataacagactcgtctctgaaactgtaagcaagcccccagttaaatgctttcttttataaacattgccttggacattgtatttctttacagcaacagaacaatgactaacacacagtcccaggagataagacgcccttgtttggccttcataggcagaaggcatgtgaatgcatagacaaacgtgcgggcaaatcacccatacacatttaaaaaaaagaaaagcaagaaagaaatttctattaatttcttccaaaatagtcttgtttatcgatataaaacatgtttgtttaagctatataatccctatattgacacacatatataggtatttggtcatgctttaattttattttcacttgtttccttttttttgtttttgtttttgtttttcaagacagggtctctctgtgtagccctggctgtcctggaattcactttgtagaccaggctggccttgaactcagaaattcgcctgcctatgcctcccaagtgctgggattgcctccggagtgctgggattaaaggcatgcgtgaccacgcccagccatttcctaaaaagacaaataaaagagcaattgtcagcaaagcaggggcctttaagaaacatctcctttagaatccgagactttcctcaattaaatggtttgcctttgagaagtcagttgactttttgttggcttcccttgtttataaaatgagcataattatatagggcctacttcctagaattatgtgagttaagttaagtactccataaaaagatggtttggggttgaccagatggcttagcagaaaaaggagcttgctgctaagcttgatgacatgagtttagtctctgtcactcacctggtggaaggaaagaaatggcttctagagactcggggcaacttgtcctctgacctctcccttgctcttcttcccatcccctccatatgctctaaatgtgatttttaaaatgtgatatttaccaggtatttaacaattatgtttatgaagaactcttattgttgtataagaataatcctcctgtaatttgctttatcaaagtgtgttactggtggctagtggccctgtgtgtgtgtgtgtgtgtgtgtgtgtatgtgtttccctggggtcatgctctccctgtgtgtgnnnnnnnnnnnnnnnnnnnntacaggataaagatttgctactttattctatgtttgtttgtttctttgttgttgttttgttctttaagacagggtttctctgtagccccagctgtcctggaactcactctgtagacgaagctggccttgaactcaagagaactgcctgcttctgcctccccagtgctgggattaaaggcgccccactgccgtgcaccaccactgcccagctgctgctgtaatttttaactacaagaattcttttgacttctaattaattaaaacatgacattttaaatattggtatctggacagccttgaacataaaatgaagagaggattagataagtgcctatagatctgctcctaggatgtgctaaatgcacctatgcctccctcacacccagctctagagtacccaaggcagtgtatttactgattgaactttcattcaggtttgcattcaaggggcaatgttcacttcattttatcctacatacaagttgaatactgaaaatttgttcaaggttttgtaatagcgacctctactggctctagctgaggtatgtgcaagtggattttaaacacctgaagggagctaatagtgaattacattaaagtagggaatttagctattataatggctcgttctttaactgaataacttctagatgttagaattgaaatagtctgctaaagatgggcctgttcgttcatggtaggtccaccatgttaaagcacgggttagcagtgcaggccactgaggctcgtgacctggatgatacggactctcacatgaatgctacttgtatttataactggggttaaagtaaggacgaaataaataagaatttattggagttgatatttgcaagtctccttccatgaaactgtgaatgatgtttaaggtgacttaccagtcttgccattagtgttaatgaaggtgggtgcaggatatgatttacctgttaataaaaactgtccttagtcccttagtgacctaactaagaaactaacacagtgacaatcacagacttttgtttgcagtgtaaattacgtgaaaagctcgcgcatactctttatttcacagtaagctttaagtgctgagctgtatttgcttgttgcttagttattattccctcttttctaaggaacgtgttcaaaagagttttcctcatccaattgataagtgggcaatagctgatgcccaatcagccattgaaaagaggaagagacgaaatcctttatcgctgccagcagaaagaattcatcatttattaagggtaagctgaaataagccacatgacctatgaaaagcaaaataactgaatggtaaaatccttttacattttccagggattcatgttgaggtaagggggtgctgtggtagtgagtaaaggttggacaacgtggtttcatgtcacttcaaaccagtagtagtaaatcaaagacacctggaaaagttatattatagattttatttactccagggttgctagaaaatataattgtagatatttctctctttctggtcagagctaaatatcccataaagctttaaagtctgttagcattttgtgtagggctatctgtgagactgcagtgagggtctgtgtttttgtgggacaaacaagctggtcctgcttaaataagttaaccactttagtgtacccagaactagaaaaatgccaagaatcctaagagtgctagtttgggtttatttaccatgacaaacaaaataannnnnnnnnnnnnnnnnnnngtcttacattattgcccaggctggccttggcctgagtgctggcattaaaggctggcattgctacgcccgacggactgacctgtgctttctcctctcctgtaagacttcatcttccttgggaacttgtggctccacagacgcacatactctctgtgaagtctaataataggatcatttaaatgcttagtagcacatagcatggagggtgtttgttttgtttttaattttgtttttcatggaaagccaagagtgtgtcatcaggtaatataccatatgctccccacaccaagctcagactttgtggttaaaccacttacttacacactactgtgtactgctccagtactgtacacaaccagagacgattctgcttccctctgtgtgtacgcacgtgtgtcctacacataatagggtgtgtgtgtgtgtgtgtgtttctcatgaatgaactagtgaaaattaaattattaaatattggtagtgatgggcttcagtgaaagttaagctgggttgatactgtttaattttgtagttgattgattagattttactgtgtatgacgtttaaatgtgctttccttttaatttttcaggaggtcctcggttataaaattgaccaccaggtttctgtttacatagtagcagtattagaatacatttctgcagatattttaaagctcgtggggaattatgtaagaaatatacggcattatgaaattacaaaacaagacattaaagtggcaatgtgtgctgataaggtaggagaatcagcttctttgtgttgtattcataaattattacttatgatttattggatgctaatatactcttcagaaagaatagaattgtgcactgcattatgttttggggagagatttccagtaacctcatagcatacatccaggttgttactgtatggaaataagatagaggtggctggtacttaagtggctttttaggaaagaagatattttctgatgggattctattccactttcttcacactctggccattctggttatagattctacttatgtatgtattagtgtttattctaacagaataaagtgaaagagattatctggcctgaagaattaaaagtgttgtgatatttttaaatggagataaagtacttgatatttatgattacaactgaaaatgaatacaaagtgtttgctactttgttttaaatgtgtgtgtgtgtgtgtgtgtgtgtgtgtacagcgcagggattcagagaagtcggaacaagtattcgatctcctagaaatgggcgcacagagggtttatggtgctggaaactgagcccaggtgctctgggcaagctgtgagtgcttttaacagccaagtcacctctctagcccatctgctaaaagatttatttttattactgtggcacatgggaggggcattctgtgcacatgagcacagttgtttgtgaagaccagaagaggtaccagacccctgaagttataagcagttgtgaattgcctgacatggcttctgggaactgatacacttgtgtgttcttaaccactcgcctgtctgtctaaccctcttgcttgctactttttaaatgaatcatataagtaaaatattttttagtatctattatgtgctcatacagaaatgaggtacagaaaaatgtgtttaaaagggggctgggatctttctaactggtagagtgtggcctaggatgcataaagccttggatttggtttctggtcctgggtaaacagaatgagatgcgcgtgtgcaagcagaaggatcagaaattcaaggccagtcttggctacatagtgaccctatggctagcttcagttatatgagaccatatccctatagtttaaaaaatttttaaaaaacaatgcttcaaagttgttgaaaggtgacttacgttgtagcataaggtaaactatactgcagtgacactgtacagggccacaagagtgggaagggtgagtttcagcaagagtaaccgtggaaaactttttgaagaaactttttgtatgtataggtgtttaacctgcatacatgcctgtcgccatgttgatgcctggttgccatggttaactgattctctagaactggagttaagattgtgagccaccttgtaggtgctaggaatgaagctcaggttctctgaagaacattaattgttcctaacctctgagccatctcttctctaaagccatctcttcctccccccccctcccccacagggcatgtttgtcctcttgtgggggtgggggggatgcctagggcattaaccttcaagggagactacactattattactgacactttcattttacctctgactacataggtattgatggatatgtttcatcaagatgtagaagatataaatatcttatctttaactgatgaagagccttccacctcaggagaacaaacttattatgatttggtaaaagcattcatggcagaaattcgacagtatataagagaattaaatctaattataaaagtttttcgagagccctttgtctctaattccaaattgttttcatctaatgtaagtatattttgttatttttgcatgtgttgttaactttcagttcaaatttgaagttatataattcatgatttctaatttgtcctgatcacaaataaagtgctgccacagtttcaagagattaaacatcagaaattgaaagacagaaatctaaaatagactaattatgtaagtgaaaatgaaatcacataataatcaatttatctcaggggatagagcgtcttgtgtaggtgggagatatttttgattcagtgacttatttgagtcatttaagtgatacttatcaacagcagccgtattgtgggacaccacattcagaggagtcagcaacagtcctgtctcgtcagggcggagctggaaatgtaggacgaagagtcgtaatgcaagagtaacagcggaattattgggaacacaagagatgagccgcagggcagtgcccgtgctaaccgtgctagacctaaagaacgttcagtgatgagaacagtgccagctctggagctccaggcatcgcagttcctgggcattaaataaaacggagagcagctgagagcacagcccagtggcagagcacttgtctaatctgcctgtgaaaccctgggttcaatttccaccacttagtttgtaaatatgccaaacactacttattgagttagtttagatgtatgaaatgcatggtatttaaattgcttcattaaatttgctttaaaaaatagcaaaggagggataaagatatctgacacaaaaatcagcaatcaaatttgctaaatggtattcagtatcagagaattacaaatcgaaaccctagcgagatgcttgcgtacacgtcttagagaaagttaaaaaaagacagtgtcagacatggagaagaatgcagtgattgactgctcatgggtttgcaaaatttcaacattacttgtaagttataaattaaattagtaaaattggctggttttgtaacacatttctacattttctgacaattctgttctgttagttttttgcttagaagaaacaacaaggccacacaaaatagcagttttattttatagctcagtgcctaccagttgtgaagggagactgtgctttgctcacacaatggtcagcttttcaccaggagtaaagaatgcagggctgacgcatacatctgcatagctgaacctccaggactcgagcagagattcgtagatttgtctctctacttcctggacaataactgtctagtcacagggagtgagcactcattttctggctgggaggatggtgggagctgatacagaggagacataagggaacttaaaaattttttttcaattttttttttttttttttttagttttatgtgtgattnnnnnnnnnnnnnnnnnnnncacacacacagtagagagagagagagagagagagagagagagagagagagagagttttccttctctttgataaaataccttgacaaaaacaacttaagggagtcgtggtttgtttttggcttacagttcccgttcagcccaggagagacctggcggagaaggcatggcggtcaggagtgtgaggcctgcttgtcattttatagcctcagtccagaaggaaagagtgaacaggaagtggggccagactataaaaccgcaaagctggttggtccccagtgactacttcctccagcaaggctccgcctcctaaaacttccataaccttactcaaagtagcaacagctaggaaccaaaggctcaaacctgtgagtctatggtggggtgagatggaggagtatgggggtggcactttatattcaaaccacaatacatacatttactttgcatccatatcaaattgtgttgatacttaatttcaagcatgtgaagatccgggttttgtgtcactgaagtttatatagtctaagaatctcagtgtgtgtgtttgtgtttgtttgtttgtgtgtgtgtgtgtgtgtgtgtgtgtgtgtgtgttctttgaatagggactacaaaattttgcggctcatatgggtggagtcatccaaactacaggcccagccttgccagtgtggtgagtgaacccagatccagtgcttggagtaggtccaacctaatatctactccatctgcgagctgctggtgtgtgtgtggaggaggtggtcctgcagaaccagatccagagcccatcatcaccatcaaagatgaaaacctgaagcacagttgtgactcaagagggtggcactcctcaggaccttggaactgctccgaggagcccgagagatctatggagctctgaggggagacaagaaggtagctacaggggagtctgcagagcctacagtatccctggaacaactagagaagggtaaatcctatgggaagatgctttttagaaagtagacacctgaaattggaagggaagttcagggacagagccactggtacaggggagaatggcaaaactatagacacgagggtatgggagctatatgggaatccttgccacaacaaataaagaatagggcatgactcaataatagggtctgaccttggcctgctgacatgaagctgctactggggctcgtgatactgagagaagaaaattgctggacctctacactgctttcaggctgcaaacattatggtcctgcccgatgagcctagggatcgttggcatcaaaagcctggaggtgtgtagtagtttggagctcacaagatcaccctgagtctgggccacaccaggatatccaagatgaatctcagccacagttcagtgtttattatcataataaacagaaagaatagaaaccttgaaccaaaccaatgactccttgtaatgagtatttgcatataaagctgtttgggcaaatatgtatataccatgttgacactctgcagtttgcaatgccactccaatgaacaaatatacagagaggtgggaaagatgtaggaacagaggagtatgtgcctggcagagagaggcagaactagagatgccacggtggtgacaggtgaggaagaaggatgcaatgaagaggagagcatcgatgcggaacagggcgggcagggtggtgtgcagaagcctggaggtagcacaggctttggtcccaaacacactgccaagctgcatggttgccctggatgttcaagatagagaaaggtccatttttggattgggccttttctggaaagccctccaaggtctgtgctagccctggaggtcatgttgttatctgtgatccaagctactgccagggcccatgctggtgtccatggtccctgctgctttctaggccccattgatgcccaaggtatatgatctgtgttgccataggaagccagattgatgagtgtggcctgtgctaccacctgaggtcatgttgttgtctgtggtccaattggccacccaatagtcctgtcagtgtctgtggtgcatggtgtggctgggcccaagttgatatcgatgttatcatgtaaccaccaaaggtcatggggatatctatgatctgtgctaccacctgaagccaggctaatgtctgtggcccatgttggacccagaaacttgtgttgacactgactataaagatcaaggaaatatgttttgcagccttatcaatgactggaaactcagttgagaatgagagatatagacggcttctgtgagaacctatctccatcccccaacctcactacccatcaacgaaagtctagacaggaagtcattgaagggaactcttaaaattatttgatagagatgctaaagtatagctcttcacagctgatagcttctgatggggctggtgaacagcttgggattgggatggggaaggactcagttttcattaaagggnnnnnnnnnnnnnnnnnnnntagatttgtctctctacttcctggacaataactgtctagtcacaggggagtgagcactcattttctggctgggaggatggtgggagctgatacagaggagacataagggaacttaaaaattttttttcaatttttttttttttttttttttttttttttagttttatgtgtgattgttttcctgtgaaggtcagaagagggcactagctctccttggactggagttaatagatgattggagctgccatgtgggttctaggaccttaacttaggtcctctgggagagcatctattaactgctgagccatctctccagttctcataaggaagttttttaagacaagaaaacattgtgaatagtgactgttaggaggttacagagaggaataactgtatacagtctcaccaaaaagtacatttaaagtaggtatatctcattgcatacaaaccatacttcaaaattaacagaataaaaatagtaatcaacagattttaatagaacagtataaaatttatatggtctccaagaaatgtaggaaatgaccaacttattagcagcagtataatgacatttgacctgtttgcatagaatgttcccagtagtagatacgcacagcagggctctggactataaatagaacaatgggaagtcacttttgctaatgagtttaagttgtcttttgcagagatgaccttagtttaagtgtactgaaagccagtcagtggtaaatacattttacagtttattcacgtgatccacacacaggaagataaaattgctttaaatgagctttttggtgagatcgtatggactcatttatccttattatttaaccatgccattgtagagatacacaatactttcttgccttagacaatttctttatatcccatccacattaaccttcgccatccttattcccagaaagccagttattttatgatatgttaattaaaggttgatagaaaaattacatgaatgttagacagaaaacaagaatatcacagttgaatagacaattaaaatattccttcattttcccattacatgtctggtaaacttatgtatctagataaagctgtactttatcctgttctccagccacaacagactgaatgcagagacaaatagaaaagtcctgttctctgttaaactgtattgaagattagtaaagagagtatgaagatgttctaaaacaaaatgattggtagagagacatatttcttaattgtatatctatcactaaagaataaattttgaagtattttcttattgtaagtcattaaaattcctcaatatctacattataccttgattataaaataatttttttactgaaaagatatcttgttatacaatacaatatgattgaattaatttttctttctcctccgcaggatgtagaaaacatattcagtcgtatagtagatatacatgaacttagtgtaaagttactgggccatatagaagatactgtagaaatgacagatgaaggcagtccccacccattagtaggaagctgttttgaagacttagcagaagtaagtatatcaattatattgtcaattatatagcaagagaagtctgtctgtaagtacattggcattaaaatggggttcataattcctatttccagctcaagtcacataccgttgcttcttttccatcataggtcaacatttattactgttaccaggtacagaaatagttatcaagcactacgcccagtctcggtgtcactctgaaactttgatagaaagatcaaggcaaggccacccgtgagtgagaaaagcttgggtgtagggtcctagtcctcacagctcactgctcagatcactgctgtgtattacatgtgtggctccaggcgagttaccgatattttgcttctctatacacatttgtaaagcaagaagaataacaataagaagtctcaaattttttttttgtaagttaagataatctcccttaaatatttggctaattccctttacatagtaaaataaccagtacgtgatagccacatttgtttttagaattgaacaatgaggtgctaggaaactcagcccatggcatagacagttcagatcccatgggagtctggtaaccctgagtatctccaatgctaactgtgagttaattgtagtgagtcatcactggtagtcactctggggtttcttgctcttgtcctgctctaaagcccatttagtcttttagtataatggtgctgagcccatgggaaagaagagaggaaccagggatctacctctttaggtaaactctccccagcaaacatgaggcccttggtttagttcccagggccatatgaactgggtgtggtggtgcacgcctcgtaaccctcagtaatgggaaagtagatgcgggggtttgagaagatgggtgccattctcagctacagagcacgctgggcgtcaggctagatccatgtgaagctcttagagctctgtggaaagcaccaagaccaagggctgcttggggtttacaggttacaacctgtcatggcaaaccagagtgggaaccttgaggcgggaactgcagaagactggaggatagcagctctggcttgctcagcttgctttcatatctaactcagaacttacacccggggatggcatcacccacaacccacagagggcttagaacttcatgtcagtcaccaatccaggcaatcagttgggggtgtttttctcaatatcggttctctcaatcttttgtcaagttgacaaatgactacccagcacagaggttctatctcagaaagcatgggacaaagccagtgccctgggtaggaacctccaggagagttaaggagagaacactgctcaaggggctgcacagcacagggtcagggatgggacagagcaagaggagttgtcttgtttatagtctatagttggcaaatacaagaaaacactaaaatattaggtgagttcacagtatcggcttagagaaaggacgagcattcctatgctgtcacacatgccagaacatagaactttacaggcagaaggcaccctgtctcagaggcacagtaagcatgtggggcaagcgcgatggccccgcccataaagcactgtgcaggcctaacacttggtacctagggtgtcccagccttaagagtttaatccctagaacgtgtggtagaaagagaactgacccccaaatgttgtcctctgacctgtgcacactagtacacacatacacatacgtgattctactattactactactattactattactactaatgataataaaactcaaaaacctaactaaaagtatataagacctattaagaaaaattgtaaaatatttaggttgatatggaatgtacaagtacatggtaatacattctatgttgtgtttatggatggaaaaactcagcattgcattcatgttagtcattcacaagtagccagagcacagcaagctgatctttaataggtacaaatgaggtgtggtccatgctcataatcccagcactgaagccaggctttcgttgcaagttctagctatccaatgagatcctatttaggttgtctcagccactgcctaccacccactcagaagaatgagggaagcacatggaggagatttgcttcatcacagatttcagtttattaaataggaatatcagagttgctaccagtataggcagacaacgaatgaaacagaatggaattacagttttgacatatggcacagattgcattgatcagtagggacagaacaagttgataattaaattacgagttgacccaaaatgtaaggaagcaggaaggcctggagcgtcacctgctacgtgacactgtatggtgtccagagccctagtccagagtgttcagatatggtattctggctagtaactctttcttaagtactttaaaaacagtactagaggtaattaatacataatttgtattttatcttgaatcgcttgtcttatttcttacctactacattcatccactgatcttctagaaccagccactgcagaggtgaggcgctctggacctgaagctgggtgtgtgtgtgtgtgtgccatatagtagaggtcggaggacagtttgttaagtcacttctatccttccactctgtgggtcagggattgaactaaggtcatcaggcttgtcaccagatgtgtcaccagatgtgtcaacaggtgtctttgctcaccgacctttgtctgtccctcctgacagttttataactggaataggccacaggatcaaagatgggaagggccctactctctgtgctaaaatcaatagacctactctgtgtttcatcagcaatcatcgtactcttttagaccttgctatgagtgatatctcaatggtgattggtatattaatgatgatggattttttttttcactttggattaagttagttttatgaaaacagaattttaggtgatagaaacagttacttcttatttacaaaatagggaagtaaatgtctaacaccaaaaatattttttagatttattctatgtattttgcttctatgtatttgtaccatatatgtctctggtacccccagaagcccgaagaggacatcggatatcctggaactggagttgtgatggttgtaagccactgtgtgagtgctgggaaccaagcctgggttctctgcaggagcaatagtaactgctgagccatttctccagccctccccccacacccggaagactcagtccctaccatcagcactctaaggctcgagtcttacataccgtctgttgtccaggttcagctgtgctcgtctctagggccgggtcaggccactctcagaacaactcctggttcacagaagcggaagctgtggccgagaagcagcacagcacacagtgactctgctgctcagaagaaagaactcgtggattctttcacttgaggatattagatttattctgttaaaattataatggccattcggtttttatttggagcctttaggaggaataggtttctgtagataagtttataatttaatcttttgtattttgtgtggtggaccatttcttatttatgactatttttactttactgtctcccttttttcaggaactggcatttgacccgtatgagtcatatgctcgggatattttacgacccggattccatggccattttcttagtcagttatcaaagcctggggcagcactttatttgcaggtatagtgattgttaaattgcacaatgttagaaaagtaaactctaaaaaatattaaatcctttccctttttagtccataggcgaaggcttcaaagaagctgtccagtacgtcctgccccggctgctgcttgcccctgtgtaccactgtctgcattactttgaacttctgaaggtaaaaaaactcagattgttatttataaagcattcaagtgtcatcgtttgccacttcacttgcaaacatgtgagcatccacacacattagtctatgttctttttctttgtttagctgagaagcaattttaagcacgttatccaaaagactaacgtgctttctgactacttaactgtaaagcagttgcccaggtttatttattttacttttatctgcatttattttatgctgactttattcgtgtgccatgaagttttgtttcttcagtttcttctggggtatctttttctgtgcagcctcctcttctggctttggaacggtcagtgaggatcatgtcaatgtggcaggggggccatgtatgggttaacccggccatgagctctggaggtgcgtctgtctgtctgtctgtctgcctttctgtcggcgtctcaggggccgtgttcacctggatttgctcagtgactagaaatctgtctaaacccttaagttcagcattactctctcatttttaagtgtgtgaagcaaaaattcagcactcttttggctactgtccgtgtgtccagccccactgtttggcctgggcacacctaccgccggaacggcacacattgcttctttaaagtgacatccttcagatccttggtggctttgtggatatgcatacccttgatggcctgggcagtctcccgggtgttcttaaagtgaactcgaaggtttgagcctcttgatttgtatgattttgtggggttttctgggtcaagccagtgttgaaccatcttcacaggtcacctctggccacttagaggaagagcccagttttatttttaatcatgtggtctgtttgcttatatggtgattctttgaaagcaactttgtatatatgcatccacatctccatctgaggacctcaatagctacagggactctcctcagggacccaatatgaaaataaggctaaagtaataaaaactgttagttcaatagattttcattgttcagcactgcagcaatgtctgttaaactcagtgttgttattattttagaagcagtgaatttgtataccagtaaaagttctccaactgatcatagttcaaaatattaagtaaaaaaattctaaaggattagtagccacataaaacttgaaaattagtttataaataaaagcaagaagctttaatgagaatttgaaaggttataaaatccaagcagtttaataaggaaaattaaggattgcaagatggcactgtgactggcactcgtcacagaagcctgacagcttgatgttgacccctgaagctcacatgggaagagagaaccagtgtcccagagttgtgcctgaccttcatgtccatactctcacacacaggcgcgcacgcgcacacatgcgcgtgcatacacacacaagagaacttataggatggaaagagagatggcttagcacttgctgctcttctagaggacctgagttcagtttctaacaccacactgggcaactaacaaatgacctgtaactctacattcagagagctccagtgtctttgtctggcctctttaggctcctgtgcacacacagcgtacaaacagacacataattcaaaatggcttttaaagaaaaagttagttaggtaccaagttcaaccttgtctcaaaacaatcagaaaggccagcaaggatgtgctactactgtgtgagtgactcctgggacccatgtggtagaagggagagacttctgcaagttgcccttcttatctgtctccatacatggacacataaaagcaagcgtgtgcacactctaaataaataacttactttttaaaaaggaatgctttttaaaattatctggtatggtggatcaaacctatagtaccagcacttgagagagactaaggcaggtagattactatgaatttgagaccaggcaaagctacatagagaattctaagccaatccgggctacagtatgggaaaccttgccttggggaggtgtgggagatgattttcatatagataattaagacttctcaggactttaggatgtaatgttgttctactgtgtgtgtgtgttcctggttcatagtatgacttgccttacattgcaaagcgtatatgatatggtagtacatggaacagggcacggatctgtccatacacacactcatcttttttccattctggattctttcagaatgaatgcatgacttgaatttttatttatttccatgtgtacacacaagcaaatgcacacacaagtgcaccaagtgtacatgaggccagaggacagctgacaaagttggttccctcctgccaccattgtgggtcctggggattaaccttgaacccttgttcctgtcaagctgtctgccagtcttactggcgcttcagctgtgtctgttggtttaccgctcagctcatttttgtaggggaggattttcaaggtgtaatactgtgtatgtctgtaggcaggtggtgcataagtatgcgtgacaggagtccacaccggggagctgaagaagtcttcagttattcatcaccttagttttgtgtgtatctgacagggtcttttattgaatgtagaacctgccaattcagctagaattgctggccagccattttaagggtctgcttgtgtctgtcttgccaatgctgagattatagctgcctaattgtggtctttttgtatttttaaaggcagggcctctgtatccctggatgtcctggaactcaatatgtacactagactggtcataaactcacagaaatccacctgcctctgcctcctgagttgtgggattaaaggcgggtgtgtagtgtctaactttttaagtggcatttgaacttgggtcctcatacttaggcaagcattttaccaactaagctattttcccagctgcctcaggttctgttttgagatgctggtatcatgacatactctaaataaatggagaactggtcaatatacactattagaaggtttgaaaagttgtatgatacaccaatgtatttgtaggttacttagggaaactattgaagaggttccaatgttcagtgaaccaaaagatgccccccactgcaccctctgattcttggtgttctattttcttttctttggagaattgttatgaatcctaaatgcccatctatgtactcagtaattctggagacagctgattgcatgagattgggcaggtggaaccgaatcataatttatctgtatgtggaatgggttcagaatttggtgacactgacgtctttctacctgttgtgcagctagagaaaagtcactttatttttttgatccctggttttcttgtttataacctgcttatttcacaaggtaaggcattcaaacagtgcatttgtaaaggttacttcatgaatgacaatgacatcggcacttgcatgttttcagcactggagatgtttcttactgtctgtaatgctggccactaaccacacccacattttcctgcccaccagagctctgcttttctttatagtctctgtctttgttggctagtgtgggccccacccatcacaccacctttgattcttctctcttccttactggcagcactcatgatttaacatcagaaatgaccatgtattcagcctcaagtgtccatttgtagtgacatcaccttcatatcactgtttagacacaataacaacttctttatatcatctttgtaattccttgaactctgagatggaaaggtacagttggttccctggcacctgcaacaggaagtctagattcttgagttccactgctgctgtctgtagttttatctcagtcgtcagttctgcccatgagcttgagcagccctgggtatgccagctccgtgcatggtgccatttttgttctttttcctcccccctggcctggtggaatccctctttttctaagcccccttttatttgagagtttgttgggttgcagggtcagatacccctttgttcccaagctgctgctgctgctttcacacctccttacagatctgtcatattggtattgtctgcctcgtcttcagacactatgttccctgaggaaacagaacaaagcctgtatgcttctgaattctgcctagcacagtacctggcatttaaattgtttattaaatgctcattaaataatgaggagcaaaaataggtattttctcaattcctatctgttgtagctttaaaaagtttaactgtaaatttatgtatatgtgtttatttgggaaacttagaatgccttaaactttacaaattcataggatagaattctgctgttatttgcctaacagtgtcagacaaagaaatagagtaatgtaatgtttcctgtgggttggggacattaggaagagatttgtcaacggatacaaaacttgagttaggactgaagaaggaaagaagtattaaactttatagtgttaatcgaaatatgattaaaatgaatttaataagcttactcagaaaatattaaatcacatggaagtataggattaatctaaggggctttgcctaactttgagttagcttcctaacatatgttacctaggtaatgtaggaagataaaggaaataggctctgacttcattagaatataagtgttctgcagttttcccttttttttttttttttttttttttgtaaatttgctttttcaaacccttttcgcttatcagaagaagtgagcatttgccacaagccttgaaatacaacctcggctccatctgcttaggtcttgtttgtggtgactgagactctgactctgtgaattcagaaaatgtggcttggggatggggacctaaaggccactcctagatgaatacatataagattacaacatcacagcccactctaaaggctcagggagattgtagctggggatggaccacttaagcattagctagggtctgtcccacactaaccaagagctctcctgtctgagtgcttgggtgaattccttactggattgggtctttttctcatgacagaaggaataataaattcaagagaatttcagcctagtgtagaacatgcttacagcatccagggcctggaacaaagattcaagactagccttcaaaatggaaaaacaaaacaaaaacaaacccatatacacatacatttatgcatacatacatacataacgtgtgtgtgtgtgtacacatacatatagtgcctatagcaataataataatattgtatagttttgaaaactgctgagcagattctaagaatttacatctgagaaaaatatttgacagtatatatttttaaatattttgtcaagcaccatattgtataccataaacatatataatttttacttgtcaattttttttgagacagggtttcattacttgtcaattaaaaagtaaaatttttcaaataaaaaattttattaagattttatttttaatcatatgtatgcctgtttgtgcgttcatgcgtgtgcaccctttctgtgtgaaggtgcctttagaagctagagttgttagacaccctgggactgcactttcaggcaactgtgagcaactgggtaggtgctgggagacaagttctggaagaacactatgtcctcctcttagtcagggccatctctttgatctaaattttgactgattttagtactacttgaatttttaaaattatttcctcaaaattagacagtccttaggcccttttattagttagaaacattaaagttaatattttatgaagtggaaaaaaaacttcctttgttgttgtttcttggagacagggtttctctgtgtagctctggctgtcttggaatctctttgtagaccaggctggcctcaaactcacagatctacctgcctctgactcctgacggcttggatcaaaggcgtgtgccaccatacctgaatcaatgtgagcttttgaaaaatcatatgctcctataaggtgacttttttatatgaaattttgctggctttattaagcaaatgtagattcttacaactaactgtagtgaccaaaactctgattactaggagttggttcacccaaacttaagcagcttcagttataccctcaagaattaccccgttctctttgcagtatgctgactccatcttactgaaggaaaagtgagttttctttcattttaaaaatcaggttaaagggggagtgggtgggtaggggattgggggggtgggtatgggggacctttgggatagtattgaaaatgtaaacgaggaaaatacttaattaaaaaaaaataaaacaatcaaaaaaaaaaaaatcaggttacctgatgcgccagaaaataaacctcttgcttttgcatcggggaaaaaaatcaggttaaagtctgttacgtatgtagtatgtactgttatgtagtatgtactgctgatattttctaaggctataccaaactataaacttagtggctgaaaacattagtcttcagtagtttattctttctgctctagaggcagagagcaggagttgagagggcctgcatcttcgagggtctaaggaacagcctcacttgctctgaggaggcagcagccatcagggttcccctgagcttcatggagagcctcgctctggacgctctggacgctctggacgctgtggatgtggcctctgcctgcatcagatcaggcacatcacttcccactctgtgtcaggcagcgtctcgctgccctttcctttctcacagtcgagctttagggttcggccataatctagcatggtttcatttgattacttaaacctgcaaaaacctatttctaaaaaggttttatttatttcagttaattgtagacattagtggaaaggtctttggactaacagtcatgacccttaagttctggtctttcctgcctattcatctaagtaaatgttactcattttatattatgttggagaagagtagcttctagaaatacaatcattaattcatatgttccttccttcttaaattagggaagccattctagctattctgtgttctgattaacgtgaactttaatcagttacacactgtggagggggaaaggaatgtaagtaactcagtagtagaatgcctgcttactatgaacaaagtcctggcttcagtccccagtaccacaaaaaccatctacagtttgttttgtgttaaaattgctgagtcttattcttgaaaatacttctgtaaattgtgttttctcccccccccccttttttttttggttttttgagacagggtttctctgtgcagccctggctgtcctggaactcactttgtagaccaggctggcctcgaactcagaaatccgcctgcctctgcctcccgagtgctgggactaaaggcgtgcaccaccacgcccatccggctgtgttttctttagaagctccttcacagcatctgtgccgtggtttcctgggagccgctctgtccgtgctgtccgctctgtccgtgctgtccgtgctgtacatggactataccatcagtactgctttgcctttgtttccttctgatagtcaggggccaggagcagatatgaaaaagcccagctctgtagcccagctagccttaaagttgaggggatctttctgcctcagactcccaagcgctggactagttatgggccaccacatcttatgcaggggcctccctactgcttatatctaaggaacccaaaagtcatcaagggtatgagtgactccttttctatgaaaaggtaaatttgggggctggagagatggcttagtgagcactggctgctcttccataggttctgagttcaattcccagcacccacatggtggctcacaaccatctgtaatgggatctgatgccctctctggtgtctgaagacagctacagtgtactcatacatagaataaatacatctttacaaaaacggtaaactttatcatctggataggccatacacattgtcattatcttctgcacagggcgtacacactcttactatgctttagaatgccttcttaggtgaggctgtgcacacacaataccatcttagtagagttttggtgttggtaacggtcgctgtggaaagcaatgagaacgcttctttgctgtcatttacatgactgcagctgctttgtttctgtggcaagaataagccgcctctttaaggataattagctttgttttacatgatttcctaatttaaatcaattaaaaaaaaaaagaatggacagacagaaaggtttttattagttgtgtgtgatgaccacgagccttgaaccccaacacttgggagatattcagtcgctcctctgagtttgaggccaccctagtctacatcgtgagactatctcaaaacagtctttcattacactgaaatgcggaacacttgcctgttaactgtgaggcaaaaagaacatttaaaagtatttcatcagagagcttcatgagttcaaaaacttaggggctggagtaagctgtgctgacccagtgcttttctagcacccgtataaacagtggcacagacctgtaacactagcactagaggggagccaggcctcaggattgggagttcaaggccagacaaaggcatacaaaactgtgtctcagaaaaaagaaaagaagaaaatggaagaaaaaaaaaacacacaaaactttgggtttgtgaattttaaaacactaacagagaggctgacggggtggcttagtggttaaagagcactggctgctctcacagaggacgcaggttcagtcccagcaccaacatgccagctagaaactgtctgagtctctatttgaaggggtatgacagcctcttctggccttcaaggcacattgtgcacagacatacatgcagccaaaatacccatacacagaaaataaaacacaagcagtattgtccatatgccaatatattcatatacaaaatgcaagttaaatgatacatgaaggactctgaaacagattttgaattgaaaaccagtgtatccctaaacatgttttgggtatatgctctatattagaattctgtacattgggaattctgtatatttgctgagttgtaacaaaaacaggagccagagaggtggctccctagggaagagcacttgctgctcttccagaggacaagagtttagttcctaatgtccatgtagggtggtttgggaacatctgtcaccgcagcactgtcatctgacctatgagggcactgcatgtataagtccatatccacacccacacacactgcactcacatgtataagtccatatccacacccacacacactgcactcacatgtataagtccatatccacacccacacacactgcactcacatgtataagtccatatccacacccacacacacttaaaacatctttaatcagaacaaaatacagaggggacaatactctccctattggcacatcttgctctgtatgttaatgacttgaatgcttctggactttacattttaaagactttttaaaaaataatcatttatttatgtcgggaggggtaagcagaggatggagtagcacgtgtttttggagatcagagaactgcttaagggagtcatttttctccacccaccatgtgggtccttaaggagaactgaggctgtcaagcttggcagcagctgccttgctgagcagtcctgccagccctggactttatttttgattctatccttaagagtatccttgtgcctagagccatgcttaaactcctatgggagtcggaaacagttctgtgttgcctcttctcaggaacatgaccaatgagtacatacgtgacactgcttttttcaaggcttaacagttctttctaaagtggttcctcgtggttttcacatggaaaacttggtgatgtgttactacacagtactacacagaaaagtaaagttctcagagacagagccttctgcttacagagctcaggctgaccttagactcccgctacagtgacacgcatgtgctgccaaaccttgcagaaacgataataagaactgctgtttttctttggagacagcttctcgtgtatccgaggctgccacttcttcctgtgtcctttgattatctgcaaccatgtctggactacatggtatcagagaatagaactcaaggctttatgcaaactaaacactaccaggctacatcagcctagaaaaatgcttcaaacaactgaaaggctggagaggtggctcagttgttaagacacttgttgcttctgcactggaccctagttcagctcccagcatccacacaatgggttacagccacttgcaactccagtaccaggggatctgaaattctcttctgacttttttgggcatgaagcactcatagggtgcactttcagacattcaggcaaacactgacacatgtgaaataaattgaaaaaatatatctatagaacatttaaaattactgaagtagggaaagctgaatgagcatcatttatccttaaataaagtgaggtcctccttctgccctttccacagcagttagaagaaaagagtgaagatcaagaagacaaggagtgtatgaagcaagcaataacagccctgcttaatgtccaaagtggcatggaaaaaatttgctccaaaagtcttgcaaaacgaagactaaggtaaatattctcactttaaagtctcttcctttctatcctgaaagttgtggtacaagttcaggagccttagcccccccccccccccccttgagtaaacaatgaagaaaacagtattagtgacaagcttggtctttcagaggaagtgacatcaaagccaggagagtttgttattgtttgaaaaacctttcatatttgtgcattttccctgcttactcccagacaggacctcctgaggagcagctggtaagctggaggggacggagcacagtgtaccgggcagagctgccagcgtcattgttgtagcagagtgaaattagcagtgttgcttagtttgggaattgtataactcagacattgattcagttagcaggtctactttcccattataacatgtgctgtatgcttttatctttgagtcttgtgcatttaaaaatacttaattcatatctcaatttttttttactgtgttgggctactttttaatagttatctttctaaatgtttactattcaagacagagataattgttttgtacctgagtttatatagttgaacatcactgttatttttataaatctgaaaaaaaaatctgtgcttagttcttatagttatgattatttgtggagttagtaaatatcacgtgagtgatgttgtaaattatattttgccctgtcaccttatctgcatgaactctcagatctgtcttccgtgtgctaacagtgtctttccctttaccccagtgagtctgcatgtcggttttacagccagcagatgaaggggaaacagctagccatcaagaagatgaacgagatccagaagaacattgatggctgggaggggaaggacattggacagtgttgcaatgagttcataatggaaggaactcttacacgtgtaggagccaaacacgagagacacatatttctcttcgatggcttaatgatttgctgtaaatcaaaccatgggcagccaagactccctggtgctagcagtgcagaataccggcttaaagaaaagttttttatgcgaaaggtacagattaatgataaagatgacaccagtgagtacaagcatgcttttgaaatcattctgaaagatggcaatagtgttatattttctgccaagtcagctgaagagaaaaacaactggatggcagcactgatctctttgcagtaccgcagcaccctggagaggatgctggacgtaacggtgctgcaggaggagaaggaggagcagatgaggctgcccagtgctgaagtgtacaggtttgcagaacctgactccgaggagaatattctattcgaagagaatgtgcagcccaaagctgggatccccattatcaaggcagggacagtgcttaagctcattgagaggcttacctaccacatgtacgcaggtaagaaacacgcggtggctagaacggtttcctgcttaaacgaattgatttgatgggtgggttactgtccctgaaatagaaaactaacaacaagcaaatccttctctaggagaggagcattggctaaaaccgtcactctgtatttctttgaagtttttatcttttctatcatatttacaaagagaaacggtcacttgtctttaacgttacccagtaaaaagcagtagaaataagaccaagcctcaacatgattgtctaaaaggtagaattactcagtataattatttttttcttattctataactgggttacaaactaagtgatgcattaggtattcacccaccatcaaaattgtgctggtggcaaaaatgcgtattttcttaatctccattcctacatctatttaggaaatctggaagccatttccatttcagtattttgttcttaaagttacttatgcaaacagttttaccttaacaggttttaaagaaaacctagagagatgctaggtagaattcagtacagtggttaaggggtaaagggcatactgagccgtcttgtgtggtctgacacacagtggggcgtttgatagctgccatttcagaattgccgtggagcagatagcgctccgcttagactttgccccttcaccagatcagggtccctttatgtcccagaaccatagttttcatctcaaaaatgaacatcagatctacaccatagtgtgttgtcagaaaacatacacgaaatactgactatgaaagctatttctaagtttagatggaaatttttaatgtcttttctttaagagaaatgtgtgatttaaaattatataactcatcatatggtattcttaaatacctgactatgaaaattaacctctccctatactcctcattcaaggatattcctatttttaggaaatgcaagtttctggggaagaatatttattttcctgttttttaaaatgtcctctaagtgagttctgtttcctttggaagctattctggtgctagtaagattaactctcaaaaatatcctttagttttcccactttgtaaaactgaagatcatttaacaaggacttccttcccttcaatttattaaatacaagtagcgcttcgtgtggttgggaactaccaaagggagagaaggtaatttgagtgctgttttttattagtgatctcaaaccgctttaaaatgtgtggttgcctttatctgtatagttctggtatacaagctggagtttagttctgctttaggtatctggactctttgcaggcctttcatagtacatcgatagtgttttccaaagtccagttcttacaatgactcagctcctctgaacacgcatttccagtggcagtgcccaggcgctgaggcacgctgaacatgtcatgtatgttcatgtgtatgagtcacgtcatcccgggctccactttactgtaaacttcaccagggactctatagtcagtgtgtttactattcaaaaatttaaaaaagaaaatttaagctgcctagaagttacataaaaaatagattacctttcttgttatatataaagctattttaaagagctacagtttttagtaattattataaactattcacataatcttcatcaaccttctgtatactgtttaaaattataaaataacaaaaatactttgttaacccaaaattgtggttttcaaatactctaaataatttttcaacaataaaagttcaagttgtctatcttgctacattgtctttgtttttaaatcttgtgaatttaaaacctgttcactgtatcctcaatacagcttggcttgttttttatggaaaggacaaaggaaaagccatataaactcaattaaaaaaaatcagcatgtggattgatggtggcactgcagtgtcacagggcctggctttgtgccctgggtaatcttttgaaggcgtcattcttagagtatttaggttgtctattttacctctgcttgtgaaggacacagttttctctacagcatggtcagcaatgatcactggagactaaatagggcaagctgctcttttttttttttttttaattaaatgtattaattatttctatattctaaaatttacattctgtttctaaaacatttctgtaattttctttgctgttgtatttgacaaaaataatttataattagcatttacaagctacaactgatttatttattgatttgctcttttcgagtgcgtctacacttgaacacaccccgtcagtagatcggtgtcatgtggcccagtagtctttacccctcgtgtgtgcaaagctacctttgtcatgatgtcaccatgcacacctaaggactgtactgctgtcaacttacgcaaaataaagtaacatttttatggtcttaaaataacactgaaatttctaactttataccgttttgatgaagtctagtttactgagattgaatgagattactttaccttttttttaagatttctttttgtctctctgtgtgtctatgcaccatgtgtgtaaagtgctagtggagtccagaagagggcgtcaggtttcctgggacttgctttacactcaggtcctctggaagagcagctggtgatcttaacctctgagccttctgtccgatcccgctttgctttttttatttaaacgtatatgtgtatgtgagtacactgttgctgttttcatacaggctcgaagagggcatcaatcccgttatagatggttgtgagccaccatgtgggtgctgggaatcaaactcaggacctctgggagagcagtcagtactcacttagccatctctccagtcccctgttttactttttaaaattaaaagaaaaaaaattaaatcctccagtattaaagaaaaataaaaccaagagtgtctgtgttataactaagtttttttacattgttctgaagtttaattaaatattttatttcataaatatgttactgatataactggtgtccaccagcaactttataagttgtgagcttgaagtaagtgaaattactgctattaatttactcactgttctttgatgtctttaacctgcagtatacgattatttttttaacctagactaactatcccgtcaagcccattcttgccttactatggcagtatagagtgtgcttttgatagacacccatggatctgtaagatataaaatgagtattgtaaggtctcctccagctacaatgacaacatatgtagctatcacttgttagatgattttacgagcttttaaaaaaagattttaagaactttcatgtgcatgtctctggagtgtgtatatgcagtgccagcttaactgatgtaaacaaacattagtctgtgtttttcttttattcagtctccccaaataaaaagggggttttttgatctggttaattggttattagggtgtttttgttaacatgcagtagaggttgtggcttacactgaaacaaaagctaaaattaataatgcttttttattatatagtaaaagacattgtatataatacatgaggaagtctgataactagtggtgaatatagcacttcgacatcatgtagagtattgtaagttacttagacaataaaaattgaagagaaattgactcacatttgattagttcacgttcagcttggcttcggctaacttgatttctcaagtgttacaacaataacttagacagagctacacacctgtatgccaggagctgtctacacctgagtttataacagaagccaagacccctgtggattgtttgagttgctagaaatcttaccagttaattacagaatgaaatctagaaatcaatttctttttaaaaaatatttatttattgtttatttatttaatgtatatgaatgctctgtcttcttaatgaaagccagaggagggaatcagatctcattacagatggttgtgagctaccatgtggttgctgggaattgaactcaggacatctggaaaagcagccaatgttcttaaccgctgagcgatgtctccagtccctagaaattaatttctattcagcagaatatattttctacccatgtcccactgacactttcaaactgaatttttaaaaactattttaatatgttatatttttaaaaggtatacatgatgaataataaaaatgacgttttaattactctcatggtggctattcatgtggtgcaaatgcaggtatactgtgaggagatagagttttgttttgttttgttttgttttgttttgtttttaattgaaataggtagtaagttctgagcattgtgatgagcagttctgtatgcagttggattctatttgtctcttttaattcagtccctggccggtactcagccttgttgtactttactttgttagctattgagagaggacaggcagccagcccggcatgttaacttcatcagccacctgagtgctgggattacaggtgtttgccactaggtttttccctgacagagcctagttaatactatcagaatagtatgctctataaataatgctttctggaagaatgtgtttatataacatgaattaaaagatggataatgtgcataaatgattacagtgtgacagtctaactgataacttgtctatcatccccagtattactggaccctgactagatcagacttgggggaattcaccttgaacactggcaggaaaattactcagttggattattttaaatttggcagtgatacgaagacagtctccttacctagagtaacaatcacaaagccgtgcgacaagggaaaggggagcaggaagttccttcacagagttctgtggacactgccctgtagctaacctgagctgcagcaactctgggagaaaaaggcttggtggtctggccatgagtggtagagaatgggctgctgaccctgaggcaggagggcagttaagttagctgtgagctgtgccacaccgtttcctcgctacttttgtagaagatggaattaagaacacttaagacactttcctgatgtatttactgctgtttttgttctcaaatataaaatgttcaaaaaatctacatttagatttgagtctgtatcttgcatgagttaggtttgggcgtttaacttttaaagtctctgaacaatttttgatctatagggcagtgctcttctatttttaaccttgcatttttttaagtgtttgtgcgtcagcatagcgtctgtttcctttttttaaggaattcaaaagtgattgtttgtaagtcctggctgaggagttcattgtttcttagggttgaaatggctgtattaaagggagtattgtcacatgaacagacatcctgattaacagtgttctaccatggcaggtgggggaggggtgctctgcataaatagctttttagtgtaataaatgtttcacaagtcttaagaccttgccatattaaatgccaaatgtaaattcaaagtagggccagaaaaaggaagattgatatctcaaatttaatatgctgtattctgaatactagatataatatggatagagttgaagttcagaagatttttgaattattgtgcaccaaataacaaagaattgttcaggggttgaattagctataaggccagcgaaataaccgtggtctggggtatggctcaggtggatgaatgcttgcctaacatgcatgaggctttgggttcaatccctggcacctcatgaactgggcatagtggcacatgcctgtcatctctgaatgtaatgttcaggagacagaggcaggaggattagaagttcaaagccatcctcagttatatagtaagttttgggtcagtctgagatacatgagggcctgtaccaagaacttgagactagcttcagtagttgtttgtataaagagtgtatgaaaacgaagcagaagcagagaaactctgagtgtggtggggtaggtcaggaggaggtcatctctggtggattagctcctctgcttgggttgaaattgtagggtcgtgtctgagtagtccatgtccagactgacttttggttatatatcagaagagacagtcaaatcaagctaccatcttattagtggccatttgttcatgtttgtaccttaaagccaaattctgcctgacttaaatacaggaaaggtcttttaaaataagtttgttactcagtatgaattgttcattgctttagattagaaacaaaacacacactctctctctttctctctctctctctctctctctctctctgtgtgtgtgtgtgtgtgtttaaaccagcatgggaatataggtagcttttaattttttcttaagtacgtaagcttctgccagttttcttggagtattttagtcgttcctcacacaccccaccctccctttttggcaaggctgcttttagcttccagccaaaataagaacaaatgaagtttcagtcaggttaggccacactacagtagtggccactgcggagcatttatttcgttcgccagcaccagaagctcctcttgtgagcagtgtgacaggaaggacagctgtgcattctgacagggcaccagttataaggtcatcattagactgtgcatttctagtgacttctggtgcctctaaccagcttagcagttacagctgcattctggattagtcatgtatgtaaacttgtatagtgacactgaaataggttgataacttgtatatgtttagaattcagagctaggtggggctgatggggatcctctgatcccgtctgccttgatggaagagcaccagggcaggaacaagtggccgtgctctcctgtgctccccactctgctgtctgacctgcgctgctcacctccccagagctcacacagcagcacggggaactggtgtggtcccgtgtgactgtgtggcatggaggtgcagggtgcctttcccggcactgccatcagctagtagcctaaattgaagagccccactttaaaaaatagccatatttttcttaaaacatactcagcacttctcttctgtctgaaacccacagcttttagcctgatgttgggtagcatttgaaaagaaatagttctgggtgtgatgttagattgtcagcctgaaataaacctgggtttggaggagcggtgggcacacacttgcaatgtggagcccagcccagagacactcagaggcctcatctagaatacacagctctctagcaagggcgggcagccagccgagcagcccactgtggccccgctgttgcttcctagacacacgctactttgagaagcctcaccttacaaatagatttgcagaacaggaagaagaatcttgaaagggagggtggtgatggtaccgataaatacctgtgttttaaaatcttgtacagccttctgttttaaaatcttttcttctggatgagactttagtctgtaactgaggatctctgtaactgaagacagacaataaaataccaacaagaaggaaattgttaaaagattttatgtatctaagatacttttactagtaacccactctagccttaggaggtataaactaaaggaacattaaataaaaccaaagaagtttttagctggaagcctggtcaaatatgcctgcaatcccagcactttgggcactttgggcactttgggcactttgggcactttgggcactttgggcactgagactaaaagctagaggactgtgaattcagggccggcctggatagctagctaggccctgtctcaaaagcaaaaacctcccacaataatatcctttgttctgtaatttttttcttcaaagtaaataagtattaagtactttaaattcagggatgtttgatagttaaatcagttcactatcttgatgataatatataccagtagattagatcaatccatgaattttagtttaaggttaaaaacttactgtgtgatcttttaaggtcaaatttaggtttctcagaatcaacttaaaatttttctaaatatactctaatttcactaaactttgtcctagtaaaagacttcttataaaattatgattgataatgtataggtttttactgcgatcagtggatttcccgtcactttatccatgttaataatgtaaacagagaaatgttcttacaagagactcaagttaacagatgttctcccttcttttaaagactttggactaatcgtgggtggaccctagagagatctgagttgtagaacgagtggttttttttcagacagtcttactgtgtgtctctgactggccttgagtcccggagacatgcctacttctgcatctgctgagactgaaggcccatgccaccatacgcaaggaaatggtttttgggttttttgttgttattgttgcttcctccagtacaagaaaatgtcctttccttccttatgcagaagaaaatagcctaggctcctttgtgcccatcccagctccctaaccctaacttagaagcgtgctctaaaaaaagatccaaggaggcaagactagagggtcatctgactcaggaactacttcaaataaaagcaagggctttttacaaccatgttctctctctctctctctctctctctctctctctctctctctctctctctgtgtgtgtgtgtgtgtgtgtgtgtgtgtgtgtgtgtgtgtgtgtgtggtgtgcggcgcgagtgtggagggcatagaggcgggagaacaaccgcctggattgaccgcagggccatcaagcttgtgtggcaaaagactttctcactgagtttgagactttttttttttttttttttttttttttttagcagttataaataaggcttttggcaattaagcgattttaaaaactatttaacttaccttactactttgtaagatttgttttctagttgtatgctttgttaacatgatctaaaggaaattaggaaatgtagttaattaaactggatgtcagacagatgggctgccgctgctgctatctctacaaggtaaatgaacaggcaggagaacttttgggatcctggtagcgatggcaacctggttcagttccctgtccttgcttttcttcactgaatgttccttgccaatgaggagttaagacagggcaagaagtcagttgattatattttacaattagtgttttgttttggttttttgagggtttttgttttgttttatttatttgtttgttttttgctaccaatttatgaagcaagtgaagctagcagtccattatataatccaaagccgtctctctggtaaaacatttaggggctttgtaagcctgagtatttgatctcttttaaaactaaaaataatagttttaatcattgtttatacaagactttaatatttttcctttttgttcctagatccaaattttgttcggacgtttcttacaacatacaggtccttttgcagacctcaagaactactgagtcttctgatagaaaggtctgtcggttttaaatgtttacgttctttgtttttaaaaggactaagatatgttccccataattgtgttaataagcttaactgttgaactcttgaaaataaaagctaactttgattttttttaaataatcaaaattttatattgctttagtacttaaaactcccaacttctcagggtctcagcagcactggggattgaaacgtgaacctttgttttaatctaagcagtattcccagcctgaattaatcaagttaaagaactctgtcagtatggatgacttagaacctcagctgggcacatgcctataatcagaacttgggagacagaggcaggaggatcagagctcaaggtcgtctttgactgtcataggaatttacggttcccctgaactatatggaactatgtctttaacataatgagacactagaaattcagattttaatggttcataagttctaaacaagttttcaagttactacatattgagtaaaatgaatcttgtcaatgagcaaatgcttttatcaaggaaaatatttttaatctacccaaagaacaatcaagtttcaagcattaatcatccttaaaattatgtctcctgatttaaagttatctacagactaaaaatggacattggcctcatttgttttaaattttacatatatttttattttgcttctagttttagctgttgacaaaactaaccttttaaaaatattaacttaaaaatattatcattagattagcctttacattataaaagtggatttttacttatgtgtctgtatatctatagtaatttttatattatctcttgattgtactgataaatataaatagaacatgaatttggatttgatataatattttcattattttttgtttcatgttagatttgaaattccagagcctgagccaacagaagctgatcgcatagctatagagaatggagatcagcccctgagtgcagagctgaagaggtttagaaaggaatatattcagcctgtgcagttgaggtaagcagtggagacacgtctgcagcctcaaacctgggtttcaaagtggggatgttcaaagcggggcagtggtggtgccatcccagcacttgggaggcagaggcaggccagtctgagttccaggccagccagggctacacagagaaaccctgtctcagaaactgaagccaggaaaacaaaagtggaaatgttcgagaaactgtccctaagcatggtggagggaagcggtgtgaatgagagtctcgtttgaattgctacagctttatgagaccgttgccttgtttcatgtgtgcactcaatgttagattctgtgttgtgtcgatgccacagggtgttaaatgtgtgtcggcactgggtggagcaccatttctatgactttgaaagagatgcagaccttttacagagaatggaggaatttattggaacagtaagaggtatgtttttcttaagttcctacttttacatgtgataaaattaccaatatggttactgccagttgataccattagagttcatttgaaaatattgaactttcttatcatacagcatttagactggatgtgtggtgcgtacctttattcccagcacacaaaaggcagaaggagtatgatttctatgagttttagtacagccaggactacagtagtaagaccctgtctcagaaacaaaacaacaaaacccagcattgacaactgtaaatcactcagcagccaccctgctgactccacacacttccatctgttctagaacatcctgctgaccccacacacttccatctgttctagaacatcctgctgaccccacacacttgcatctgttctagaacatcctgctgaccccacacacttgcatctgttctagaacatcctgctgaccccacacacttgcatctgttctagaacatcctgctgactccacacacttccatctgttctagaacatcctgctgactccacacacttgcatctgttttagaacatcctgctgaccccacacacgtccatctgttctagaacatcctgctgactccacacacttgcatctgttttagaactggttcttttagtctcaggttaagccagagccttaactgaaactgtggttacccttgatacaggctggaattcttttaccactgtaacaccattgataaaagtgcatggttagataagtagagcagatcaggaagaaatagtgtattacactgagagattgctttttaaacatcagcactaatcagaaacataattttgagtctttagactcattcaatttacttatgaaaaactaatgttgcttatctccaaggtttcctttactttcaaaaattctgtgattatatgactccaagtttgcctagacaaactttgtttttgcatctattgttcagtctaaatgaaaatcagaaaataaagggttaagtagattactttcctatacagtacaaaagacaggcatatcaaaaaatagactaatatgatcaatcagtcctcataattgggttataaaatacaatattaattagatttgtgaatatgaaacttattcttgttaatctttcatttcgtatggaatatggattgtgaaaatagtattttgaactaagcttcaaaatgttggaggtgaaaaaaaatcaagttactttaaaatatgtttaggaaaggtatagatacatgccaaactattgacaatgattacctgtgaggaacaaggatgagagggagatgggggaggggaacttttagtatttactttgctcatttgaactttatagcaatggtttattcatgtatcacttgtattactttaaacatttttttaaaaacaaagtgttaaagagtatttaaatgtttgttaaaatgtatttcaggtaaagcaatgaaaaaatgggtcgaatccatcactaagataatccaaaggaaaaaaattgcaagagacaatggcccaggtcataacattacatttcagagctcacctcccacagttgagtggcacataagcagacctgggcacatagagacttttgacttgctcaccttacacccaatagaaattgctcggcaactcactttacttgaatcagatctataccggtatgttattcaacattcaaactcagaagctatctcaagagttcattttaaaaatggaatacattatctgccttttagggctgtcgtaagatgtaaatgagacagcatatgatgtgtatacagcattaaggcattgcagtcagttctggttgttttgcccccttagtcatcttgatctgcttaaattaactttgtgctctttcagttacccctgcttgggaagctcggttcaaatcctggcagtcccagtggcttggccaaagcctgtactgtcttgtaggtttgaagagtctggtgtgtgcctgatgcatccaaggctgagcacaaagcagaacatagaaactactgcagcagttactccacagtacacgatagagcgactgctgtgttacagctaagcctcagccagttagaaccctttatagtttaaattgattaaactatctgaaaaatatgattctggtttgaaattttacttaaaatctcaaaattattattaatcaccaaatgagaaaaagagctaaatttataaattctcccatctccatttatcatggtccctgagtgaccatgttagataatgtctaaagtttattctcagaggcatttgcaggatggctttctcttctgtccactgtaagagcaagaacaagccaagaatgcgttagtaattgccctgtcctagttggctacttactagataccatttaagtaactacctcaccatcttaacttagtaaataatacctacaagtgctaggaaagacattatgcaaaagtatgcagtaaatgggaaaacgaccatgctgctctgcgcagtcgtgctagcgctcaggacactgaagcagaggactgccatgtgttccaggccagctgtgccagacagcaagaacctagccagggctacatagaagacactgtctttaaaaataaacaaatgagcagtaaatgtattatgcaagagtatctactaaaatagttctaatctgaaaacataaaaaagttataaatattgttttcaccaactttctgttgatgaaagagaacttaaaaatgtcgtttagtttttcttctgtagtaagctatatacgtgaggagaaatgtgacattgccattttatgttgatgattttagggctgtgcagccatcagaattagttggaagtgtgtggacaaaagaagataaagaaattaattctcccaaccttctgaagatgattcggcacaccactaacctcactttgtggtttgagaagtaagtgtgggcgtttcctcctggggcagaggcaggttttgaatccagcggggctgttttgcttctttagtgctctcattcccctttcttgtaaactcagtatctttctaatgtgcattttaatttcactggtactttggtttttaatggttgcctggcactaaccacatgcgtcttactttatcagtctaggctagagatggctgcagcttcttcccagcaggtagatgctcctcccatacgcggctctcattgctccctttctacatttgaacagacctaatcaatggtgcaaatccaacaatgcttcatgacaatgattactctgccgtctgctgtcaccattttatcttacagagcttttttccattcactcgtgtcctctgttgacagtgtgttacatttttatactacaaacccaaaagtacattcagataccttaaattagttgctttttaaacaaggtgagaggaaaaaatgggcatttatagtgtttgtataattctataattacctttactgatgttctttgtgtagactgacattgctgtctggggtccctggttttaagcctgaagagaacctcctgtggtccagtgggtcaactcacaacaagtgtgcagatttattgctgttttgaacagcagctctctcttgagattagttctgttttattctgtctgttcatatctattattgagcccccttgcctttcagtccatttgttttccatttggtgctgtttaaaattttaactctttcctcatctctttctagatgctgctattacacttctgtgcgccttaaccgggctgtcctttagctctgtgaccatactctctgatggcgactttgaaatacttcagttaattttcatctagtcactcaaacaggcagtttctgctccctgcttttattccactgtttaggtcataccttttatttctttatatgctttataatggatacagcaacttttcaatactgccctctgccttccacagctttctctttgctacttaaatgtgatgcggactaagcaggttagatgtggggatggatgcccatagttaggactttgggaagactggttccagtatggttcacattctctctcccaggctgcaccccgagctgctaaatgttgcactactaattcccgtcttcattcctttgtcgtgaacagttccctggtagcacaggttgctgtgaagaataagccaatgaaattctggcttcttggaagtaaagtttttaagctccttaataactgatatttgttctgacctgcaactatcttcctggttcacaccgttcctagctaacacacatttggggctacatatcttccttttatctccagatttctttccagttgcctttcataacaacttccactgttcctgaacacacctttgctctagatgtgacacaattctggagaggacatgactacaagctgtctttacattctaagagcttagagtcaaagtgccaagaatgatgctgtggcctcagggtctagcatggaaccctgtcaggagccaagcaaagagctattttcccagcgttctaattaccctacagcctcagcccataagtgggcaaggggagggctccgtacatcttaaatattaaggaaataaatattatagataaataaatatgaagactgcactcagtgaagccctaactcagcagggtaggaacccatccagatgtgcaccccaacccctcaaaatcccgggctgggattaggtgctcctgccccagggctcaaacaaatgctccggagggaggaagaggaggggacaggagcttagttgaaatactccagagtctcccttttaaagagattattttgtagattttcttgaacaatttttcgtttgtagcttgttcttagggtcacctccaaagactcatccgcattatgagttatggtgagtgggtgtggtttgctttaagatcactggagtccatcagccgagctgcaccgtctgataaagccgagacgtctgtgcgctttcataactggggagcggacaccttagctttgtatactggatattgttttctcagtgaagaagccagagtccacagattgtactgg

SEQ ID NO: 1367 - DNA, 4783 bp, Mus musculus
gtgtgttctagttgggtgcaaggtctagcctaaggcaatgcttgtctcccacctcatcctgccaaggaagcagcaccccgcgggcaccatgcaggcgcagcagctgccttacgagtttttcagcgaggagaacgcgcccaagtggcgggggctgctggtgcctgcgctgaaaaaggttcaggggcaagttcaccctactcttgagtctaatgatgatgctcttcagtatgttgaagaattaattttgcaattactaaatatgctatgccaagctcagccccggagtgcttcagatgtggaggaacgtgttcaaaagagttttcctcatccaattgataagtgggcaatagctgatgcccaatcagccattgaaaagaggaagagacgaaatcctttatcgctgccagcagaaagaattcatcatttattaagggaggtcctcggttataaaattgaccaccaggtttctgtttacatagtagcagtattagaatacatttctgcagatattttaaagctcgtggggaattatgtaagaaatatacggcattatgaaattacaaaacaagacattaaagtggcaatgtgtgctgataaggtattgatggatatgtttcatcaagatgtagaagatataaatatcttatctttaactgatgaagagccttccacctcaggagaacaaacttattatgatttggtaaaagcattcatggcagaaattcgacagtatataagagaattaaatctaattataaaagtttttcgagagccctttgtctctaattccaaattgttttcatctaatgatgtagaaaacatattcagtcgtatagtagatatacatgaacttagtgtaaagttactgggccatatagaagatactgtagaaatgacagatgaaggcagtccccacccattagtaggaagctgttttgaagacttagcagaagaactggcatttgacccgtatgagtcatatgctcgggatattttacgacccggattccatggccattttcttagtcagttatcaaagcctggggcagcactttatttgcagtccataggcgaaggcttcaaagaagctgtccagtacgtcctgccccggctgctgcttgcccctgtgtaccactgtctgcattactttgaacttctgaagcagttagaagaaaagagtgaagatcaagaagacaaggagtgtatgaagcaagcaataacagccctgcttaatgtccaaagtggcatggaaaaaatttgctccaaaagtcttgcaaaacgaagactaagtgagtctgcatgtcggttttacagccagcagatgaaggggaaacagctagccatcaagaagatgaacgagatccagaagaacattgatggctgggaggggaaggacattggacagtgttgcaatgagttcataatggaaggaactcttacacgtgtaggagccaaacacgagagacacatatttctcttcgatggcttaatgatttgctgtaaatcaaaccatgggcagccaagactccctggtgctagcagtgcagaataccggcttaaagaaaagttttttatgcgaaaggtacagattaatgataaagatgacaccagtgagtacaagcatgcttttgaaatcattctgaaagatggcaatagtgttatattttctgccaagtcagctgaagagaaaaacaactggatggcagcactgatctctttgcagtaccgcagcaccctggagaggatgctggacgtaacggtgctgcaggaggagaaggaggagcagatgaggctgcccagtgctgaagtgtacaggtttgcagaacctgactccgaggagaatattctattcgaagagaatgtgcagcccaaagctgggatccccattatcaaggcagggacagtgcttaagctcattgagaggcttacctaccacatgtacgcagatccaaattttgttcggacgtttcttacaacatacaggtccttttgcagacctcaagaactactgagtcttctgatagaaagatttgaaattccagagcctgagccaacagaagctgatcgcatagctatagagaatggagatcagcccctgagtgcagagctgaagaggtttagaaaggaatatattcagcctgtgcagttgagggtgttaaatgtgtgtcggcactgggtggagcaccatttctatgactttgaaagagatgcagaccttttacagagaatggaggaatttattggaacagtaagaggtaaagcaatgaaaaaatgggtcgaatccatcactaagataatccaaaggaaaaaaattgcaagagacaatggcccaggtcataacattacatttcagagctcacctcccacagttgagtggcacataagcagacctgggcacatagagacttttgacttgctcaccttacacccaatagaaattgctcggcaactcactttacttgaatcagatctataccgggctgtgcagccatcagaattagttggaagtgtgtggacaaaagaagataaagaaattaattctcccaaccttctgaagatgattcggcacaccactaacctcactttgtggtttgagaaatgtattgtagaaacagaaaacttagaagaaagagtagctgtagtaagtcggataattgagattctacaagtctttcaagagctgaacaacttcaatggtgtcctggaagttgtcagtgctatgaactcgtcacctgtttacagactagaccacacatttgagcaaataccaagcagacaaaagaaaattttagaagaagctcatgaattgagtgaagatcactataagaaatatttggcaaaactcaggtctattaatccaccgtgtgtgcctttctttggaatttatctcacaaatatcctgaagacagaagagggcaaccctgaggtcctgaggagacacgggaaagagcttattaacttcagcaagaggaggagagtggccgagatcacaggcgagatccagcagtaccagaaccagccctactgcttacgggtggagccggacatcaagaggttctttgaaaacttgaatccaatgggaaacagcatggagaaagaatttacagactatctgttcaacaaatccctagaaatagaaccccggcaccctaagcctcttccgagattcccaaaaaaatacagctatcccctaaaatctcctggtgttcgtccatcaaatccaagaccaggaaccatgagacatcccacacctctgcagcaggagccaagaaaaattagctacagtcggattcctgaaagtgagacggaaagcacagcatctgcaccaaactcccctcggaccccactgacgccgccccctgcatctggcacctccagcaacacagatgtttgcagcgtgttcgattctgaccactcggcaagcccttttcattcaagatctgcttcagtctcatctataagtttatccaagggcactgatgaagtgcctgtcccccctcctgtaccccctcgaagacgtccagagtctgccccagctgaatcctccccatccaagattatgtctaagcacttggacagccccccagctattcctcctaggcaacccacatccaaagcctattcaccacgctattcaatatcagatcggacctctatatcagatcctcctgaaagccctcccttgttaccaccacgggaacctgtgaggacacctgatgttttctcaagctcaccattacatctccaacctcctcctttgggcaaaaagagtgatcatggcaacgccttcttcccaaacagcccatccccttttacaccgccacccccccaaaccccctctcctcatggcacgagaaggcatctgccatcaccaccactgacacaggagatggacctccattccattgctgggcctcctgttcctccacgacaaagcacttctcaacttatccccaaactccctccaaaaacttacaaaagggagcacacacacccatccatgcatagagatggaccaccactgctggagaatgcccattcttcctgagttcctctaagctgggatagtttcctagcccccagatccattgctggcaatggatgcactgaacatgccagcactggggagttcaaatgagaactccaaacactaacgactctacttcacgatgtagtataagacaatgagttttaacctacatggaattatggaataaaatggtattccagcttagaatgtggaaactgattgcacctggaaatcacgtgaagggacttttctggccattgggcagagtcctcatattgtgaagtgatctttatcattaaagggatggaaaacagtctaatgtccaacaagcccatatgttgacagtttttgtaattcaaaatattatgcacttttaaaaaatcttaaacagggatctcctcctttgttttcctttgctttactcttctactttagaatattttcgtaaaagttattcagaggactgtgagaaaaggctgtggtacctgaccttgttgaaatcaaggcccagcactgtactacagtcctgtttacagattattacagtgatctgaatgggtaccgaggcttcaccaaaagaggtactttttgttattgttattgtttaagaataattatgccaatttaagaacatcccctacccacccccactcacaaacaaaatgtggtggtgttgcctttaaacaaaaaatgtcaatgtcattaacatgatggaagaagaacattttaaaacgtaactgtcaagtatcattt

SEQ ID NO: 1368 - DNA, 4011 bp, Mus musculus
atgcttgtctcccacctcatcctgccaaggaagcagcaccccgcgggcaccatgcaggcgcagcagctgccttacgagtttttcagcgaggagaacgcgcccaagtggcgggggctgctggtgcctgcgctgaaaaaggttcaggggcaagttcaccctactcttgagtctaatgatgatgctcttcagtatgttgaagaattaattttgcaattactaaatatgctatgccaagctcagccccggagtgcttcagatgtggaggaacgtgttcaaaagagttttcctcatccaattgataagtgggcaatagctgatgcccaatcagccattgaaaagaggaagagacgaaatcctttatcgctgccagcagaaagaattcatcatttattaagggaggtcctcggttataaaattgaccaccaggtttctgtttacatagtagcagtattagaatacatttctgcagatattttaaagctcgtggggaattatgtaagaaatatacggcattatgaaattacaaaacaagacattaaagtggcaatgtgtgctgataaggtattgatggatatgtttcatcaagatgtagaagatataaatatcttatctttaactgatgaagagccttccacctcaggagaacaaacttattatgatttggtaaaagcattcatggcagaaattcgacagtatataagagaattaaatctaattataaaagtttttcgagagccctttgtctctaattccaaattgttttcatctaatgatgtagaaaacatattcagtcgtatagtagatatacatgaacttagtgtaaagttactgggccatatagaagatactgtagaaatgacagatgaaggcagtccccacccattagtaggaagctgttttgaagacttagcagaagaactggcatttgacccgtatgagtcatatgctcgggatattttacgacccggattccatggccattttcttagtcagttatcaaagcctggggcagcactttatttgcagtccataggcgaaggcttcaaagaagctgtccagtacgtcctgccccggctgctgcttgcccctgtgtaccactgtctgcattactttgaacttctgaagcagttagaagaaaagagtgaagatcaagaagacaaggagtgtatgaagcaagcaataacagccctgcttaatgtccaaagtggcatggaaaaaatttgctccaaaagtcttgcaaaacgaagactaagtgagtctgcatgtcggttttacagccagcagatgaaggggaaacagctagccatcaagaagatgaacgagatccagaagaacattgatggctgggaggggaaggacattggacagtgttgcaatgagttcataatggaaggaactcttacacgtgtaggagccaaacacgagagacacatatttctcttcgatggcttaatgatttgctgtaaatcaaaccatgggcagccaagactccctggtgctagcagtgcagaataccggcttaaagaaaagttttttatgcgaaaggtacagattaatgataaagatgacaccagtgagtacaagcatgcttttgaaatcattctgaaagatggcaatagtgttatattttctgccaagtcagctgaagagaaaaacaactggatggcagcactgatctctttgcagtaccgcagcaccctggagaggatgctggacgtaacggtgctgcaggaggagaaggaggagcagatgaggctgcccagtgctgaagtgtacaggtttgcagaacctgactccgaggagaatattctattcgaagagaatgtgcagcccaaagctgggatccccattatcaaggcagggacagtgcttaagctcattgagaggcttacctaccacatgtacgcagatccaaattttgttcggacgtttcttacaacatacaggtccttttgcagacctcaagaactactgagtcttctgatagaaagatttgaaattccagagcctgagccaacagaagctgatcgcatagctatagagaatggagatcagcccctgagtgcagagctgaagaggtttagaaaggaatatattcagcctgtgcagttgagggtgttaaatgtgtgtcggcactgggtggagcaccatttctatgactttgaaagagatgcagaccttttacagagaatggaggaatttattggaacagtaagaggtaaagcaatgaaaaaatgggtcgaatccatcactaagataatccaaaggaaaaaaattgcaagagacaatggcccaggtcataacattacatttcagagctcacctcccacagttgagtggcacataagcagacctgggcacatagagacttttgacttgctcaccttacacccaatagaaattgctcggcaactcactttacttgaatcagatctataccgggctgtgcagccatcagaattagttggaagtgtgtggacaaaagaagataaagaaattaattctcccaaccttctgaagatgattcggcacaccactaacctcactttgtggtttgagaaatgtattgtagaaacagaaaacttagaagaaagagtagctgtagtaagtcggataattgagattctacaagtctttcaagagctgaacaacttcaatggtgtcctggaagttgtcagtgctatgaactcgtcacctgtttacagactagaccacacatttgagcaaataccaagcagacaaaagaaaattttagaagaagctcatgaattgagtgaagatcactataagaaatatttggcaaaactcaggtctattaatccaccgtgtgtgcctttctttggaatttatctcacaaatatcctgaagacagaagagggcaaccctgaggtcctgaggagacacgggaaagagcttattaacttcagcaagaggaggagagtggccgagatcacaggcgagatccagcagtaccagaaccagccctactgcttacgggtggagccggacatcaagaggttctttgaaaacttgaatccaatgggaaacagcatggagaaagaatttacagactatctgttcaacaaatccctagaaatagaaccccggcaccctaagcctcttccgagattcccaaaaaaatacagctatcccctaaaatctcctggtgttcgtccatcaaatccaagaccaggaaccatgagacatcccacacctctgcagcaggagccaagaaaaattagctacagtcggattcctgaaagtgagacggaaagcacagcatctgcaccaaactcccctcggaccccactgacgccgccccctgcatctggcacctccagcaacacagatgtttgcagcgtgttcgattctgaccactcggcaagcccttttcattcaagatctgcttcagtctcatctataagtttatccaagggcactgatgaagtgcctgtcccccctcctgtaccccctcgaagacgtccagagtctgccccagctgaatcctccccatccaagattatgtctaagcacttggacagccccccagctattcctcctaggcaacccacatccaaagcctattcaccacgctattcaatatcagatcggacctctatatcagatcctcctgaaagccctcccttgttaccaccacgggaacctgtgaggacacctgatgttttctcaagctcaccattacatctccaacctcctcctttgggcaaaaagagtgatcatggcaacgccttcttcccaaacagcccatccccttttacaccgccacccccccaaaccccctctcctcatggcacgagaaggcatctgccatcaccaccactgacacaggagatggacctccattccattgctgggcctcctgttcctccacgacaaagcacttctcaacttatccccaaactccctccaaaaacttacaaaagggagcacacacacccatccatgcatagagatggaccaccactgctggagaatgcccattcttcctga

SEQ ID NO: 1369 - DNA, 96592 bp, Homo sapiens
acctggctgtgatatcagtttataataatagcaggttctttagtttgtttgggtttttgttgttgttttggtctctgagtagcttcccaaatcacaggggccacgtactaattgctctttcccagaatgcctagatccttaacctttgcctatgtttttcttagatgctttttttttccctttttttttctttttgagacggaatctcactctgttgcccaggctggagtgcagtggcatgatctcagttcacttcaacctccgcctcctgggttcaagcagttctcttgcctcagcctcctgagtagttggaactacagtcacacaccacgatgcccggctaatttttgtatttttagtagagatggggtttcaccatgttggccaggctggtctcgaactcctgacctcagggtatccacctgccttggcctcccaaaatgctgggattataggcatgagccactgcacccagcctttcttagattcttgatcagtcattccagctgggacctcctggatccttctaaatactcagaaccaagcatgttggttatgttacaggccaacagtaaaaggttgtcttctgacatccaactttgtgctttggaatttagggatataaagatgctttttgcttctactttgcatgttagaattttgtggttggtagtgaacttttgaatatacttttatttttgaattctctccagaattacttggtaagttttctggaattaaagaaaaagcctagtgttaaatgttattttaaaagagttgatgcgacattgaggatttcaaggttctaccagcatttctaattgagagaatagtagtttcctctggaaggaaacttcctatgaaagtcatatagtgatggcatttattctaagagtggatatggtaggtgagaaccacagagttgaagggaatctggagggtcattctaggctactcagcttccagaaatcacatcaatggataacaccaaagaatcacactgttttttcaagtagagagtaaatgattatatatttgggtcaaaaaactgaagtttggttatcagtgaatatagtaatcacagaacaaaacaacactttgttgtgagttagtgatataaactaacacagtagtataaacctaccccagagagagggggtttgccctgtttggtttattattttgggttcagttggaagagaatagaatccattctagctaaacaaaaataaatttattttgggccaggtgtggtgactcatgcctgttgtcccagcactttgagaggctgaggcaggaggactgcttaaggccaggagttcgagaccagcctggatggcatggcgagaccctctgtctacaaaaacaaaaacaaaaaattagccgagtgtggtggcatatggctgttagtcctagctatctttttttttttttttttaaacgtagtcttgctctgttgccgaggctggagtgcagtggcacaatcttggctcactacaacctctgcctcccaggttcaagcaactctcctgcctcagcctcctgagtagctgggattacaggcatgtgccaccatgcccggctaatttattttgtatttttagtagagatagggttttgccatgttggccaggctggtctcaaactcctaacctcaagtgatccacccgccttggcctcccaaagtgctgggattacaggcgtggtgagctaccttgcctgaccagtcctagctatctgaaaggttgagatggggatcccttgagcccaagagttcaaggctgcagggagctatgattgcaccactgcactccagcctgggtaacagtgagaccctgtctaatgataataataatacattcattcagagaatacagaatcattggaaggctaatgaagtagattctggttgagctttcaggaacaagtcccaaagccacaccacagaaccaggccactaagagagtaatttcaaaacaattatgatccacagagaactgccacaccatgagtctagccattgctgctgccacataaaactagtgactgaatggtgcttgctaacagaaatatcagagttgcggcttccaactcacttctgccttctttttttttttttttttttttttttgagagggagtctcgctcttgtcacccaggctgggttgcagtggtgtgatctcggctcactgcaacctccacctcctgggttcaagctattctcctgcctcagcctcctgagtcgctgggattacaggcgcccatcaccacgcccggctaatttttgtacttttagtaggcagagtttcgccatgttggccaggctggtcttgaactcctaacctcaggtgatccatccacctcagcctcccaaagtgctgggattacaggcgtgagccaccgtgcctgggctcacttctgccttctatatctcactctagtgtatctgatagactgggagctatactgaacagattacgaatacgttcgttgttgacagctcaacttcattaactgtcaggaatttgaaggattctattgcgataacataaataacaaaaatttgaatgatgctttttttcagtcactagttttatgtggcagcagcaatggctagactcatggtgtggcagttctctgtggatcataattgttttgaaattactctcttagtggcctggttctgtgatgtggctttgggacttgttcctgaaagctcaaccagaatctacttcattagctttccaatgattctgtattctctgaacgaatgtattattattattattgttagacagggtctcactgttacccaggctggaatgcagtggtgcaatcatagctccctgcagccttgaactcttgggctcaagggatccccatctcaacctttcagatagcttttttttttttttttttttttgagacggagtcttgctcccccagactggagtgcagtggcacgatcttggctcactgcaagctccgcctccggggttcacaccattctcctgcctcagcctcccgagtagctgggactacaggcatctgccaccacgccaggctaattttttgtgttttcagtagagacagggtttcaccgtggccaggattgtctcgatctcctgactttgtgattcgaccgcctcggcctcccaaagtgctgggattacaggcgtgagccaccacgcccagcaatgctttgccctttcaccttgattataggagatggtgtttggaacagctacttcccccacgtacaatgactttccacctggtggtggtggcaatatttggatgacctcggtggcatcttcataccttggagaaccagaaaacactctttttgctcaatagcacgttgtatgtaacatataaacatacaatgccttttttgtggggagtggggaggcatacttttaaatcgatcttttggagtttcatacaaaattatagttcctcttgggaagaccttttaggtatgctgtctcttacagggggttgggcatgagcctcccataagggtcagaggacaaaggcctgtctgagggcctgcttcaacttctttcaggcaggtggctgtgagaggaccgagctggctatggcagcaacccatgaaagtgagtgataacaacatttattgtttcctgtggcgttgctttgctttgctattgactggtagcacttgtagctttaaataaattgaggaagtatgagagagtaaatggaagaaatgttgagtaagtccttcttgaaaatgttttcaagtgggagaatattagtggtaaatttctaactgtcttttaacattttaattgggcttggatcattcacattttccccaaatcctttctaaattaaaaaaaaggtaaaggccaggtgcagtggttcatgcctgtaacgggtgcagtggttcatgcagtggttcatgcagtcccagtacattggaaggccgaggcaggaggatcgcttaagaccaggagttcaagaccagcctgggcaacagaacaagacccccatctcttaaaaaaaaaaaaaaatacaaattacaaaataaattagctgggcttggtggtgcatacctgtagtcctagctacctgggaggctgaggcaggaggaccccttgagcctaggagttcaaggctgcagggagctagtatgatcacgctaccgcactccagcctgggtgacagagcgagaccctgtctcttaaaaaaaattaatttaaaaagggaagcaaaattacaatctgtcaaattattggctgggtgcagtggctctcgcctataatcccagcactttgggaggctgaagaaggcggatcacctgaggtcaggagttcgagaccagcctggccaacatgactaaaccccgtctctactaaaaatacaaaaaaattagccggtcttggtggtgtgtgcctgtaatcccagctactcgggaggctgaggcaggagaattgcttgaacctgggaggcagaggttgcagtgagccaagatcgcaccactgcactccagcctgggtgacagagtgggactctgtcccgaaaaaaaaaaaaaatatattagcatgatagttagcatatttcagtacaaatttgtgattaagctttttgttatgtatacatatgccctccctcttatagtatcagtgtgtttaatacttgcatttttttgttttatttttatttttttgagatggtctcccttttttgcccaggctggagtgcagtggcgcgatctcggctcactgcaacctcctccacctcccgggttcaagtgattctcctgcctcagcctcctgagtagctgggattacaggcacccaccactattcctggctaatttttgtatttttagtagagacggggtttcaccattttggccaggctggtctcaaactcctgacctcaggtgatctgcccgcctcagcctcccaaatgctgggattacaggcatgagccaccacgcccagcctaattttttattttttaacacttgaagcaaaagtttatagttagactggaaatttttcattaaaaataactcttaattagtgttttgaataagtgccatttttatgtggttgcaaattcaaaagtcacaataaggggtctagacaaagttggctgacacctataatcttactactttggtaggccaaggagggaggctctcttgagcccaggtgtttttagaccagtctgggcaacatagcaagacccccatctcaacaacaacaaaagtcacaaaaaggtacacggtgaaaaatctccctttcatctccagccacccagttttcatccctgtggcaacaaaaatctttgtagccttgctgatatggtttggctgtgtccccaccgaaatctcatcttgaattgtagttcctataatccccaagtgtcatgggagggacccggtaggatgtgattgaatcatgggggcgattactcccatgctgcagttctcatgatagtgagttctcacaaaatctgatggttttataagggccttttcccacttttgctcagcacttctccttgctgccgctatgtgaagaaggacatgtttgcttccccttccaccatgattgtaaagtttcctgaggcctccccagccctgtggaattgtgagttgtttaaacctctttcctttataaattacccagtattgggtatgtctttattggcagcatgcgaacagaccaatacggtaaatgcagagaaattatttgagtcaaatgcttatataataaaatgctgcattccttatatatatatatatatgaggaaccatacttgcagtactatacatcctgcacttttcattttgcagcatatcttagataatgttccacagaggcctggttattttaaaataactttataggttccactgtatggatttactattatttattgaactagtcccctattcctactgatgattatttaaactgtttatttctagggcgttttttgttttgctttacttctggtataataaacaacactgcaatgaataaccttgtctctaagtgacttcatataagagcaagtatatctacaggacatattcctagaatttgctaggtcaaagagaaactttgatattatctagttccccttgacagaagttgaaacaatttatagtcctaatacacttacaatatattagaatgcttgtttcctcatatcttcaccatcatagtgtgtaatcaaactttttcatctgtgctattctaataggtgaaaaatgataacagtataacccccaaaagagaattatctttttctccacatcctcaacagcatttgttattatctgtcttttggatataggccattttaactggggtgagatgatatcttattgtagttttgatctgcatttctctaatgatcaatgatgttgagcaccttgtcatatcccatttgccatttgtatgtcttcttttttctttttttgttttaaattttttaaaaagtttttttatagagatggggtctcattatgttgcccaggctcgtcttcaattcctgggctcaagggatcctcctgcctcggcctcccaaagtgctgggattacaggtgttgagccactgtgcctggcccctttgtttttcttattgaattttagccttttaatttgtaggagctcttttatattttactgaaattaactacaaaaatgaattgcaccagcttgggcaacatggtgagaccctgtctctaccaaaaatacaaaaaattagccgggcatggtgacacgtgcctgtgattccagctactcgggaggctgaagtgggaggatcacttgagcccaggaggcggaggttgcagtgacccaagatcatgccactgcactgcaatccagcctgagttagagtaagaccccatctcaaacaaacaaacaaacaaacaaaaaacccacaaaaatgagttgctgctattttttccagtttgtcattttccttttggcttatctggtgattttttttgcccttttttttttttttttttttttaaagagacagggtcttactgtgttgcccaggctggtcttcaactcctggcctcaagctatgcttctacctcggccactggagttgttgggattacaggcatgtaccaccatgcccggctcatacatttataaaaattgaatttatcggtcttttagatcttgtgtcatagtgaaagtgtctttttccgttctgaggttataaatgaatcattgtatggttttattgtttacatttaaatctttgacatatctggagtttttgctagtgtattgtatagggtatggatccaacattttttctagatagcccatttgtctgaatgagaaacttttttttttttgagacggagtcttgctcttgttgcccaggctagagtgcaatggcgtgatctagctcaccacaacctccacctcccgtgttcaagcgattctcctgactcagcctcccgtgtagctaagaattacaggcatgcgccaccttgcccagctagttttgttatttttagtagagagggggtttttccatgttggtcaggctggtctcaaactcccgacctcaggtgatccacccgcctcggcctcccaaagtgctggaattgcaggtgtgagccacctcgcccggccctgaatgggaaactttttactgctgtcattcttggactatcctccacatgcacgtggatcatatttctgtttgctcagcccagacatcagaactcagatgcctgtagagactaggcaagttacataaaagggtgaagagtgccaggtgggaagtatagccaactggaaatggatggcatatttttataaagagggcagccactacccggtgcctgctgattactctcttgcacgaatgcagtaggtcccagtgttgccagatctttgtcaagagaagctgaaaatatacatttttatatgaagcctcttgattttaaaatgttaacaattaaatttaaatacagccttagctaaacaaaatatgtcttcaggcctgacttggcccagaaaagccttctgatattcctagccaagaatgagatttctaacaagtttactctcctatgagtaaagagaacatacatggtctagtagtttgacagcacagtagtttatagctggagtctgggaacaggagagaaaagtaaggaccctctatataagccaaagtcttcgctctcacagactgaaacattaatgggagaaatacaagcattttaccatcccaccttttatcccaagtacatgtgaatggatatggccatttattagaggatgttcttgatttagtggatactttagtggattagaaaaataatcttattttccaactctgccattctgattttgcccaaatgaaaaagtggtgcatgttttggggagaataattgctcagctactgatgccggaactgaattgtagtactgacttattttttgtaccctgttcgtcttttccctttctcactgctggtggctagggacagggagtaaaatatcttctttacaacctgttaaaagtaatgtgctcagcctctttagtgggatgaaatttgtggtaatgagttaccagagcctatgcctctttggattgaaaagcttgtcaggatcttttctgggttgctaatgagtgtttcctagacgccgatccaggttttgtaggacctgaagcctacacaatttggatgacacgattaagaaaacaattcgaaaatatcttgaaagttttgtaaaaacgatatgattttgtgaacgcacaggggcccgtgcaagtgaaggacctttcaattcaagcttgatcaacgtcactgtcatctgccccttctgaccctaccaccaggctaagggctttccacgcctcatctctcggtccccacaccatcaccctaagaaatagttactgtatctcctaacgatatattatatatagtacctactttgtgtaaacatacggtactcatgaaaacaagccacgtagagcacaaatacgttaaatatcctgtccagcccgaatgcccctttctctccacgtccctatgcagcctcccacgacggtagtcctggggctccagcgctacaagagtggcaccgagtccggattgtcttaagcaggtcgagaggagggagcatatgggtaaaaagcagtcaaactgaagagtctggagcggcccccagcacagtctcgggaaaagcggactcccccggggccccaggccccgcacccccgcgccgggctggcgcctgtgcctgctccgcggcgcgcatgctccgtgttaggcctcttgggctattcgggataatgagcgccgggccgagggggcgggccgagcctcggctgctgggactcagggctcagcggcgaccccaaggcactctgcgctgctgctaaaggggcagcaacggcggccagcgctgtgcgcgccatagcgaggctcgctcgcccgacgcgcactccgggtcggtccccagagctctgtggaggtgactcgagtgggcagggccgggcggcgctgtcggctgggagggcggggaggaggcgatgaggagacgagcagccgccgccgccgccgccgctgctcaccgcccgccgcggccgtagcgggagtcggggcggggctgggccagctgtacccctgacgggccgcgaacccagacaaaggaggaggagccgccccagaagcgggccagcgccgccgggaaaggaggtcgccgcccggggtcgcccgggcttgcgggtcgccgcgcttcctctgcgggcgctgcgggaggcgagggccgcctcggcggaggaagccgaccccggggtctccgccagcccgccggcgccgcctccgagccgcctcggccgtagcctcggcccgggcgggaggcggcggccgccggcgaggcgaggcggcccgcgccctgcctgtcaggccaccggcccggcccgcgggctgcccccgatgcggaggcgctgtcgccggggccatgcagcaggcgccgcagccttacgagttcttcagcgaggagaacagtccgaaatggcggggactgttggtctcggccctgcggaaggtcagtgctaggggcggggcggccggcgggtggcccgtggccccccgagcttctaacggggagcaggtcgtccctcccacagggctcgagtccccggggccgagccgtttctcgttggctggcaatggggggctcacaattgcctgttgcattctgaaggacgtttctcaagttttttttttttgcctggtcccggaaggaaggttttgttatgatcataaaactggatttcatgttgcagtcatttcgtcaggcaacttccgccgttgaccaatttgttgtcctcaggctggaatcgggcaagagaaagtcccgctggtatttagacagtttctaaaacaaaagcacattttcaggccgggtaattacttttaattaagttctttgggagtgttccccctaggcggtttgcttgtcaagggtatccacttatgaggcaatggttttttgtaatatggatgtttcacatgtgtgaaatgtcagtgagtcataatattcttattcattttacagttctcaaggtaaatttaaagcgccttcccacttcctgcaaacggtgtcttacctgtttacaagagattacccttagaaaatttggtcagtgtcttcagtgtcttcacgaccaaattgcgatttaggacttgaaatcattttaaggaacaagaaaggggcaactcctgcaaatcagtctttcatgtttgggtgcattgctagggtgcatctttcctgtagatggtggcggtcttcctctgtgaatttaggtagtaaccatacgatcatttttataataaatccttctgtaagatcaagacatttaaagactgtgaataggtgcgtgatcagctgtcatgcctgttgagcaggggctttctttctttgccgttaatgcagacttagtctcttctgccttttgtgcaaaataaccaagaatacattctaaaataaggaaaaaataaagattaatttaaaagactatacttggaaaatatatcctcagacattaaatttctataaatgaaaggaagtagtgtattttaaagttaaagacattttcctcatgcgatgagagttgcagattttcccttattttcataattcttacaaggaagtattgctttcctcagggcaaacactaagtcgtatctttttaaagaacctggcagaaatgactagtggcagctagacagttattccattggtataccaagtgctaaagtattaaattgaccttacttccatgtgcagcccaattctgtaaggagagggaaagaaatgaaaagtgtgctgagtggtgaaaatgaactctggcctgaattaaaagcaaagggggaaatgcctagatagtaattagccctttgaccacagacaagtgtgagtgcagtaatcaggtaggcctatattgttggcaatgtgacgcaggtatatacccatttataactttctggtagcaaatagtatttgggtgtgtgttgcataacttgttcaataggtagctttgattctaataatcctttatgtccagaaacagatttatgttttctttttcttcaaatagagacagggttatgctatgttgcccaggctggtcttgaacttctggcctcaagcagtccgcccacctctgccttccaaactgttgggattacaggcataaaccacctcgcaccagacccagatttttttttttttttttcaagttaggctggagaagccaagattagcatccaatcctagtccattgctttggtgctattactttgcatttatattgtgcttgttttcctggaactcaggtgccttgtagatactatgttatattccacagttctagtatgttctttatgaaataaatacatctaagaaaatttggtcttttgaggtgaattcagaaaacattttctattaacttactgttgtgatagaattgaaatacatacgtatggaaaatttttttatatttttggaaaaattttggtaaaagtaattaagattatgtccacttttatggtatttaggacattgcaacttgtaggtctgtagtgcctgctaagagctgtagctcttagggagctaaaggttcactctttctttgcaggaagttttaaattctggtatgcatcagccaccttgtctttgtaaaatgagaatttctaccattttgggggagtctctgtcttcacattcagagcatctagaacttggcatccttcctctagctgaccagatcgttacaaagacaactaggatttgattggaatatctctctccttcaattggtgttgccattgtacatgtggtgtattctagcttcattaattcacttaaccattattgaacacattttacatacttgacatgatgcgggatcctaagagtacaaagttaaaataaaggcccctccaaagatgtataccatctaaaccaaaaattctaaaatttgaggttttggtttatgtaaatgagagcggttctgagctcagagttcagtaaggggtatttgtgtgtctatgaaagcagcaatgtagcttacttggctctgtcagtttagtccacttggacatcttggtggaacctccaaaactgttagaacgtaattttcagaaaggtaaagtcatcacttccatgcaaatgtaaatgaacatgtatcaattattttgattcagcccattgatgagggaactagtaagatgttaaagtcacttaatatgaaaatttgaggaggtatttataggcaatttaataagggaatattaagactgttgggttacatacagaattagttaataccctacaagaaacataaaagagtaggctttgggttatattttcctctggctaaaaattacttgcatctcagtgggcgtggtggctcacacctgtaatccagcactctgggaggctgaggctggtggatcaactgagtttaggagttcgtgaccagcctggccagcatggtgaaaccccgtctctactaaaaaataccaaaaattagctgggtgtggtggtgtgtgcctgtaatcccagctgctcaggaggctgaggcaggagaatcacttgaacctgctaggcagaggttgcagtgagccgagatcacaccactgcactccatcctgggcgacagagcgagactccatctcaaaaaaaaaaaaaaaattacttgcatctctatctgctgaaaagctgtaacttaatcttatagatgtgtaaaatagtcagtagaaattaataaaagattcaagcatagcactgtactgaaacacagccagtattcttttgcttattttccagttttggctagtttttatgaaaactggatatctatgtctatatccatgtatatatccatatatacccatatatagatccatatatatatgtatttgacaaagtcaccattgtcaacattgaaaattcaagggatttttaaaaaaccaatctcaagtattcattgcattacatagaaacacagagatgggctgggcgcagtggctcatgcctgtaatcccatttgggaggccaaggcgggcagattacctgaggtcaggagatcgagaccatgctggctaacacggtgaaaccccatctctactaaaaatacagaaaaaaacccaaaaaattagccgggcgtggtggcggacgcctgtagtcccagctactcgggaggctgaggcaggagaatggtatgaacccagaaggtggagcttgcagttgagccgagatcgcgccactgcactccagcatgggcgatggagtaagactctgtctcaaaaaaaaaaaataccaaaattagccaagtgtggtggtgcatgcctgtgatcccagctactcgggaggctgaggcagagaatctcttgaacatgggaggcagaggttagagtgggctgagatcgcaccactgcactccagcctgggcgacagagcgagactctgtctcaaaaaaaaaaaaaaaaaaaagaaagaaagaaaaagaaacacagagatagacaaataggtttatggaaaaataattttgggaatagaaatgtggtgttctttagctttttgcttgttcttaaacttttaaaatagaacctcacctagatcatttaaaaacagagagctacaaagcagagtgaaatgacactactaatggataatgcatggattgttaacattactgctaaattatgtatcttccctaaaagagcctagaacataattgccttcaccactgctccccaagatcattgaagctattgtgttacttggggaaaaaagagcatggtgtatatttgtaaatgcagtttattacctgtgtcgttgaaatcccttggtactatatgcatgtgttatttgattatatgttgagataaatcagcattcttcatatgggaaatatgcctcaaaatcattttatcagattttacagtccctgatatttattttgtagatgtcttttctgtaaggtgtttttcaccaggctagccatagaaaagaacatggctgttttcttgccagctgtagttaaaaatgtcagagaaagctagaaagaattggttgaattactttgttcctgagtccaattagattcaggttaaatatcgacctccccaccctgtgacaatttgctcttagatatctaaaaggcaagaggtgtgagagaatgtctgggttaattaatagcagtctacggcaaggaaaaagatcggtaggggctttgatttaaaaatggttttgtgaagttctactgagatcctagtgtttctgcgtttgtacaaatgtctcttggaagtttgttttagaagatggcactggatctttcctgaggcccacaagaaaagtacagggtgatctgagaaaatataactggtgtcattgatatatgagagtcaaagaagactttaagcaagcaacatttgtgcttctttctggattatatattcaaatatagtaatattactgtctccaggctggtcttgaactcctgggctcaagcgatcctcccaccttggcctccaaaaatgctgggattacaggtgtaagctacgtcgcctggctgcagacactgttcttgatacggaagatgtagcagagcccctgctgttataaagcttgtgttctaagtggctgtggcagagagacagacaataaggaagtaaacaattatctgaaagatcagtagaattaacaagaaaaaaaaagggcgggggggaaggatttgaggctgaggggaaagtaagaacatgatttgtttgtttgtttgttttgaataggtctcagattctgaatttaatgacttattttaaaaaacaagaagaataagtggatgaagctagtatggtagactgtaggtacactgagttaaggtctctgcctgagaataggaagtcctgttgggttctcatttacatagcaaagtaattagattaacttgatcagaattgctttttgaaaagattacttcaagtcaaagccaaaaactaataagagatcctgtgatttttgtgacatgagcctgttctggaattcctaaagccgctgaatgtaacagtagaactcgagggagtcatttggaattattccaaactaataatgacccaaactgacccgaagagttcagccagaactagatgagcggtaggaatgtactttaacttgctgtacttggctccctgtcagcaatgattaagtagccttctatttttggtttaattttggtatggtatatttggagcaataatattccattaaagtgttttatgctgagtattcaaagcattacctgtgttaccccttgacataaatcaactatatgtcttttgtattaaccatggactctctttcaagggaacagtaatttgattatatcctgcatatttgaatcaaaaggaattttaatgtaactagtggatttagcattatctcatgttaaaaattaacaaccaaaaattattttcttccatgggccaggtgcagtagctcatgcctgtaatcctagtactttgggaggctgagatgggaggattgcttgaggccaggagttcaagaccaacctggccaacatagcgagaccccaatgtccataaaaaattattttcttcttttacataagaatatatgctagtacaaagttttttcaaatggataaagtattacacattcacattttaacatgtagaagtgaagcaacaagatgaaaataataccaagatctagatataaggactagtattagctcttctaagtaaagttttctgtactccagttttcttcctcattaggtcattttgtaaactcaaacactatttctctctctctctccttttttttttttttttttttttgacagggttttgctctgctacgcaggctggagtacagtggcatgatcatagctcactgcagcctccaactcctgggctcaaatgatcctcccactatagcctcctgagtagctgggactacaggcatgtgccactacacccagctaattttcttatttttttgtggagacaaggtcttgctatgtcctctggctggtctcaaattcctggactcaagtgatcctccagccttggcctcccaaagttctgggattacaggagtgagccacctgcctgccaaaaactacttcttacatacaaagtatattatagttctttcttaactgacctattagcagcatttgacagttgatctcttctttttttgaaatcctttcttcatttggcttccagaagaatatcaagctttcagggattttttttctctgaatattccttctagtttcccttcccttgattcctcctcatctttctgtgaccacatccttctgacctccccagagcccatttatatatatgtgtgtgtgtgtgtgtgtgtgtgtgtgtgtgtgtgtgtgtgtgtatatatatttttttttttttcctgagacggagtcttgctctgtcacccaggctggagtgcagtggtgcgatcttggctcactgcaacctctgcctcccaggctcaaccagttctcctgtctcagcctcccgagtagctgggattacaggcgcgcaccaccacgtctggttaatttttttttttttatatttttagtagaaatggggtttcaccatgttggccaggctggccttgaactcctgaccttgtgatctgcccgcctcggccccccaagtgttgggattacaggcgtgagccactgcgcctggccaatttttagacttctatttctattaacacatcctcctttggagatgccatcctgcctcattgcttcacgtataatctaaatctgataattaccaaatttacatttctggctcagacctctttcttaaacatgaatgttcaactctttttttgagacagggtcgcactctgtcacccaggatggagtgcagtggcaagatcacagctcactatagccttaacctcctgggctcaatgatcctcccacctcacccccctgccgcccccatatagctgggactacaggtgtgtgccaccacacccagctaattttttgtttgtttgtttgttttagatggagtctcgcttttttgccaggctggggtgtagtggtgcaatcttggctcactgcaacctccacctctcaggttcaagtgattctcctgcctcagcctcccgagtagctgggactacaggcgtgtgccaccacgcccaggtaatttttttgtatttttagtagagacggggtttcaccatgttggccaggatggtctcaatctgttgacctcgtcacctgcccgccccggcctcccaaagtactgggattacagggatgagccaccacgcccagccccaatttttaaaaaactttttgtagagacagggtcttactgtgttgcataaactggtctccaactcctgggcccaagcattcctcctgcctcagcctccaaagtgtttgagttacaggcatgaagcaccacacccggccaactttttacttgatatttccacagaggcatctcaaccaacactgtatccttttcttcccctgcaaacttgtttcttttgtagtggttaacatatcaataaatggctactccatccttccggttgctcaaactaaaaatcttaagttattcttgaatattgtctttttttataccacacatctaatttgtcagcacatccttttagctctacctcaaactatatatttagttaccgttttatactttttgacttttaccacctggaaccaagtcatcatcaccaatctcctggaatattgaaatatcttttcaactggtctctgatcatctgctcttgtcctatttagtttctttttctccccaaacacaaagagataagtgagatcatttcactcctttgttcaaaaccctctcagtgcttctcagaataaaagtcaaaaaagtcctcccaaaggtttactaggtcctctgcagtctagggctgccccacctcccgcttttacctctctgacctctttaatattgtcccttgtttgttctgcttctgccccatactggctttcttgtttctataacgtagacatgttttagtcttaggacttttgtacttgctgaattttctacctgaaacacccttccctcagataatcacgtggctggcccttttacctcctttaggtctttatagtcagacatcattttcttggagagattttctcttacagcctatctaaaactgctacatcctcctgcttcccagacagtcccacatcagtgttcacagtattttttcccataaacctgtatctccaatataaatgatgtatccagttctcaagccagaaacctagtcatcattcttcccctctttctcatgccaggctaacatgtattcatcactgaatctacttgattctttctcctaaattaggagttttctaactttttttgctgtgtatccccaaaagaattttgaaaaacttgcacatttttatgctgacatctagaaattttcattttacatttaaatagttgcagtagatgtaatttcatatgtgttataaatactgatgttttaaggtaaaacagttgcatcagtcttttaaatgtgctgaatggaatttaaataccaaaataatttgatatccaccatcattttttaaaaatacacatgaaaagtgtgtctttaaaagttggaaattttacattgtcctttttttctctgtgaacttttttcattatatttcccctgcataattctaatatgatatttttagatttaagtctttaatcgcacttttttatttatactccttacaacaacaaaaaagtctacatattgaatttaaaaggattttccctacaaccgtaaagctttaaaacctgtcttttgaactgaattattattattattattattaaagtctcattctgtcacccaggctggagtacagtggcatgatcatggctcactgcagcttcaacctcccaggctcaagcgatcctcccatttcagcctcctgagtagctaggactgcaggcacatgccaccacacttggctaattttttaaaaatcttaaagatgctttctttttattttcatgggcctgtcccctcaggaggatgtatttttccactaggctagaggatggaagaggcaagatacttaaatgaaaatatttgtaattatctctttgtttagtgtctaggatttatttattgcacttcagagcaacatgtatcctatagagaatttcaagataagtgagagatctgcctttcttagtaaaatgagagggcaactgtgaaaacaggtataaaaggagaccctgctttactcactgtgtgcaggcaccttgtcaggcagatcttctttaggaaagagtacatatggctgtttagaaagtgtcctgacagacgtgggtgtttggcctgggaatttattaaacataagtgaatgaaacaaatttaatagcgatcttttcccagttcacaggggaaaaaaagcaattattttttcaattttatttttcttccataaattagaaaaaaaaatctttgttgtctgctgcaatttacttgctagtgagtagtgaaagattgtaaaataaatgagcgaatgatcatggaggttttaaagggaaaatggcttttaatactttttggtttttttcttagaaacatgttcctgtagtttgattttaagttttaaagtcattactagcattgtccctgctgtgatagaatatgagtcttaaaatttcacgttctgcaaagaacactgatttccaaatgatctgccactggaacaaattgggaaccatttttctagcctgtactgtcttgggtttacaagcaaatgacctgcctttatgggaaggtgcttctgggtcataggccattcaaagaaaactttgatgacaaaaatttttgcttcagctaatcttttttacatatttgattatattatggtaagctctcacctaatattaagtagaaatagcttcttggcctgtacttatctgcattttaaataaacttacattgtgaaagcctgctgaaagtacctaattaagagcatggactctgagaattattaatggacagtgggaggaatagagaaacgtaagagagggaattccttcatttataatgttgtatgagaaccaggtctccagatacatttccagtgaaatgaaaacaaattttatggagtttaaaattttttccagtatccagataatttcagtgaggccaagagatctgtttgctgctgtgaatctatttaacaagtatttactgagtgctttctttatgcagggtctgttctttttttttttttttttgagatggagtctcgctctgtcgcccaggctggagtgcagtggtgctatcttggctcactgcaagctctgcctcccgggttcacgccattctccttcctcagccaccctagtagctgggactacaggcgcccgccaccacgcccagctaagtttttttttttgtatttttagtagagatggggtttcaccatgttagccaggatggtctcgatctcctgacctcgtgatctgcccgcttcggcctcccaaagtgctgggattacaggcgtgagccaccgcgcctggcccaatgcagggtctgttcttttaatgacatactagattacctgtatgctaagcatacaggtgtagggaaataggaggaggagaccgaaaacaagaaatgggagctggtgtggtagtgcccacctgtagtcccagtcacaagggaggctgaggtggaaggatcacttgagcccaggagttcgaggcttaacagtgagtggtgatcacaccactgcactccagcctgggtgacagagcaagattctgtctccacacctctcccctgccccccaaaaaacaaacgagaaatggttcctgatcttaatgagtttagagtatgcagctgtggtttcaatttttaattatacactttgattagaaaaatgttgccttagaatattatattttagaattattttttaaaaccttattgggatgtaattgatataaagtatatatttacagtacatatatttacaatgtacaatttgatgttttcaacaatgtgataagttatatatacacagtaaaaccatcccagtaaagctagtagacatatccttcagccccataaatttcctcttgactgtaattctccctcctatttctccccactctcaggagacatcccaagccatcactaatctgttttctgtcattatcgattgcattttctagagttttatattaatactgatagaatcatacagtacatactcttttttttcaatctggctttcagcatgattattttagattcatttatgttgcatatatcaatagttcattcctttttattgctcagtagtgtattccattgtgtagatatactgtggcttgtttatccattcacttatttatgtacatttagtttttcagatcttggctattcaaataaagctgctatgtatatttgtgtacaagtctttgtatgaagatatgtttcaatacaaagaatggaaattgctggtaattaccaaagagtggttggatcggatagtaggtggatgcttaacttttttttttttttgagacgaaatcttgctctgttgccaggctggagagcagtggtgtaatcctgactcacagcaacctccgcttcccgggttcaagtgattctcctgcctcagcctcctgagaagctgagattacaggcacgccccaccacgcccggctaatttttctatttttagtagagacagggtttcactgtattggccaggatggtctcgatctcttgacctcatgatccactcgtctcggcctcccaacgtgctgggattatagccatgagccaccacgcctggctgcttaactttttaagaaactttcaaactgttttctaaagtggttgtatagttttacattcccaccagcaatataagagatcctgttcctcccgccaatacttggtaatttaattttagccattctaatagcagtgtaatggtactttgtggttttagtttgcatttccctagtgattaatgatgttcaacatctttcatgtttttatttgccttccatatatcttctttggtgaagtgtttgttcagatctttggcccatttttgttgagttgttttgtttttttgtttttgtttttgtttttttttggggggatggagtcttgctctgtcgcccaggctggagtgcagtggcacaatctcagctcactgcaccctccgccttccgggttcgagcgattctttcacctcagcctcccaagtagctgggattgcaggcacccaccatcatgccctgctaatttttgtatttttagtagagacaggattttgccatgttgcccaggctgatctcaaactcttggcctcaaggaatccacccaccttggcctcccaaagtgctgggattacaggcatgagccatctcactcggccttttttttttttttttttttttccttttatcgaagtttcattatataccattctcttaatactatctttttatctttttctttctttctttttttttttttgtttttaagagatagggtcttgctgtgttgcctaggctggtcttaagctcctggcctcaaatgatcatcctgcctcagcctcccaaagttctgggactacaggcataagccactgcacctggcctatactatcttttggagaccaaaagttttttttgtttgtttgtttttgtttttgtttttttgagacagagtctcgctctgtcgcccaggctggagtgcagtggcacgatctcgattcactgcaagctctgcctccgggttcacaccattctcctgcctcagcctcccgagtagctgggactacaggcgcccgccaccacgcccagctaattttttgtatttttagtacagacggggtttcaccatgttagccaggatggtcttgatctcctgacctcgtgatccaccggcctcggcctcccaaagtgctgggattacaggcgtgagccaccgcacccggccaaaagttttaaatttttatcaatttgtttttttagggactgtgccattagtgtcatatctaggaaatctttgcctaacccagggttacaaaaattttcccttctagaaattttttatttatttattttaattttcaaaaatagagacagggtctcactatgttgcccaggctggtctcgaactcctgatctaaagtgatcctttgtccttggcctcccaaagttttgcaattataggtgtgatccaccatacctagcctgttctagaaattttatagtttaaattttatatttatatctatgactcatttgaatcactttttcttttttaaaaaaatctcaccttgtcttatggtgctgattgaatcattttatatatggtgtgataattctgtatatggtatgtttgtttttttgtatatggatatctggttgttctgtcaccatttattgaaaaggctgtccttttcctttgctaaaggtcttcatgcttttatttaaaaaatcagttgcccatatatgtgtggttttatttctggattctctattctgttctattgattgttttccttatctttatgtcagtgccgtactgttttggttaccatagctttatagaaatccttgaaatcaggtagtgttagcccttcaactttgttcttctttagagttgtttcagttattctaggacctttgtatttccatgagaatgttttaatcaacatatcaatttctacaaaaaagcttgctggaattttgattgagattgtgttgcatctacagatcatttgggaggaattgacatcagaacaatgttgagtcttccaactcatagtttaatctcttcatttatttaagtctttaattcctatcagcagtatattgtatttttatttttatttttatttattcatgtttattgtattttgtttttattttttgagattgagtctcactctgtcacccaggctggagtgcagcagcacgatctcagctcactgcaacctctgcctcccgggttccagcgattctcctgcctcagcctccagagtagctgcccagctaatttttgtacttttagtacagacggggtttcaccatgttggccagcctggtctcaaactcctgacctcaggtaatctacctgccttggcctcccaaagtgctgggattacaggtgtgagcaaccttgctctgccagtattttgtagttttagtatatatacttcaactaaaatttttattttctttttaaattgaattttaatatttcataatgggctgggtgtcgtggctcacgtccataatcccaacactttgggaggctgaggcaggcagattacctgagctcaggagttcaagactagcctggccaacatgatgaaaccctgtctctactgaaaataccaaaattagctgggcgtgatggtgcacacctgtagtcccagctacttgggaggctgaggcaggtggatctcttgaatctgggaggtggaggttgcagtgagccaagattgctgccactgcactccagcctgggtgaaacagcgagactccatctcaaaaaaaaaaaacaaaaaaaacccaaaacatttaataatgaaaacattgccagtattcttaattgatgtttgagatatttgcatccttgtggaaatcttggcagcacaatgaagaatttggcaaaaataaatatcagtcagactctatatccaaaaggatttatttccacattgtacctgaaactcaaatgttaattactgaacaagtgcattagcaagatttttaatttaaatgtgaagatggaaaactgaaaaatataaattaggaaataacatttctataacttgtcaaatgtagtggtttatcagggtaaaaagttaaagtgcttttgtgtgtgtctacacatggatttatagtatgagactattttgttttttgtttttttttattatactttaagttttagggtacatgtgcacattgtgcaggttagttacatatgtatacatgtgccatgctggtgcgctgcacccactaacaattctatttatagtgttacagtaaggaaatgccttctggcaatttgaaaatatggtgtaactaaaatacaggtctgacttgttaatctactgttaaagactggaaattattttaattgctctttttctgactaggctttcaaaaaatatgataggcaaattggttctgtcgtggtaattttatgtttactgtctctgtagaagtgtaaagcatggttctcttccattgtcctcttgatgtcctgttacagcatttatgggtgagattttaacattgtgtgtttatttttatgactgttttcatatttgaaattaagaagtttggcataagaaactttgatgcttgatgttcaaattgctttgtagcttatttaacaaaatcataatcacagaaaaagaatccatcccagttagacattatcttaattctcatgttcaatcattttcactgagtggggcccttggctttttatggaaagatgttataagaaacaaccttgccgggcgcggtggctcacgcctgtaatcccagcactttgggaggacgaggcgggcagatcacgaggtcaggagatcaaaaccatcctagataacacagtgaaaccccgtctctactaaaaaatacaaaaaattagccgggcatggccgtgggcacctatagtcccagctactcgggaggccgaggcaggagaatggcgtgaacccgggtggcgaagcttgcagtgagctgagatcgcgccactgcactccatcctgggggacagaacaagactccgtctcaaaaaaaaaaaaaaagaaagaaagaaacaaccttgcctcagggaggggggcctgaggaggcaggaggattgtttgagccaaggagttggtgaccagctcgagcaatttaggtaggcctcatctttaaaagaaaaagaaaaaaaaaaaaaaaaagaaacggccttatgaagtctactgccacacttacaatgtaaatgtttatttatttatttaaagatggagtctcattatgtttggaagcctgaaactcctcggcccaaggaatcctcccacctcagccactagagtagctgggactacaggcaccccactacgcctagttaaatgtctacttttttaaaaatgtcttttaaaagtcgattgatctattagaaatgtatggctaaaatgtaattaagttatctctggctgtgttaaagaagtgcagggtataagaggaaatatttatttctccaaaacctaatttgaatttattagaaaatatgttagaaacatatttctaacatagaaatacattagaaagcctgattttttttttttattattggtcctatatgaatttctaattgccttactgctagactttttggaccagacttcttcaaagagtagtctttccttactatggccttccacttccccattccccaattcaaaattatttttctttatcaattagtttgtattttgtcaaaattatttatgtaaataaaaagataattcgctctgcaaagcttgttatgaaaaatagcattacttcccccttaaacacaaaattttctgtttcctagagaaaaccattttaacttttcaaagtgatttatttacttctatatttctaagaaagaaaaagtgcttatattgctatttcatgtttttttctgttttggatgttatctgttgacttcctaccacggagggtaaggatttaatattctcttttttctctttttttttttttttcttggcagggactcactctgttgcccagactggagtgcagtggcacaaaggatttaatattctttaatatgcacatacattcccctccaaccacacacacactttccactttctcttcccccacttcaaagttatatcttaatttgagttggattaatattcaaagtttacattattatgactgtaaatgctatttttggggtttttttttggggtgggggggacagggtctcactctgtcggccaggctggagtgcagtggcacaatctccactcacctcaacctccacctccagggttcaagctgagattacaggcacgcaccaccaggcccagctaatttttgtatttttagtagagacggggtttcactgtgtaggccaggctggtcttgaactcctggcctcaagtgatccacccccaccttggcctcccaaagtgctgagatcataggcatgaaccaccacacccagcctataaatgctatttaatctgctttttcttttctaactcactgcttttactggagttattaattatcttgttttcttgtttgtgtgtttttctatgtagtacacttattaccaaattcaaactttttaccagttttctaaatatcctatcaagattttcatcccattgcatactctgtcaagtttgttttcttgagacagtctctcccagagccttctgacctgcaccagtgtggactggtcacctttattcctgttttacagctctcatcctataatttcctttcattttatcctgggcattcctttgacctttcttctctattgattcctttattttctttattccatatttttctttcttgattcatacccttgttttagtgtagtacaaatgacagaaggttaatgagaaagactacgtgagagataaagttttggaccttattctatctaagaatgtcacgttagcatggcatttgatattgctggtatcttggattccaggctgaacatcattaccatctagcttctagtattactgttgaaatctgaagctaatgtctgcttctcatatataatctactcctcctcacttccctgtcctcccagtcttgtaggatattctctttgtctccagggtcctgacattaaaattttgttcagtgacatgggcactagaaaagccctttagacttattttattgataatttcccccctcaatttcctctgtttgctagatgattctcaaacttttgaaaacctcatttatggtgaagtgtaacatataatcagaaaatgtgtaaaggataaatatacagtttaaggaacacctatttaacactcaggtaagaagacagaacattgtcagcacttttctcaggataactctccaaaaggtaaccgtttttgtggtattcactgttttgattttctttctttttgagacggagtctcgctatgttgccaggctggagtgcagtggcatgatctttgctcactgcaacctccgcctcctgggttcaagcgattctcctgcctcagcctcccgagtagctgggactacaggtgtgcaccaccatgaccagttaatttttgtatttttagtagagacggggtttcaccgtgttggccaggatggtctcgatctcttgaccttgtgatccgcctgccttggcctcccaaagtgctgggattataggcgcgagccaccgcgcctggcctgttttgattttcttaatagtttttccatctcagcgtgtatcccttaacaccattgtttaatttgttctgaatttgtttattttttatttttgtatttaattttgtctgactttgtgaatggaatcccattgtatgtattctttttatctggcttctttctgccaacattttttcagggtgcatccacattttatgtagctgtcattattactgcatttttttgactgtgtgtattccattgtattaataagccacaatttatctgtcccattctggatgaatatttgaattcttttctagttttggaaggtattattaataatgttatttatgagccttctagcgtatgtcttctggtaaacatttctctagagcattgctgtctagaagagatacaatgtgagccacacatgtaatttaaaattttccctcctaggctgggcatggtggctcatgcctgtaatcccagcactttgggaggacaaggcaggaggattgcttgagcccaggagttcaaggccagcctgggcaacacagcgagaacctgtctcaaaaatctaaataataataataataattaattaaaaaataaataaaattttccctcctgagtgaattaatgcaggaacaaaaaaaaaacaaatgctgcatgttctcatttacgggtgagagctaaacatggggtacccatggacataaagatgttaacaacagacaccggggactaatagaggaggtagtactatgctcagtacctgggtgatgggatcatttgtaccccaaacctcagcatgacacaatatacctaggtaacaaaatctgcacatatacccccttaatctaaaataaaagttaaaaacgaaaattatcatagccacagttgaaaagtaagaagaaacagatgaagttgattttaataacatatttttaacccaatctaatcatttcagcatgtgtcataaaaattgagaatttgacttcttattttaatactgaatccttgaatctggtttgtattttacaccaacatcccatttcaactcagtggagctacatttcaggtgttcagtacccacatgaggctagcgtctattatattggactgtatagctctaaagaaatatatgtaaatctatcctgaatatatatatatatatatcctatagtggaattgctcagtcatagactatacatatcttgaactttagtacttaatggcaaagtttttgaaagtgattgaaacattttacattccagtagcagtgtgtgatcgttcccattgctccacatagttaccaacatttgatattatcagaatttttagttttgctgcctggtgagtggatagttttcatggtcgtttaatttacatttttctgattacttaagagctagagcactttttaatatatatataggctatttgaatttattcttttgtgaagtgctagtttaagggttttttgcccattttttctcttgggatttttatcattttttttcttactgaatttttaggagttctctatatattctagatatgagccttttgttacatgtactacatatatcttctccaactctgtaacttgcctttttactttcttaaagatgtcttttgagaaacctaaattttaaagtttaatataaagtttatcagttctttccttcatagctagtaattttttgtgtcctatataagaaatctttttcaatcctgaaatcatgaagatattatctagttttacactgtcagagctttattgggtatatttatttattaggcctaacatgcagctaggattgatttttgggtaaaggttgaagtaggagttgattttctttttctgcagtggttcaacactattcatacacttccctgcctccctgcaactctctgccacacctcatactctacagtgccatctgtgtaaataagcgtctatatatatgtggacttgtttgtggactctgttatgtcccattgatttctttctctatccttatgccattgtcacattcttcattactatagctttgtaataaatcctgacaaccattggagcaaatccttgtacttccttacagacatatgactttgttgtcagtaattttaaaaaaagaatatatgactgattttcttagctttttgcacttttatttacatgttgaaattatcttggcatttttagcaaaacaacctgcttggttttgattgtgattttataactgcatgtatcaattttgagagaattcagttgtatacaatattaagtctgacagttcaccaacgtggtatcatctttcatttatttagctctttaatttttcttaaagtctagttttctccctaggagtcatgtgtaccttatcaggtactcaaggtacacggtattttaaattctactgtaaatgctatttaattttttttttttttgagacaaggtctcactctcacccaagctggagtgcagtggcataatcatggctcactgcagcctcgacctccgggttcaggtgatcctcccacatcagcctcccgtgtagctgggactacagttgcgtgccaccacatctggctaattttttgtagaagtggtgtttcaccgtgttgcccagactggtcttgaactcctgggctcgagcgatcctcccgcctcagcttcccaaagtgctgggattacaggagtgagccaccgcacctggcctaaaaattttgtttgctagctttgttgctggtacatagaaagaaaagtttattttttatgagttcaggtaatttatgtgtacaatatttttgtcctgcatgggtacattattttgtcctccatgggtgcatggattcttcagagaagcagaaccaataggagacacacacacacacacacacacacacacacacacacacacacacacacgacatttaaggaaataggctcatgaggttatggtggcccagaagtccaagatctgcatttgtcaagctgcagacccagaaaagccaatggtataattctagtcctagtctgaaggcctgagaaccagaagagctgatgatataaattccagtctgagtatcagtctgaaggcagaagaccggtgtcccagctcaaatacagtcaggcagagagaaagaattctttctcagccttttgttctattcaggcctttagtcaagtggataaggccacactggggagggtagtctgcttttctcagtctaccaactcaaatgttaatctcctccagagataccctgacagacatacccagaaatagtgtgtaaccagttatatgggcaccccaaaattaaccatcacaatgggcagtcagatgatctgcaaatttgtttcttctttaccaattctgaaattttctttttcttggtttactgcaatagccaggacctccaaatataatgtggaatagaaatgataatagaaaatatccttttccttgatctccaaaggaaagctgtcagtgtcttgtcttactattaactatgattttattgtagctttttttgttttgttttgttttttctttgagatggagtcttgctctgtcgctcaggctggagtgcggtggcatgatctcagctcactgcaacctctgcttcccagttcaagcgattcttctgcctcagcctcccaagtagctgggactacaggcacctgccaccacaccggctaatttttgtatttttagtagaggcggggtttcaccgtattggccagggtggtctcaaactctgaccttgtgatccccccgtctcagcctcccaaagtgctgggattacaggtctgagccaccgcacccagcctattgtagctttttagtatacatcctttatcaaatgaaagaagttcacaaagagattttttatttgtttgtttgagacagagtctcactctcacccaggctggagtgcaacagcacgttatctcggctcactgcaacctccgcctcccgggttcaagcgattctcctgcctcagcctcccaagtatctgggactacacgcgccttctaccatgcgtggctaattttttgtatttttagtagagatgggatttcaccatgttggccaggctggccttgaactcctgacctcaagtgatccacccgcctcggcctcctaaagtgctgggattataggtgtgagcctccgtgccgggcccacaaagagattttatcatgaatgaatgttgaatatttttcaaatggcttttttacatatatattgggatggtcatattatttttctttttttcttttcttttttttttttttgagatggagtctcgctcagtcatccaggctggattgcagtgatctcagctcacggcagcgtctgtctcccgggttcaagcagttctcctgccttagccacccaagtagctaagattacaagcctgtgccaccacacctagctgatttttatatttttagtagagacggggtttcaccaggttgtccagtctggtctcgaactcccgacctcagatgatccacccacttccagcctcccaaagtgctgggattacgagccaccatgcctggctgtgattgtataatcttatttgtatacattatggaatttagttaggtgacactttacttaggcttttttttttttctggattcataagtgaaaatggcctataattttgttttcttttagagatgaggtcttgctcattcccccaggctggagcgcagtggcaccatcatgtctcactgtagccttgaccttctgggctcaagtaatccttttgctttagccttctgagtagctgggactacaggcatatgccaccatgcccagctaatttttttattttggagagatgaggtcttgccatgttgcccaggctggtctggaattcctggcctcaagcgatcctctgaccttggcctcccaaagtgctgggattacaggcatgaaccactgtgctgagctaaaaatggcctataattttcatctttctttttgagtttttatataaagtctagtcccaaaataaattggagagtatctttttaaaaaaaattttctaaatgttcgcttaagattgttgtattgcttcctttatgtttgatgagtttgtcaatgaagccaggtagacccatataatgggctataatgcaagtctcaacaaatttcaaaagattgaaatcatagaaaatatgttttctggccaggcatggtggctcatgcctgtaatcccagcattttgggaggcagaggtgagtggatagcttgagctcacaagttcaagaccagcttgaggtcaaggctacagtgagccatgattgcactactgcattccaacgtgggtggcagaatgagactctgtctcaaaaaaattaaataactaaataaaaatgaaaaagaaagtatgttttctgacgacatgtgattattatagaaatcaattttaaaaaccttttaaaaaatctcatgtttaaaaattaaagaaatttgcttctagattcttaaggtgaaagaagaaaccataatggaaattagaaactatagtccaccattcttatccttgggttcttaatccatagattcagccaacctcagatcaacagtatttgggaaaataatggatggttgcatttgtactgaacacatacagacttttctcttgtcattatttcctaaacaatacaatataaccactattacatagcatttacattgtattaggtgttacaagtaacctatagatgatttaaagtatatgggaggatgtgtgtaggttgtatacagtgttacaccattatatataaaggacttgggcatccatggatttgggtatccacaggtgtcctggaactaatttcccacagacactgaaggatgactgtattttgaactggatgattacaaaaatattccatatgaaaatatgtgtgtttttacaaaagtagttttagagaaaacgtacatattagaaaagaaaggttgacaaaaatgagcaaagtatccatctcaagaagttggcaaaagaacataaaaagcagaagaaataatgaagataaagcaaaaataaatgaaatataaaacaaacataaaataggatcataaaagccaaaagttggttctttaaaagattaataacattgataaacctctgagatgctgatcaagaaaagaacgaatacacaaataactaatattagaaatgaaagaagggattttactataaatcctatagacttacaaaatatgaggctataatgcacaattttatgctattttttttttttttttgagatggagttgcccaggctggagtgcagtggtgcgatctctgctcactgcaacctctgcctcccaggttcaaacaatcctcctgcctcagcctccttagtagctgggattacagacacgtgccaccacacccagctaattttgtatttttagtttcaccatgttggccaggctggtctcaaacttctgacctcaggtgatccacccacctcggcctcccaaagtgctgggattacaggtgttagccaccgtgcctatgctaattttttaaaactctcattttgttcaggcatggatctcttaggaaatggcaaagtctaaatcgtagactaatcattgtttggcaatggttggtttagtggtggcacgtgatgtgatgttaggaagaattctatggtaaattttgagacttcaaataaaatggttaacttcaatgctgtgttttttgtggggagggttttaaattacttttgcttaactatgaggctattcaagttatctatttttgtgttagtgcttctgatatccttctgacttcatggcataaaaagttaaagcaggctgggtgcagtggctcatgctataatctcagcactttgggaagctgaggtgggaggatcacttgagcccaggagttcaagatcagcctgggcaacatggtgagacttcatctctacaaaaagttttaaaaattagccaggtcatggtggcacacacctgtagtgccagctacttgggagactgaggtgggagggttgcttgaccccaggtctgcagtgagcctgggtgacagagtgagaccctgtctcaaaaaaagaaaagaaaggaaagcaatacttttttaaatttctttcaacaaatatttataggacacctactgtatgctaggtactattatttaccatatttcttatatccagtcagactggattattatttaggacagaaaatttagaaacaaaaacggctcatccctagaaggatgcagctgcttaaaaaaaaaaagaaaagaaagaaaaaaaaagaaaaaaaggtggggtgcttagcatagctggtggtgacagtgctattgtgaaagctgagtagcacctatttcacagagcacctctataatttgtaaaggagtatggtttttcagatgttacctttattactgggattcatgacctgcgtagacttcaagtaggtttattgacttcagggtatccacagttcctctgaaattgtatagaatagtttatgtgtatatgctttttggtgatagggaagagagggttcaatggctttccatagatttttcaaagggtccaaaaatgcttaagaaccactgctctgtgggttaagaaaagtttacagagaccaacaaatagtttttttcttcattttgtgttttatgtctgttttgagtaaccattatagtaaaatattatatataagattctctttgacttttgttcaatttatattattttgccattactttaactgataacttttttctaaaggttcaggaacaagtgcatcccactctctcagctaatgaagagtctctctattatattgaagagctgatttttcagctgcttaataaattatgcatggcccagccaaggactgttcaagatgtagaggtaaaaattattttgtcatttcaaaaagtcactcaagcactgtatgaattaatttttgtatctatatcattctaatttattgtgaaaactaaaaccactgaaattatgtatgatatatatggtcagtttgtttttgacaaaaatgtcaaggcagttcattgaggaaaggcaagtttttcagaaaaaaaaaaacttagaacaactgggtacatttatgaggggaaaaaaccttgaaacctatctcatgccgtagacaaaaattaattcaaaatggatcatggccttagacataacagctaaactacaaggtttctagaagaaaattctggaaaatatcttcataacctgggtttaggcacatattttttagagaggactcaaaacatagtactttatattgaataataaggccaggtgcggtggctcacacctgtaatcccagtactttggctgaggcgggagaccgtctcaaaaaaaaaaaacaaaaaaaaaatgttctctatgtcagttgagatgatggttacacagacataagcatttctaaaactcaacaaattgtacattttaagatctgtgtattttactgcatataaatattacctcaataaaagattagtgtaaattttgaggacatttgctcagtgatttaaaaaaatgtatatgtatgtgtgtgtgtatatatatatatatctgaaaaactgtttaaattagtactaaaataattgttttgccttggttacatgggagtatttttggatttttagcaatatctgttagggagagttttacttcttttgtataaaagcaccctgtgcacataaaattaatattaataaaattggtattattttctcctgctaaaaacaaatgtctaatagtacagctatcaaaaattattttcatttttattttttgagatggagtctcactctgtcgcctgggctggggtacagtggtgtgatcttggctcactgcaacctcagctacccaggttcaagctattctcctgcctcagcctcccaagcagctgggactacaggcgtgcaccccaggctaatttttatattttcaaaaattacttttatactatactgtttacatttccttttgttttgaaatttgtttctataagcaacaactttctttctttctttttgtgaagtggcatgatcatagctcactgtagccttgaactcctgggcccaagttgtcctccggcctcagcctcccgagtagctgggactacaggcacgtgtcactgcgcccagctaatttttatttttatttttgtaaagactgggccttgccgtgttgcccaggctggtcttgaactcctggccttcagtgatcctccctcctcagccttccaaagtgctgggatacaggtgttagccaccatgcccagctacaacaactttcagtataaaggaaaatcttaatttgtagtgattgagctattaagattttccaggattcttggaattaaagcatttttttcccctgttctctgctgccaattgtttgggttttgttgtgttttgttttaagagacagggtcttgctttatcacccagactagggtgtagtgacaggatcatagctcactgtagccttgaactcctgggatcaagcagttctcctgcctcagccttccaagtagctgggactacaagtgcatgcaaccatgcctggctaatttttaaatttttttgtagagacagggtctccctacattgcgcatgctggtttcatactcctggcctcaagggatcctcccacctcagtctcccaaagtgctgagacttagaggcatgggccaccatgcccagcctctgctactagttttgaacatgaaataaacagactgaaagcatatttttcaatagctaaatttgctaaaatctgagactataactataaatataggaaaccctgctaaattagagtttaattcagatctcagtagttcttgtttttcatgccaatgaatcactgattaaattaaaattagatgaactgcctaggtgcagtggctcacacctgtaatcccagcactttgggaagttgaggtggacacaatcacttgagcccaggaatttgagactagcctgggcaacatggcaaaactctgtctctacaaaaaatagaaaaattagccaagagtaggggtatgtgcttgtagtcccagctactcgggatgctgaggtgggaggatcactggagtctgggaagtggaggttgcagtgagctgagatcccgccactgcacttgcacttcagccagaagtgacacagacagagtgacaagagtgagaccctgtctccaaaaacaaaaaagcaagatgaacacaaaggctaagattgtttttgtcaaggtacgtattttcataagccattctgagctctctcacccatttcatcttccaagagatacatgacgtcttttatttgaagctctaagattaacgaaaggagagtggctgtatactaatgattaaaaatgaatgaacaatttctgctctgctaggtaaatagttttaactctagaaacctaacttaaaatcactaatacactatttcatgttcgctttaatctttcttatatatcctatgtattgttttttcctttttccggttcatcttaattatgtttaaagctttctttttgaagtttacctttttgttttatccatgaaaattatgtggaaaaattttgatagtcctgttgaccttttttttttttttttttctgttgggggtctccctctcacccaggctggagtgtagtggcatgatctcggcttgctgcaacctccgcctcctgggttcaagcaatcctcccacctcagcttctgaagtagctgggactataggcatgcaccaccaccatgccgggctaatttttgtatttttaatagagatggggtttcactgtgttgcctggctggtctaaactcctgagctcaagtgatccacctgcctcagcctcccaaagtgttgggattacagacgtgagccaccgcgcccagcctgaccttttttttaagccaaaaaatttatttattacaggaatcagaatgtattgtgtcactattatctgctagcattaagaatagagatcaagttgaattttgtatgaatttcctatttatgaacacttttattaatactacaatggttctgctgtgattgagcaggagcgagttcagaagacctttcctcacccaattgataaatgggccattgctgatgcacaatctgctatagaaaaacgaaaacgaagaaatcctcttttactgcctgtggacaaaatccatccttcgttgaaggtaacaaaagattaaacattagttggggggtgttctttataacaagtaatattttatttctatatttataaagcattaatgtagcatggtctgtgttagtgtgtatatgtgcacttccatatgtatgcttgtacatacacatcgtatatattaatatgtatacaaaatgattatgctctggtgaaattggattgcttttcaaacaatattaaaaattattaatagtgataatgcattactattattttgtggcatcttttttttttttaagtagagacagggtcttgctgtgttgcccaggctggtctcaaactcctgggctcaagtgatccacctactttggcctcccaaagtgctaggataagagtcatgagccatcaggcctggcccattgtggcatctttatggcatcttccaatgactgctactctgactaattcctatgtagtaggccatgattctcagtcatttgttgattaagaaagtgtataatttcagaagctactgtgagttcagaactgtctttaaaattaatttatattatcacagattattttttatatactggaaaagtggactaggacctagtttggctattgcatattaacgcatagggcaaaatatgtttggtgtatatggattttaagagttttgtagcaaattcaagccccccccgccccgcctgcctcacacacacagacacttccatacctcccctcagtagaaactactgtaattaggggatactggttttaaagcagagtccttgaagatagcagatattttgatatttgtcagatgaattttggttaatgtattaagaggcttttagtggagtccaacccaagatttctatatcaagatcaactgttgttgtttgataaaaggcagagttgttagattagatgtctcttaaaagaaaaaaaatcccctaatacagggaccaaagattcattttatatcccgtggtacccatacatttagacatgtagttaatagaaaattttttataagcaaggatgttaaataggaattttttaagtgtgtaatacttgacagtgctacattttgcaattaaattatttattcttttcacaggaagtattagggtacaaagtggactaccatgtatccctatatattgtggctgtactagagtatatctcagctgatattttaaaattggctggtaattatgtttttaatatccggcattatgaaatatctcagcaggacattaaagtgtcaatgtgtgcggataaggtaagtgttacaaggtatttaaatttaacttgaatagcaactatactaatttctgcctcaatctttttgtgtacattattagataagtaatctttataattgctagtactggaagagagaaaaatcctggctttacagagtaaccatgatatttccaggtttttaagcatatggcaggatggggatctctttttttggtcaagaatcttttacttacaagaaaaaaaacatccaaggcctcaaaacaatttaagtagtttcagttttatatttttagaaagagaatatatagagttctactcaggtacttttaagtgtaagtaattttgaagaccctactttggtttcacagcatagcttagtgaggcacaggggagagaaaattagactgcaatgttgaagttactcccctctgatcatttttttgtttttatatctgtcttctttcctggctgtaagctacttgtgggaagaaattgagtcttccatattcttctatattcctttacttaccttcttattcttcttcctgttatttgagacaaggtctcactttgtcacccaggctggagtgcagtggcacaatctcagctcactgcaaactttgcctccctggctcaagcgatcctcctatctcagcctctcgagtagctaggaccacaggcgtgcatcaccacgtccagctgtttttatattttttggagagatagggtttcaccatgttgcccaggctggtcttgaactcctgagctcaagtgcttgcctcagcctcccaaagtgttgggattataggcatgagccactgcacccactgaagctataacgctgaataacatagcaatctttgtgttagaaggtatttattttactgcaaaataaaaatattataaacagataattacagaacaatatgattaaaactatcatactagtaagtccaaggtacagtggagaaagtaatgaactttagcacgggtgaggccagaaggactacagagaaaatgcctaaatgaaactctctcagggtgaacaaccttcaggacctagcacatgctggtggttctcagccttgactgcacatcagaattaatagaaagctttttaaagaatgctgatgcctgcatatcacccccagagatttaattggcctggattggatctccaaacctcagtgttctttgaaagcattccaggtaattctgatgtgcagttataatgactgagaccgattgtacgatgccataatttcagaaatgacttttcacttacatcatggtagcaattccttgttatctctattttgacttacaaaattatggctacttttttttttttttactttgaaaatatcttagacttttagaaaagttggaagtacaacaaaaagtaagcccttgccacttgaaccatatgagagtaagttgccaatatagtatgtcctataaacaagaacattctgctacattaccacagtatgactgacagtcaaaatccaggaaatgaatacatttgatacattataccatctaactttcaaacatcattcaagttttgtcacatatcctaatgatctttttaccaaaatcattcattccagaatcatatattgtttatgtgtcatgtatttttatcgtcttcagtctggaataattcctcattcctcccttaacttcaaaaaaaaaaaaaaaaagatggcaaagcaggccaggtggtggatcacgcccgtaatcccagcactttgggaggctgaggcgggcaggtcacttaaggtcaggagttcaaaccagcctagtcaacatggcaaaaccccgtctctactaaaaatacaaaaaaagtagctgggcatggtggcatatgcctgtaatcctagctgcttgggaggctgaggcacgagaatcatttgaacccaggaggtagagtttgcactgagttgagattgcaccactgcactgcagcctgggtgacaaagcaagactgtttcaaaaaaaaaaaaaaaaaaaggtggaaaagctgactttattcaagagaggccatggcaataggcacagggaccactgcagtgtaatcctgtggttggggagagagatgttagaatcaactctcctcccttaacttctataacctggacgcttttgagagttacaggtcagttactgtgtagaatgtccctcaatttcggttttctctgttgttttctcttggttagaatcaggtaatggtctttagcaggaatatcatagaaattgtgctgtgttcttctcattgcattttctcagatggcacacaggcacatgatttcattgtgtctcattagtggtggtgatgttgacttcgatgacttgattaaggagttatctgccaggcttttcatctgtgaagttactgttttcccttttgtaattaataaatgaatattttgtggagtactttgaaactgtgtatcttattctttatcacactcaaatttaatatggactaatgaattgttattttattcaatgggtcataatctgttacttcattatttagatgttgtaggccaggcaccgtggctcatgcctgtaatcccagcactttgggaggctgagacaggtggatcgcttgagctcaggagttggagaccagcctgggcaacatgtctctacaaataaaaaaaattatccgggcgtgtgcttgtgactatagtcccagctatttgggaggctgaggtgggagaatcactggagctcgggaggttgaggctacatggaatcgagatcacgccactgcacaccagcctaggtgacagagtgagacactgtctcaaacaaaaaaaagttccggttgttccagatttggttattaggagccctagcttggtttttctgttcctgtcattatttgagcactttattttcttttccccttcctatttattaatttatttaattataaattgacaaattatagttgtatatatttatggagtacaaggtaatgttatgattacaaagaaaatgtggaataattaaatcaagctgattaacatttattacctcaaatacttattttttgtggtgagaacatttgaaatttactcttagctagtagaatgatggttacaaggctaggaaaggtagctggagtgggggaaatggggatggttaatgggtacaaaaatattgttagaatgaatgagatctagtatttgatagcacaacagggtgactacagtcaacgataatttgttgtatattttacaacaattaaaagagtttaattggattgtttgtaacacaaaaaaaggataaatgcttgaggtgatggagactccattttattctgatgtgtgcattatatgcctgcatttaccccatacatatatacacctactatgtacccacaaaaatttcttttaaaaattgaaatgacaaaaaaatttactctttttgcaattttgaaatgtaaatacattattatttactatattcaccatactgtgcaataaatcttacaaaaaagacccaattcctcctaattgaggttttgtcccccttcccttcagcctctggtaaccacattctactctgcctctatgagtttgttccagattccacatgtaagtgaaaacacatatgcattttctttgttgtttgttttttgtttttgttttatttcttttttgagacggagtctcactctgtcgcccaggttggagtgcagtggtgtgatctcggctcactgcaacctccgcctcccaggttcaagcaattctcctgcctcagcctcccaggtagctggaactacaagtgcccaccaccatgcctggctgatttttgtgtttttagtagacggggtttcactatgttggccaggctggtctcgaactcctgaccttgtgatctgcctgcctcggccttccaaagtgctgggattacaggcttgagccaccacacccagcttctttgtttttgagagcttgagtctccctctgtcacccaggctcactgcagcttcaaacccctgggctcaggcaatcctcctgcctcagcctcacaagtagctagagctataggtgcctgccaccatgcccagctaatttctaaattcttgtaggaatggggtcttgctatgttgcccaggctggtctggaattcctggcttctagtgattttcttgcctcaacctcccaagatgctgggattacaggtgttggccactgcaccaggccataaactatttttttttaataagtcattcctttatttgaagcatttttccatgtcctaaatcttcaccttttgagagtttaaaaaaatcttcatgtggcaggattttcagatccccttgttatattgcttttagactgatttctaaaactgtgaagacaatagtccagatttggtctgaccaacagagtatattgaaatgcatgtacgtatccttcattctatatgctattctttaataatttcagcattaatattttggcaccacgttactctgtgtacttgttgagtctgcagatttctaaactcccgaggactgttccacatgaagtaccattatgttaggtctttgatttctccaacttgtgcttgttgattttttgttattgttgtaagaatgaacgtgaatttatccctagaaaacttcatactgttattgaggctatgttccagcatatgtagatattttaaaaattgaattctgtcattcagcattttagatactctacccaggtttttgtaaagtgtacaagtctgataaaccttgaattaaaattatttagtaaaaatgttgaaaaggccaggtgcctttgaatctgagaggcggaggttgcagtgagccgagatcacgccactgcactccggcctgggtgacagagcgagactccatattattttatttaatttatttattttttattgttgagacagagtcttgctctgtcacccagtatggagcgcagtggcgtgatcttggctcactgcaacctctgcctcccagtttcaagcaattctcctgcctcagcctctcaagtagctgggataacaggtgcctgccaccatgcctggctaatatttttgtatttttagtggagatgggattttaccatgttggacaggtgggtctcaaactcctgacctcaggtgatctatccacctcagcctcccaaaatgctgggattacaggtgtaagcccctgcgcccagccaatactccatcttaaaaaaaaaaaaaaaaaaaaaaattgaaagggattatataagaaatgagatttctagcatatgttattagtggcattcttctaggttaaaagttaccacttttcttcattcctgccttttagttagctattatttcacattttatttaattcatgggtcaacaaactttacctataaagggccaggggataaatattttaggctttgtgggccatacgtctttcttgcatctactcttctctgctcttgtagcatgaaagcagccataaatgaatgagcatgggctatgttccagcaaaactttatttacaaaaacaggctgcaggctggatttggcctgtagtttgctggtccttgtttcagacattcctgtcatgatcccctatttgtcacaagagactgtcatatgcttagctaaaatccagatgacttggccgggcatggtggctcacacctgtaatcctagcactttgggaggccaagacgggcagattgtctgagctcaggagtttgagaccagcctgggcaacatggtgaaaccccatctctactaaaatacaaaaaatcgtccagacgtggtggcgattgcctataatcccagctactcaggaggctgaggcacaagaattgcttgaacctgggaggcggaggttgcagtgagccgagtaccacttaactccagcctgggcaacaaagtgaaactatgtctcaaaaaaaaaaaaaatcccgatgacttgatatgtgggtctagttatgtaaccctaagtaatgagattgtatgatgtggtatgatcttagtatatccaaactgatatctagagatcactagttcaagagctcacagaccatttgtttaataaattatttgaatatatggtttctagggatatctttaatttgccagacagagaacttgagaatcaaccctatttctttacagttaaaaataaaaataacatgtggctatatgaggtatgctagcatatcaaagattgctgagaattagatgatcataggaaagaaccatagaatttaacttctagtatataagttactattaatgaaaatagtatttaaaactggaaaaactgaacataaatgcttaagaaggaaattgatgtttaggaaaggtaaaggccaggcacagtggttcacgcttgtaatcccagcacttttggaggttgaggcaggaggatagatggagcccaggagtttgagaccagcctgggtagcatagcaagacatcatctctacaaaaaatttaaaaaaagaaacaaagaaagaaaggtgagataccctggggaatatagcaagacctcatctctactaaaaataaaaaaaatattagctgggtgtggtggtgcatcccagctacttggaaggctgaggtgggaggattgtttgagcctaggacattgaggctatagtgagctattattgtgccattgggcaacagtggacaaaaaaaaccaaaaaaaaggtgagagaataagagggcacaaagctgctctgaggaagcttagttcaccagatctagatatactagcagttgagttctgtattttctttcttttgtttttaacctattgaattatacttttttttttccttctgagacagactctcactctctcaaccaggctggagtataatggcgtgatcttggctcactgcaacctctgcctcctgggttcaatccattctcctgcctcagccttctgagtagctgggattacaggcacttgccaccacgcctggctaatttttgtatttttagtaaagacagggttttgccgtgttggccaggctggtctcgaactcctgacctcaagtgatctgcctgccttggcctcccaaagtgctaggattacaggcatgagctactgcgcctggcctttgtttttgtttttgtttttttttaaagacaaggtcttgctctttcgcccaggctggagtgtagtggcgcaatctctgcccagtgcaacctctgcctcccgtgttcaagcgattctcccacatcagcctcctgagtagctgggattacaggtgcgtgctaccatgcctggctaattttttgtacttttagtagagacagggtttcgccatgttgggcaggctggtcttgaactcctgacctcaggtgatccatccaccttggcctctaaagttctgggattataggcgtgagccacccatgcctggccagaaaaatctgaagctaacaggagtggggtatgaatatattttctctttcatggtagtattactccatctgtttcaagagctagcttgctcgctcctttttttttttttttttttttttttttttttttgtgacaaggactcacctaagccggagtacggtggtgtgaacacggctcactgcagcctcaacctccagagctcaagtgatcctcatgccttagcttcctttgtagctgggaccacaggcttgaaccaccatgcctggctgtgtttaaaatttttttgtagaaactgggtctctctttgttgcccaggctggtcttgaactcctgggctcaagcaatcctcccagtttcagactggtgaccttctagtgaatagggtctctaggtttgttttttaaatttttgaattatttgccatccatttatatttacagatctaaaaattttacataaaaatgtaaatcccagacttttcatgaaaaaagaaaatcagaatgcctaacagaaaacagctggcactgagcagcacacttcctctttaggtgcatgtaccttccggtttaccataatccccactgtttcttatatattataatgttacttgcctgacccctgtagcatttaaattcaggaactttggtattatgtgaccaaaagagttttaagaatggaactctggagtgggtggtagagaaggtaagtcatagaggaggccccactgacagaatggtgtatcagaagccaagaagagaaaaattgtttggggctggggggtttatatgtgttttttcttatttagagataggatctcattctgtcactcaggctagaatgtggtggtacaatattagctcactgcagcttcgaattcctgggctcaagtgattctcccacctcagccttcagagtagttaggaccgcaggtgtctaccagcatacctggttattatttttttttacttttggtagagatagaatcttgctatattgcccaggctggtcttgaatgcctggcctcaagtgatcctcctgcctcggcctcccaaagtgctgagattgtaagcatgagccaccatgcctcgccctgagagttttaagagttttaagaatgagagaatggtcagctgtgtcaaaaactagagaaaacaagtaggaagactaaaacacaccattagatttgacactagatcaatagtgagagcagttttaatatagtaatgggcttgctaagtgaatgggagcaagaagttacagctagcaagtatgacctactctaaaagggtctctggtggggaagagaagagggtggtagctcttctgtgtgtttttatgtcttatgtcttcctttattttgcatgtctgtttgaaatcagagttcatcaccaaattccctgtgtagccttactggtttctttaaatttaaagtggctgggaagtggggatgatggtctccaatgacaagaaggtggattgcatggagtaagcagtggggaagggagggatttgagagtgtcacagaacatgagattaggaaggtgggttggagttaaattatgaatggcctttatcctaaagaagttaggattttatgcagaaggcaatgaaatccagtatcatttttatgtatcatttatttttagtaacatgattttagaactggggttgggaagacctgtggcaggcagatcaaattatgaaacttgtgtatctttttaagagatggtgattgtttagtggagtaatctaaagcctgcggtaagatggagagagctgaccagatttaaaagatgcttataagatatttctgagttagattcaaaaagattaggaaggcagagttcatgtttactttattagcatattttaccaacatgtggtacagtttatggtgatcagtagatgtttttcagaatgaatgaatgaatatctgttattgtgttgtcagaatttcctctcatccctttgaagtttttactttttgtagtttccttttcagggtatacctttatgctgaactctctgggtacgtttcggtcagtcttaaatatataattaactaggtccaatcatttttttttaaaaaaagtattattaattataaaatgtatggtcacagccaggcgcagtggctcacacctgtaatcccagcactttgggaggctgaggcaggtggatcacttgaagtcagaagctcgagaccagcctgaataacatggtgaaaccccgtctctattaaaaatacaaaaaaaaattagccaggcatggtggcgtgcacctgtaatcccagctactcaggaggctgaggcaggagaatcacttgaacttgggaggcggaggttgcagtgagctgagatcatgccactgtactccagcctgggtgagagagcaagactctgtctcacaaaaaaaaaaaaaaataaaaaataaagtatagtcaactttctttttcactttgatttatagctagttcttgcctgttggttgacctaagtccatggtagcatttctgaaagaagaagtggttgctacaacaatttaagcatctgtgagatgtttgggtttagcaaatgaacgtaatagcagtggtcattgtagtaaatgtgcatcagaaatgcatcgcactgatctatcgtgtgcctctaccatagtagcatttcacttttctccttttaaccctactcaaatatgtactgtcatccttataatatggcaaggaactaccatgttgaatacctactatttgctagatgtagtagtatgcattttatatacattaccacattgaattcttcttatcagctacattttactcataaggaatgtgactttcaaaagaataaatgtgttcataatcatagtcgagtagtggctgaactgggatttttggctcgggttattgttccccaaagacaggcttgctttttttttttttttttgctattatgtgtgtgtgtgtgtgtgtattacagtatacatatatacatatacatatgtattagtacatatttcaccattagttcatatctccagaaatatttattttgccatactcgattttatttgaatatttcccaccttcaacaactttttttccttttattctaggttttatcatataaatttacttataatacacacaactcattgtgtaatatttgtgtgtgcgtgtgtgtgtgtgtgtgtgtgtgtgtgtgtgtgtgtgtgtgatggagtctcgctctgtcgcccaggctggagtgcagtggtgtgatcatgactcaactgcagccttgacctcccaggctcaagcaattctcctgcctcagcctcccaaatagctgggattacaagcgcctaccatgacgcctggctaattttttgtatttttggtcgagacagggtttcaccatgttggccaggctggccttgaactcctgacctcaagtgatcctcctgccttggcctcccaaagtgctgggattacaacacccagccctgtttaataacgtatagatttcaagtactttgaggcagtttttataaaagtaaagaaaataaatttatacattattgatttctgtttctcaggttttgatggacatgtttgatcaggatgacataggtttggtttctctctgtgaagatgaacctagttcttctggtgaattaaactactatgatcttgtcagaactgaaatcgcagaagaaagacagtatctacgggaattaaatatgatcataaaagtgtttcgagaagcctttctttctgatagaaagctgtttaaaccttctgtaagtacctttttgggtttgaaattctgtgtaccccaaaaaaccagaccagcttaaaatcatagtcacttttttttatttttttgagacggagtcttgctctgttgcccaggctggagtgcagtggcgtgatctcagctcgcaccactgcagcctccacctcccgggttcaagcaattcctgcctcagcctcctgagtagctgggattagaggcatgcaccaccacaatcggctaatttttttatatttttagtagagatagggtttcttcatattggccaggctggtttcaaactgccgacctcaagtgatccacctgccttggcctcgcaaagtgctgggattatacgcatgatccactgcacccagcccataaatagtaactttaaatactttatgagtacattaaaaatactttcatgtatttgtgggctttataaacatgtgaattgttatataataggtacagtgacaatgaaaattaggcacaaaattagaaggaggtttatactggggtgaaatcattttccgttatgcagttctgatatttagagtcattcatttggaggtggtgaaaaagatgtatggtctaggaaaggaagacctctgcatttttctgtcttttggtaagtaccttaaggcagtagtttaaagttttagtttgaagctcagaataccatggggttaaaaaaaataaagttttaacggtggaacttttaaaaataaaagtttatgcagaatgccatgtttaacaaacaaaaaagttttttttctttcttttatcacatgatttatttttccatgtctatgtgtttggcccacactttaaaaataattagtcttgaccgggtgcagtggctcacgcctataatcccagcactttgggaggccaaggcaggcagatcacgtggtcaggagatcgagaccatcctggctaacacggtgaaaccccgtctccactaaaaaatacaaaaaagttagccgggcgtagtggtgggcgcctgtagtcccagctactccggaggctgaggcaggagaatggcgtgaacctgggaggcagagcttgcagtgagccgagatcacgccactgcactccagcctgggcgacagagcgagacttcttctcaaaaaaaaaaaaaaaaaaaagtaacaataataataataataataattagtcttggccaggtgcagtggctcatgcctgtaatctcagctgttttgggaacctgagacaggaggattgcttgaggccaagaatttgagaccagcctgggtaacagagcaagacccagtctctacaaaaaaatttaaaatttagctgggcatgatggcacatgcctgtaatcccagctgctggggaggctgaagtgagagatttgcttgagccaggaatttgagactatagtgagccatgatcgtgccactgcactccagcctgggcaaaagagcaagacctcggctcaaaaaaaagatacttagcctttgtcttatttatcttgtacctcctaacttcctccacaaaataactacattgtgagtaaataagagtgacactcagacacaggtggttgagtatttaaagttaggaacagatttagcttttctcattatattccaaaagaatgagttttaaatgataatcgaaagtgttttagttggcaattactttttttcttttggatatatgtttagtttaacaatgtttataataactcctactgggaatactatcataagtagtcagaactttatgtttttcaaagtactgttctattttatttgacccttataacaatcctgagggatagaatgggcaaatattgtcatctctactttacttgtaaggagattgactttttttttttttttttaaatatagatgggggtcttgctatgttgttcaggttggtcttgaactcctgggcttaagcagtcttccttctcagccccccaaagtgctaagattacaggcttgagccactgtgcctagctggaaattaacatcttaatcaagttagttatagagcttaatcttgaatgtggcttcttttctaccacgttataattggattttgtctctagtggtatgaagaataaaaacctaataaatgctggcagctaatattatctttgtctttttgtgtcccatcagttttcattcctcaggaattaatttttatgggtctcttttcactggattagtgctgatatgacagaaaatgtctattttaatactaaagggtcagatggaagagtgaatcccttttttatctatctctgtatctactataattttttttagcattaagtaaaatataaacttttgagggaaagactatctaaaatcagagcatagtactctgcaaatattaaagaagtgaatgacttaaaaatgatcttaagttactccttttgcccctcatcctatgttttcaaaaagctcgcatttctggaaggcctaatatgtgccaggagcattttacagaaatcatctaatttaaccctaagaccctgatgagctgggtattagcagaccaaatgtgtgataacgggcaaattacttaactgctctatgcctctgtttcctcatttgtaaaatgaggatgatgatagtacctatctaataaggatattaggttattacatttcaagtgcttagaagagtgcctagaatataatgtgcccaatacatgttagttgttattattgtccttttcattcctaagccagggtcattcatctggcatgttgtaaaagggaaaaacagtttttcctctctaatctttttttttttttttttgagacagagtcttgctctgtcatccaggctggagtgtaatggtgcagtcctggctcactgcaacctctacctcccgggttcaagcgattctcctgcctcagcctcccgagtagctaggattagagatgtgcaccaccatgcctggctaatttttgtacttttggtagaaacggggtttcgccatgttggccaggctggtctcgaaatcctgacgttaggtgatccacccaccttgacttcccaaagttctgggattataggcatgagccaccgcgcctgacccctctctaatcttcacactcaacacagaacatttctgtgacaacgtatgtgaggattttttccccatacaccaaagtaattctcctgtgtacaccaactaggtgtcctataatttagctcaattttgacattatttacctctaaatagtgtcagatctcacagattaaggactcagtcccaacacgactgtctcacacttcaggcgccaattgaaagtcccaggttgtgaactgtgctccgaactgatcagttataaattggagttcccatgaccccctccttgggttccattaatttggtcgaacagctcacagaaatcagggaaacacgtttaccagtttattatgaaggactttaaaatgatacagatgaagagatggacagggcaaagtataggggcacagagtttccaagccctctctgggcaagccaccctcctagcacctccacaaggtctgcaaccaggaagctcatcaagagtttttatggagcttgatctctagcctctcacccctgccctttttttttttttttttttttttttgggagacagggtctggctctgttgcccaggcttaagtgcagtggcaccatcttggctcaccataacctctgcttcctgggctcaagcagatcctccagcttcagcctcctgagtagctgggactacaggcacacaccaccccacccgactaattttgcattttttgtagagatggggttttgccatgtttcccaggctctttccccaattttttagaggtcagtgggtggggctgaaagttgcaaccctctgatcctttttctttttctcatgagtcagtttggtttcaagtaacccttcaatcctctaatcatctggtctttttggtgactggccctatcatgaggttatctaggggccctactgtaagtaacctcattagcataaactcagtatttatcaaaggtactcattatgaataacaaaagacattattatcactcaggatattcttagcgttttaggggctctaagacaggaaccagggacaaagaccaaaaatatgtttcatattataccacatgtggtggagccaggatccaagctcaggtctgtcaggttccaaagcccgtgatgtttccattataagatgccagagtgaataatagttggccataaccgggatggtcagtcatatgatgtgtttgtgttcagagggcttgaacctgtcttatcctagatatatggctatctgccacatatgatgttttagtcagtgataagactataaatacccatatatatgacagtaatcctgtaagattatactatatttttactgtaccttttctctatatagatatgtttagatacacaaatacttaacattgtgttacagttacctacagtattccatacagtaacatgctgtacaggtttgtagcccaggagcaacaggctatacctatatggcctaaatgttgtagtatatcatctagccgtgatatttgcacaatgacaaaatcgcctaacagcgcatttctcagaacatacccgtctttaagcagtgaatggctgtaattcacagacgggagcttggatgaaatctgtaattccttctcagatccaggagatgggccctaaattgtgaaaccagattgtaacaggattaggagttatcttcattctcatcccagctcttaccattaatctataagactatatagcctaagctataagtaaaacctagggctctgtaagaccttgatcaagtcttttagcatctcagccagttttaaaacactcaaatgccagaattctttatgtaaaaagtagcttagaatcatccacagtaggaggttttagatttaacaaaactatctagaatctatattttgtagtatttttattgtctgttatccaagagatttttaaaattctcttcctgttcatgattgatttttactgtcttggaatatattaatttgagattcaatgaagatatacccttaactcttatattgtttctttttttttttgtacaagcaagtctctttatttccaaagtacgttgacctctccaacccaagttaaaagaatacacagtatgattccatcttttaatatattaacatcaagatgtacatgtttgaaaatggttggaattttatactggaataatgcatactaaactattaatagtttctacctctgagggtcatgggtgtaaggggggcatgaaagtaaacattcatattttactctctctgtcttgtgtttgaatcttttataatgggagtgcattcacatgtaataacttttatttttacaaagaatgagttttcccaagagcaaaatgcaaaaattctgctatagcttgttgacatttaatggaaatatattgctttatataatatatgaattgttcagaagtgataatagctttaatcatgctcccaataaaagatatgctagttaaagaaattctatagtttattccataaatttaaaaacatgtagaaaacgagtaccacccataaattaaatgatgtatttggtgcagggcaggtaagccccaaagttggggcttagctcgggacagttcttggctttgtctaagaaagaagtcaaaggcatgacaatggtaggaacctctgctgaagcggcagcgtacagcagcagcaaaagtactgtttcttgtggagcagggctattccataggcagtctgcctcgagtagcctatattgctctttatatttagtaattttttagcagaattctcaatctcacatttcttaaccttccttctcttttttcaggatatcgaaaagatttttagtaacatttcagatatacatgaattgactgtgaaacttttaggtttgattgaagacacagttgaaatgactgatgaaagcagtcctcatcccttagctggcagctgttttgaagatttggcagaagtaagtttacaaaactacttatattctcattaaagccctaaatgctgtagtaagaaacttagagatgagtcttggcaacatagtgagaccccgtttccataaaaaagtaaaataattatccaggcatggtagtgcccatctgtggtcccagtgactcaggaggctgaggtaggaagcctgggagatcaagcccatgattgtgtcactgcactccatcctgggcgacagagtgagaccctgtctccaaaaaacaaaatttttttgtaagatattctttatgaaaattagaagataccactggccattataaaaagatatttaagatttaactgataacaaactaaaatcacattgcctatatagtgacactttctttatagtgtgtttatggcaatatttatagtgaaagtttatatactagagtagtatataaactagagtagtaacatttaggtttttttttttttttagtggtaagtatattcaagatgaaggaagatacattttattgaccatagctctttaccttctatggattttaaacttaaagttggaaagaagctttatattattttaatgttttccaaagtaaaaatcattttatcttttaaatgactataaaaataatgtagctcattgtaaaaatattcagaaaaatagatatataaattagatgaaagtcactttattttataacacccagagataacttatccttatatatttctgtgcatacatacgaatgtatgtgtgtttgcaaaaataggatcccactattttataacttactgtttttactctgtatatcataaacattgtccatgttaatgtatatacttcaacacaatttttaagtataaataatgtgatgttatatggagacaccataacatattttaactatctattatccataggttgtagagttttttcctttttttttttgttattgtaaacaacactgcaacaaacatatttgcactatgccttgatattctaatcattttttttttttgacatggagtctccctctgtcacccattctagagtgcaatggcacgatctcgtcttactgcaacctctgcctctcaggttcaagccattctcctgcctcagcctcctgagtagctgggattacaggcgcctgccaccacgcccagctaattttttgtatttttagtagagacggtgttcctctctgttggctaggctggcctcgaactcctgacctcatgatccgtccgcctcggcctcccaaagtgctgggattataggcatgagccaccgcgcccagtcatatattctaatcatttttaaggatatattcctggaagtggaattgtagtgctaaagactagatacatttttagaacttggaaacactttgccacgttcacttccagctaagttccagtgtatgtaagcttccttctttcttcaccctttcccttcactaactcggtattaccttattctttttctttttaattctttttttcaaaatttgttttgttttcatatcggttctgcagatatcccattaatttttgccagtctaatgggaaaagaaatctttcttcttctcttctcttttttcttttcatttctttcttttcttttgagacagggtttcactctgttgctcgagctggaatatagtggcacaatcatagctcactgtaacctcgaactcctgggatcaagtgataataatctgtaccatattggtagaaaatatattcttttaaacctaatgctttttctctttttaaaaaaataggagcaagcatttgatccttatgaaacattatcacaggacattctttcaccagagtttcatgaacatttcaataaattgatggccagacctgcagttgctctacactttcaggtaaacttaaattgaaggttttttttttttttttttttataaagcaaataaatatctcactattttatccttcaaatatttgtaattctggaatcctcgtaatccttcaaatcttgttcattctaaacctgttttggattatcttctgttttctctctggagttctgtctgttcttattgtagaaatcttttatagtacaacatcatgagtactgaatgaccagaagaatttggcacatactagatctggggtataaagatgaatttggctgggtgcagtgactcatgcctagaatcccagcattttgggaggccaagacaggtggatcacttgaggtcaggagtttgagaccagcctggccaacatggtgaaaccctgtctcgactaaaattgcacaagttagctgggcgtggtggtgagctcctgtaatcccagctactcaggaggctaaggcaggagaatcacttgacccggaaggcggaggttgcagtgagccgagatcgcgccactgcactccagcttgggtggaatagtgagactctgtctcaaaaaaaaaatagaaaaataaataaaaaataaagatgaatctggagtgtgatttcaggattatgttccctataggaggaagatttggagaaatcttaaaaagttgagataacctcaacctcctatgtactcatactgatttttctatgaggcctacaatttaaaggagataaatactgtattgagggagagtatgcaagttagttggttcaggaatacacttagataaaatgaaaataagtggagagatacaaataaaattttatttttactatctcaacactaacaacaaaagttatgttggcataggtaatacttggctaaatatgtaaaacttctacatctaaactgacttttccagccagacgtggtggctcttgcctataatcccagcactttgggaggctaaggtcagaggattgcttggacccaggtgtttgagaccagcctgggcaaaatagggagacctcatctctacaaaatataaaaacttagccgagtgtggtggcgtgcacctgtggcatgccaggagaattgcttgagcctgggaggtcaaggctgcaatgagtcatgatcacgccactgcactccagccttgggtacagagtgagacccagtctcaaaaaaaataaaaataaaaaataaactggcttttaccccttgacgtttgaatatggtaaaaatccttatagtcctgaaacaaacaagcaaacaaatgaacaaacctttcttcactctagtagaataattaactagagtgaagaaagttttttcatttcctctctcattttttctttgcagccaattgtctttatattattttttaccattctttatgaaaacactaccatgtatgttttaatcaggatataaattgcctttgacaagtaacttaattgccaaatccagtggatatttttatttcatacttaatgtctgtagtatttgttactgctcttatctcttggttcctgtatacctgaaggctgggcgtgatgtctcatgcctgtaatcccagcactttgggaggctgaggtgggtggatcggatcacctgaggtcaggagttccagaccagccttgccagcctggcgaaaccctgtctctactaaaaaatgcaaaaattagctgggtgtggtggcatgcacctgtaatcccagctactcgggaggctgaggcaggagaattgcttgaacccgggaggcggaggttgcagtgagccgagatcgtgccactacactccagcctaggtgacagagcaagaccctgtctccaaaaaatatatatatatatatgtgtgtgtatatgtgtgtatatatatatatatatatatatatatatatatatatatatgcacacacacacacacacacacactagcgggcatggtggtgcacacctgtagttctagctactacagaggcagaggcaggaggatcacttggaggcaggaggatcacttgaacccaggaggtgggggttgcagtgagccgagattgcaacactgcactcaagcctgggctacagagtgagactctgtctcaacaaaaaaaagaaaaagaagactgagactgggtgatttataaagaaaagagatttaattggctcagagttccacaggctctacaggaagcacggctggggaggcctcaggaaacttacgatcatggcggaagccaaaagggaagcaggcacgtcttcacatggtcaaagcaagaggaaggagcagggaggtgccacacacttttaaacaactagatctcctgagaactctattacaagaacagcattaaaggaagaaatccacccccatgatccagttacctcccactaggccccacctccaaaattggggattacagttgaacatgagatttggacggggacacaaaatcaaaccatatcagctcctgtgatactacatgttcccaattttcgtcttctctgatttcttcttctcagtctcttaattattatagctattatccaacttctgttatcagcccctgtttttctgttctgtgctctccttgggtgacttcatgtctatatactggtgacttcttatttgtatttccaggccatcactttcttttaagcactgtgtaccgtgtacatatgtgtatgtatctatacactttcatataaccagctgccttgaattgatgcacttggataccctaaacgcacttcaaatatgacatgtttaaaactgaacttaccatcttctccctgccttctgtactataaattcccattgtttattatcttccacttctctattgtcaaaaatttgttatcatggaatacaaattatacttaattctcaaaattacttcaagagaggaatatttttaaagttaactcatatattcatataaagtatgcattaaatacacagtctataagaactttggatactcattaaaagcactcaacacatttcttgtttcagtcctattttattaggaatttttgctgtggaatttgaatgttaaagggcccagttattaataaagctgtcatcctagatattcagtgaaattggaagagttagatgaaatcctttttcgggccaaactcaattgttttaacttaaaaaaaaattcattcagtttaagataaaataatgcttccttaataaaactaaaaacaaaaagcatctttagaagctgtgtagcgtactttatttatttatttatttagagacagggtctcactctgttgcccaggctggagtacagtggcacagtctcagttcattgcaacctccgcctcccgggttaaagcgattctcctgccttagcctcatgagtgactgagactacaagtgtggaccaccacgcctggctaattttggtatttttttggtagagacagagtttcaccatattggctaggctgttctgttgaccatgaggcaccatacctggactgtgtagcagacttaaaaaaataagatttgaagttagaacttaaggctttgggccaattaatagttttgtttgtttgtttgcggcagaatctcgctctttcacccaggctggagtgcagtggcgcgatcttggctcactgcaacctctgcctcttgggtttaaggagtcctcctgcctcagcctcctaagtagctgggactacaggcgcatgccaccacacctggctaatttttgtatttttagtagagatggggtttccccatgttggccaggctgttctcaaactcttgacttcaggtaatcctcctgactcagcctcccaaagtgctgggattacaggcgtgagccatcacgcccagccccagttaatggttgtgttaccttgagcaattcacttaatctctgagactcagtttgctcatttgtaaaatggtgatcatcataatatatacctcttatagttattaggaaattaaatggtaatgtatatataaagcataagcataatgtttgatgtgtattaaatactcaaatgtagctcctgttattatcagaggactccttacactgtaaatacatgctacaaaaattttagaatgcactttatcaggcattttagtacaaataagcaaaacagttgatcttgtagactaattttgaagtttcatattggttccagttcaagcactgtatataaaatatccagaataattcactatattaattagtttaatactgtcttagtctattcaggctgctctaataaaatatcataaactggatggcttataaacaatagaaatttatttctcacagttcacatttaggaagtcccatatcaagaggctaacagatttggtgtctagtttggtgccctagtgagggtttgctcttctggttcatagatggtgctttcttgttgtgtcctcacatgatggatagcacaaacaagctcccttaggccccttttataagggcactaaccccgttcacaggggctctgccctcatatccaatcacctcctaaaggccccatctcttaatactgttgcattggggattaggtttcaatatatgacttttgagggaacacaaacattcagatcataacaaatgtgaaaatgaattaatctttaggaaaattggtggcactttttgtgtatcctagtaagaagtttggttactgggtaataagtctgttgaaaagattataatttaacaaaatgtgaaaattatggtaatatttatgaagatttttttaaagcagcatatcagattctttctcacattttatattggtgtggttggtgtttttcttatggggagaaatactagtaagtgaactatatagacatttaaaattaacatgagttaaatccattataaattttagaaaaccatttattctacagtagtttccaaaactggggtatacctatcccaagctatacactaagatttttcaggatatataaaggcacagagagctttaagggaatctgtttctagtcttcggagatcttgtttatgttttttgcattgtcttttccaaagtctcttacttgttaccttttgctgttatgtatttcccattatgcattgatccaagatgtaaaaacctctagggcaccaaacaggaaaaaaaaaaaaaaaaaaaaaagtattactcctattggagagttcactgagtaccaagcaaaagagttcacaaaagaatgttatagggggatgatagtaaaaattcttggtagccaaaatgtcatctatctatgttatgtcatatctatctgtctaagaattaagaagtgatatggttatcacaaagatttatgttaaccttattgtaagtacttcatcatcatttgggataaagaagaggagaagcttgtaaagttctcataccttgatgtaatatgtcagaagcagttgtagtttcctccagaggcttctaatccttgagaccatgacattaataatgtttgtttgaatttaacaataaagtttgacttctgacaaactgagtctgatgttgctgtttattttgacagtgaagatcgactttgtcaattaagttgtatgacagacgtttttcataaatgagctaaatctgaaagttattcaattattgtttggtgaaatagttataaatcacatttacagtatacagcattccctgaaatgcatcttttgtaactatttaaatttaaaacattttaaaattgtgcaggagagtacatagcttttcagaattcctttagggtatatggaagccagaacataagctgtagaggattattgtgaaagctattttagccacataaaagaaaattaatgtatatatttctctaataacttaaaggaggaaagggagaaaagaacaacttgatagcacttcagtttcaatatagaatatgcattctgttgtagttttgataagtctgtatctcaaatttttagtagccgtttctgttaggcactgctgttgcatatccttgatgtcagagacatacatactgtgatatctttttgctttgcagtccattgctgatggttttaaagaggcagttcgttatgtccttccacgtcttatgctggtgccagtgtatcactgttggcactactttgagttactaaaggtaaggttttataacagaatctcaaagtacttatctaatagaagagtttactttttaaaattaattttggagacacacagtaccagtcttttaattcttattttatgtaagtaataatttttatatgtaacattgctctaaatttctatcttgttatcttataaaggaaataacttttgaagttaatatttttttctgtgcagtgttgtattcttcctctcttagctgggacccaagcaacacattaaaaatatataacttaaaaaaaatgactctcttctctattttaattaactagccaaccactagtcctggtcacattggctaagagggtttggaggctagtgattaattggtggcaaaagtagctgtggcttaggatgagtcaggccattatagtcaatgacctgatcttaaatgcagacctagtagcaaggatttttaaaaagcaatcatctaggtaggggaaaaatttttttaaattatatggtcaaaccagcatttttaaatgttggccagtattagagggcaactctaagactaatgataggacctctaataagacatgaaccttatttttaaaaattaaggcatccaaatatatgcttatatattattcatatgaagcctgcatatcttttgatgagttctttatggatccactagtatccatggagacttacacaatgaagttgctcatctatttgtggataaaagctgactactgccgggcgcggtggttcacgcctgtaatcccagcactttgggaggccgaggcgggtggatcatgaggtcaggagattgagaccatcctggctaacatggtgaaaccccgtctctactaaatgtacaaaaaattagccgggcatgatggcaggcgcctgtagtcccagctacttgggaggctgaggcaggagaatggtgtgaacccgggagacggagcttgcagtgagcagagattgtgccactgcactccagcctgggcgacagggcgagactccgtctcaaaaaaataaaaaaaaaagctggctacctccagtatcaaatgctgtgggtagtagcactccataaaaaagaacgtaaaaaagagataagtattcattagaaataatcatatatattccttgcctagatgcctacaaggtatacatagaattattatggcttttattttaatgttactaccatggattagacggaaaaagtcgtaactgtctatctaaaccaacgatgtggtatcctaaaggagaggtacgaaataatcaagcagaaagatactttgcttctaaagagcagttaaaaagttggaagctgggcatggtggccacaagcctatagtcccacctacttgggaggctgagataggaggatcacatgaggtcaggagttcaaggccagcctgagcaacatagcaagaccctgttaaagaaaaaaaaattgagaaagaacattttactgagcaagatatgtgggaattacagttgaaaatgggccataatctgaaagtagacagaagttcttagatgttagctagagtcagtgaaaatcagtagcagtaatagagagaaatgaatggattgtcaccagaaaatctccatctttcacgtgctcactttggtaatcactcctacctttaaaagatcaagggaaattgtgtaaggaattagaaatgggaaaagaaacactcactgatgagtactcatgcttgtccaaaggcagcagatactctttattactaggtagtagtaattttgggcttcaaagaatgaataaagagagccaggtgcggtggctcatgcctgtaatcccagcactttaggagtccaagggggagggaatgacttgaggctaggagtttgagaccagtctggccaacatggcaaaatcatgtttttagtctctactaaaaatacaaaaattagctaggggtggtggcacatacctgtaatcccagctactcaggaggctgaggcaggagacagcttggacaacagagcgagactccatctcaaaaaaaaaaaaaaaaaaaaaaaaaaaggagtgaataaagagaaactacccatgtctgatcaatgaaactgtaaccgttagaataaatatggaatatactcagttttaattaatgcacagcaacaacaagaacaaatagaaatgtggaatggaaagacaagccttagaagagattagaaatggcaaaagatttgaatcacttcacaaaacaggatatccaaaatggcagtaaatgtgtattcaaaccattaatagtcaaggaaatgcagttaaaaccacaggataccactacatacacatcagattacagaaatttgaaagtctgaaaatatccataaacagcagcatgaactatttgcattctgttaggaatgtaaactgtataacccactttggaaaactgcttggcattaccttttaaattaaaaaatatgtatactgtctgactaggcaattccacccttgaatatatactctaaagaaacaaaatgcaggcacatgtatgccaagagaaatgtacaagaaagtctgtagcaggtgtcagtaatagcaaatcctgtttgccaaccagaaaagggtaaataaattgtggttcattcagataatgaaagaaacttacactagaacaatacacaacatcaatgacgcttacaaataaactttgagagatgataatatttcattggtgtgttataccatattttatttatccattcatctgttgatagaccgttgaattttttttttttttttttttgagatggaattttgctctgtcgcctggctggagtgcggtggcatgatctcggctcactgccacctctgccccctgggttcaagcagttctcctgcctcagcctcctgagtagctgggactacaggtgcatgtcaccatgcccagctaatttttgtatttttagtatagacagggtttcaccatgttggccaggatggactcaatctcttgacctcatgatctgtccatcttggcctcccgagatgctgggattacaggggtgagccaccgcgcctggctgactgttggatttttttctaccttttggttactataaataatgcttctgtgaatgtgagtgtacaaatatgtctttgagaccttgctttgaattattttatgtatatacccaggagtggaatggatggatcgtatggtaatgttatctttaattttttgagtaactaccacactgtttttcatagtaatggcaccattgtacattcctaccaacagtgcacagggttctgatttctccacatctttaccaaaccgtgttaatttctttttctttttcttttttttttttgagatggagtttcactcttgttgccctggctggagtgcaatggcatgatcttggctcactgcaacctccgcctcccaggttcaagcgattctcctgcctcagcttcccgagtagctgggattacaggcgcctgtcaccacacccagctaattttttgtatttttagtagagacagggtttcactatgttggccaggctggtctcgaattcctgacctcaggcgatccacctgcctcatcctcccaaagtgctgggattataggcgtgagccaccctgcctggcctgtttttttttttttttttaataatagtcatcctaatggatacgaggtggtatctcattgtggttttgattttaattttcctaatgactagtaatgttgagtatcttttatatacttgttaactatttgtatatcatctattttattgtgttgtttttgggacagggtcttgctctgttacccaggctggaatgcagtgatacaatcatggcttactgcagccttgacctcctgggctcaggcgaccctcccacgtagctaggactacggatgtgtgctaccatgcccagctaatttttaaattttttgtagagatagagtctcaccatgttgcctaggctggtcttgaactcctaggctcaagcaatctgcctgcctcagttttccaaagtcctgggattacaggcatgagccaccatacctggctatattttttttctttggatataagaattatgttataaagttacttataaatcaagaagtgattttttttcttttccttcttgcatgaagattgaattatatgttaagataataatctaaaattatgtttaaaaagcagtttgtagaaatttatctaaaatttatcttagaaagtggggtaaggtgcctcatgcttataatctcagcgctttgggaggccaaggtgagaaggtcacttgagcccaggagttcaagaccagcctgggcaacaaagtgagaccttgtctctacaaaaaaaaaaaaaaaatcagattagctggacatagtggtgcatgcctgtggtcccggctactagggaggctgaggcaggaggattgcttgagtccaggaggtcaaggctgcagtgagccatgtttacgtcagtacactccagcctagatgacagagtgaaactctgtcttaaaagtaaattaataaataaacaaaatttatctgagaagaaaaatgaaaacagtagtttgtgatcaaccttatggggcttaaatttgaaaagaacaaaaaagtattatctataaagtgaatatattatagatatatattctatatatctgccatgagttaactatatatatgtaacaatatatattgccatgcaatataaattgttgcatggcaacaataatataacattattccaacaatgtatataacaatatatattgccatgagtaacaataaaccaacaatgtactttgtttgttttttgaggcacggtctcactctgtcacccaggctggagtgcagtggtgcaatcttggctcactgcagcctctgcctcccaggttcaagtgattctcctgcctcagcctcccaagtagctgagattacaggcgaccgccaccacacccagctgatttttctatttttttttagtagagatggggtttcaccatgttggccaggctggtctcaaactcctgacctcaagtgatccacctgccttcggcctcccaaagtgctgggattgcaggtgtgagccactgtgcctggcctgtttgtttgtttgttttttatttttatttttattttttttgagatggagtcccactctgtcgcccaggctggagtgcaatggtgcaggctcggcttactgcaacctccacctcccaggtttaaacgattctcttgcttcagcctcctgagtagctgagattacagatgcgtgctaccatgcctggctaattttttttaatatttttagtagagacggggtttcaccatgttggtcaggctagtctcaaactcctgacctcaaatgatccgcctgccttggcctcccaaactgctgggattacaggcgtgagccactgcaccaggcctaacaatgtactttgaaataattttaggtaactatatatggtatcctctaatttcttgtcatatagttgtttttccatcttgttttatcataaatctgattttggaaaataaaaaataatatttaaacactaaatccaagaataaatctctcttggtagatcaccaaagcagatactttaaaacagtgggttaaaactgttccaggattgtgttttctactactaaagggatgtaataacctttgagtcacactagtccagccttctttcttatgattctcatcccaaagtaggcttaacatgagacagaatttattttggatgagtactgagccaaaacagtatcacgaaacggcattctatagaatgggaaaatatttgtaaattatatatctgataaaagattcttatccagaatacataaagaactcctacaactcaacaacaaaaaacaagctgactgaaaaaatgagcaaaggatttagacatttctctaagaaggtatataggcgaggcacagtggctcatgtctgtaatcccagcactttgggaggctgaggtgaaaggatggcgtgaacccaggagtttgagaccagcctgggcaatatagtgagacctcatctctacaaaaatttttaaaattagctgagcatggtaatgcatgccagtagtcacagctacttgtgagactgagatgagaggatcacttgagcccaggaattagaggctgtaataaactgagatcacaccacggcactccagcctgggcaagagagcaagaccttatctcagaaaataatctatgtctgtccttttttactaaggacatgttaactctctcattttagaactggtttattcaaaggcaagtaatgttctcttactctcctaactccctggtcattccttggaaatttagtaatggaaagaataaaaattattctctctcaagaggaattaatttagtttaaagcttaacaggaaaacttagtaataacttcaatgaggttcattgaggaagatcaaccagtatttcaatatgaaacaattgagtttataggtaatatttttttaccttttactttgaaaaacagaaaaaagttacagaaatagtggtgagcacccttcacctggactcactttttttttcttttttttttttgagacagagtctcactgtatcgcccaggctggagtgcagtggtgagatctcggctcactacaacccccacctcctgggttcaagcaattctcccacatcagcctcccaagtagctgggattacaggtgcacaccaccacgccattctaatttttgtattgtttgatagagactgggtttcatcatgttggccaggctggtctcaaactcctgatttcaggtgatcctcctgcctcagcctcccaaagtgctgggattacaggtgtgagtcattgcgcctggctaccagttgttaacattatgcaacatttgcttgttatcattcctgttttttttagacagagtctcactcttgtcgcccaggctggagtgcagtggcccattcatggcttactgcagccttgacttcccaggctcaatcaatcctcccatctcagcttcccgagtagctagaactacaagagcatgccaccatacccagctaatttttgtttttttattttttgtagagaaggggttttgtcatgttgcccaggcttgctttgtcattctttttgtgtgtgtgtgagtatattcataacataaagagcttgcaatctctattgaaagaaatctctcaactcttaaaaaagaccataaagaggattttactacatatttactttttcagtactgacatatgattcaggtacatatgaaagaaagttaataacagttaactttcttatgtgtttttttttaaagttagtgttttttttaaaaaagcacgtaaagaaatatgatcacgggttttttgtttgttttggggtttttaggttatttctttttagagagggagtctcgctatgttgcccaagctgatctcaaacttctggcctcaagtgatcctcctgccttgaccttccaaagtggagagattacaggcatgagcccgtgtgcccagcctagtcataggttttaatggatttaatttcccaccaaattaccaactccactcttatgaaaatctagagagtttattactaataaaaaagaattgattacatgttttatttcacacctagactgaactcctagtacagtgaattagagacaaattcataatttattgaaattccccttgctgtgggcacatatgtccatagtagatgtagcatttggtaggagtttcaagaaaagcagggtaaatatttcagtgaagtctcatacagagttaagaaaaaacttacatgaaatataaaatcttagacaggatacacttatagacaactaaggataatgatgagtatcaggtagcaaggaatatattcttcagctaggttcataagatattacccattaaagctaggcgcggtgggtcatgcttgtaatcctagcactttaggaggccaaggaaggtggattgctggagctcaggaatttgagaccagcctgggcaacatggccaaaccccatctctacaaaaaattcaaaagttagctggatgtggtggcaatgcctgtagtccaagctactcaggggttggggggttaaggcaggaggatcgcttgaacccgggacatcgaggatgcagtgagccgagatcgtgccactgcattccagcctagttgacaaagtgagactttatctcaaagaaaaagaaaagatattacccattaataaacaatcacttttatttttaattttaagcatatgtagcaagggtatcttttctctttgacctcttttccagagtacactcatttcattttatttcttaaactcagtagttatccagtttgttttcaacatagaaagaatccctttcaactcagtggtcatcagatttagacacagaccagtgttttgcgtagctgtgtctggtgtcatggtagagccacggggtattagtgtagcaaaaaagcagagactttggggtcagagctcctgggtttggatataaactctcctatttatattgggcaaattacttaatttctctgtgcctcatttccttcatctgtaacatatgattatagtacctcgtgttacagagttgtaataaaaattaaataagctaatgcataaaagagcgtgcacagagcagagctcaaaaaacattcattattggtctaaatacttaacaaaatcatacagtagtcatttattccagttacttctgacaaccacctagtggatacctaccacatgcaggtaaactgaaaaggaataaaacatgtccctaggcattaagatgtttacaatttagtgaagaaaatagatgtcaaacaaataattacaatattataagagcctaatagaggtagtactatgagatcaatgaagcaggagttactagctctgcttagggaaggcagaaaaaaattcctattgatttttcctttgttcagtggagtaaaaaaaaatacataatggttttgggtattcgtcctactgagagagagaacagtgtgtgcgcgggtgtgtgtgtccttatttatttgcgggagtcatgaaagacaaatgcttaggaactctccagaataaaagagacaatagaaacatgacaatttagtgcttcactgaccagttcctgttttgggggaaaatattaccttaaaggatgttattaaaacagttggcaaaattggaatatacactatagattagattatgcagtagattactcggtgttaaatttcctgaagttgatcactatactgtgattctgtaaaagaaaatccttgttgtaagatgagctatgagaaatattaaaggagtaaaggagaatgatactatttgagagtaatttgtgatacatttgacttttccttatattccaaaaactactgcaaaaccattcagccgtagtcccccttcctctggaaggaactgagtggatagtatcacaactactaaaaaaacgatctgcacacactggcacacagaatgatgaagcatgtgacaaaatgttaaaaattggtgattcagagtattacaggagttatttgtgttacttttacaacttttctataaatttgatatttcaaaagaaaaaatttaagagggaaaaggcataatcagaaggcatcttcaagaggaagcatttcaactgtatcctagtggctaaattcaccgggtggataaggaggtcagagactgttgtgtagaaagcgaatgggggcatgaaagtacattacttgtttgcacatagttcagtacagtaatttttcttttctttttctttcttttttttttttggagacagaatctcgccttatcacccaggctggagtgcagtggtgctatcttggcttactgcaatctccacctcctaggttcaagtgattctcatgcctcagcctcctgagtagctgggattacaggcatgcaccaccacgtccagctaatttttttttgtattttttatttttattttcatttttttgcgggggacagagtctcactctgtcacccagactggagtgtaatggcacaatctcagctcactgtattctctacctcccatgcttaggtcatcctctcacctcagcctcccaaatagctgggactacatgtgcacatcaccacgcccggctaatttttgtattttttgtagagacagggtttctccgtgtggtcaggctggtcttgaactcctgggctcaagtgatctgcccgccttggcctcccagtatgttgggattacaagtgtgagccaccttgcctggcccagtaatttctgtgtaagatgtttggaacacattcttttaagtatctgtagaatattagttggatattcattaatatgatgtttatcaaatctcactgctgaaaattcaagaaatatttagcaaattatcagattattatgccaaacagagccgttgtttaatatacttccattaccaggaaatcccactctaaatatcctcaattttgttctcctttacagcttataattattacatggttatttaaaaatgacacgtggaagagtttgagcagccttaagaccaagtagacaatgaaaatcatacctttttggtaggatatcactactggtgataatttagatatttggataaacaaaaacaagaataaaacagttctaattaagtgtttgatgtcatcaacattcatatttattaaagaaatattttagagtggagctgagaagactttctgtaagaaatctttaaagcagcaaaataagtgattttgccagtaactttcacctgtagaagtcagaataaccaagcacagatcttttttcaaactttctatgatattttgactttgcttccatcctttctattgcttagtctagagattaaggtattacttctaataatagtcatttacattatttatgttgctaatctcttgatgacaagacctctacatgtgtcttgaaataaaatcaaatggctctgtgcttcatatagagactaatttctaagacataaataaaaggtaatggacaaagttgtcaaacaatagccagttagttctttgctgaggaaagggaaccattgctgaatgcttttgagattgctcttggaatataaggaaaattttaatttatcacaaaatctctaataagttaaagatcacaaaatagatttaagtttttaaaaattttctgaagtgatcataattccccatatccttgcataaatatatatttataaatacataatatatataatatctatatgatgttccactttgaactcttctttcaaaagattaaaacagtttgagggcagcctgggcagcatagtgagaccccatctctacagaaaaattaaaaaaaaaaattagccaagcatggtggcacacatctgtagttctagctacttgggaggctgagatggaaggatcacttgagtccaggaggttgaggcaaggctgcagtgagccatgatcacctcaccgtattccagtttgggtgacagagtgagaccctgtctcaaaaaaaaaaaaaaaaacaaaacattggagcacaatacaatacaatctgaattatttattataagtaaatttgctttctttctgagagtgaaatacaagagaacattttggggcaaatgaaatagaaccagagttttagagattaataagtcagtttctaaatcttctaaagattgagatagaattaattttcatggtttcttgacatttcatattgtaaaaaatagcagtggaatcctttgagagatgctgtttacggaaaagtttatgatagattgaagtgttaaaagttagtacccttgattatgttatataacaaagatttgtaaacttgaaattgctaaaacaaagtaatcattagagaatatgaaatagtttatagttacttattttctctattcatagttgctaatgaataaaagtaagttgtaagcttcatgctttaggtgttttaaactttttaaatatgtttggaaaatgtggcctggcacagtggctcacacttgtaatttcaacactttgggaggcagagatgggaggatagcttgagtccaggagtttgggaccagcctagtgagaccctatctctacaaaaaataaaaataaaaaaattagctggatgtggtggcatgcaactgtggtcccagctactcgggaagccttatgcccaggagatcgaggctgcagttagccctgccactgtattccacccttggtgacggagtgagtaagaccctgtctcaaaaaaataaaaaataaaaataaaatgtccgaatggtttttacagttgcttttttttttcctgattactatgctcatgttagtttatatctgtattgtgtttatgtttatagaaagaaggttgggccaggactggtggctcatacctgtaatcccagcactttgggaggcagaggcagaaggatagcttgagcaggtgttcaagaccagcctgggagacatagcgagaccctgtctctacagaaattttaaaaattagctgggtgtggtggcattcgcctgtggtctcagctacttgagaggctgagagtggaggatcattagaacccaggagctcaaggccacagtgagtgagatcctgtttcaaaaaaaaaaaaaaaaaagaaagaaaaagggttggtttgagaggtcagtaggtatatataaaattatagctgtttttattaagtatatataaaattaacttagagttgataatatttgttgctgctttttctattactagaaagttgggggaagaatcaaacaatgcagttttgatttttctttctgttttttcttagcaattgaaagcatgtagtgaagaacaagaagacagagaatgtttgaaccaagctattactgctctcatgaatctccaaggtagcatggaccgaatttacaagcagtattcacctagacgtcgacctgggtaattccaaagtgttgaaaacgtgaatgcctctgcttacttcgctgtctctgatgcctggttttcaaagaagtgtgatttattgtgatagttacattattgaaagttgtgcttgtcatacttttatatacttttatgttggtcttttactctcttttttccttttcctttcctttttttttttttgagaaggagtctctcttgcccaggctggagtgcagtggtgtaatctcagctcactgcaacctgcaaccttagcctcctgcgttccaatgattctcctgccttcgcctcccaagtaactggaactacaggagcccaccaccatgcccagctaatttttgtatttttagtagagacggggttttaccgcgtcggccagactggtctcaaactcctgacctcagcctcccaaagtgctcggattacaggtgtgagccgctgcgcccagcctttttttcttttttttaagagacagggtctcactctgttgcccaggctggagtgcagtgatgtgatctcagctcacagcagcctcaacctcctgggctcaagcagtcctcctgcctcaaccctctggagtagctgggactcgagtagctgggtggcacatgccaacacacctgcctaatttttgtattttttgttgaaatagggttttgctatgttgcccaggctggtcttgaactcctgggctcaggtgatctgcctgctttggcctcccagagtgttgagattgcaggtctgagccactgcacctggccaacccagcctagtcttaagattagcattgttggctgggcacggtggctcacgcctataatcccagcacttcgggagtccaaggtgggcagatcgcctgaggtcaggagtttgagaccagcctggccaacatggtgaaaccccatctctactaaaaatacaaaaattagccaggcgtggtggcaggcacctgtaatcccagctactcgggaggctgaggcaggagaatcacttaaacctgggagggggaggttgcagtgagccaagatcgtgccattgcattccagcctgggggacaagagctccaaaaaaaaaaaaaaaaaaaaaaaaaaaaaaaaaagattagcattgttatattattaggatagacttaataaatgtttaaaaatataatctatgaaagaaatttaggattttttgtaattttagttcttatagagccagtagtacttctctttcataataatgaaattgagggctgtattatttagtggcaaagttagaactaaatgctgtgcgtaaaagctactgtttggttatttaatattttactcacttgatttgagatggtttatgcttgaaaccatttgggttgctagctattgaataagctatattgtttgttttttctagagatcctgtttgccctttttatagtcaccaattaagaagcaaacacctggctatcaaaaaaatgaatgaaattcagaaaaatatcgatggatgggaaggcaaagatattggacagtgttgtaatgaattcattatggagggaccattgacaagaatcggtgccaaacatgaacggcatatttttctgtttgatggcttaatgatcagttgtaaacctaatcatggccagactcggcttccaggttacagtagtgcagaatacaggttaaaagaaaaatttgtcatgaggaaaatacaaatttgtgataaagaagatacttgtgagcacaagcatgcatttgaattagtatccaaagatgagaacagcataatatttgctgctaagtctgctgaagaaaaaaacaactggatggcagcccttatttctcttcattatcgtagtactctagatcgaatgttagattcagtattattgaaagaagaaaatgagcaaccactgagattaccaagtcctgaagtatatcgttttgtagtaaaagactctgaggaaaacattgtttttgaagacaacttgcaaagtagaagtggcatccccattattaaaggaggaactgtagtgaaattaattgaaaggttaacatatcatatgtatgcaggtatgtgaaactcattacaactgctgacctagggcctgggacccaaaagctttttaaggatgctcaaaaatatttgaggcttggggaaaaaatggattgcctccaaaatataaaaatactgcaaaaacaaaaggaataaataagagaaggaattaaaggtctaaaaatgtaatattgttaacttcattaattattgaataaatattcataaaatatgcatattcatgaattttttttttttgagacagagtcttgctctgttgcccaggctggagtgcagtggcgctatctctgctcactgcaagctccacctcctgggttcacgccattctcctgcctcagcctcccgagtagctgggactataggcgcccgcaacaatgcccggctaattttttttttctttatttttagtagagatggggtttcaccgtgttagccaggatggtttcgatctcctgacctcgtgatccgcccacctcggcctcccaaagtgctgagattataggcgtgagccacctcacccagccatattcatgaatttcaaatttgaaaacaatcctcgcttattaaggatataccatagtatattctctatgtcagtatttctctatgtatggcagggataccatggtatcctgccagtaccatgattgttaggaaaagccacaatctgaggagccaaagtaaaaagaaaaagggaggaaggcctccaaatatggtactttgagttaattaaactgaatacattaaacatgaaacctattttatgctctgccttttcagatcccaattttgttcgtacttttcttaccacatatcgttcattttgtaaaccacaggaattgctgagcttactgattgaacggtaagaaaaatatgtatttcagttatattgacattttgtgaaaaattaactgtattttgtaaagtgcctagtacctaataaatactcaagttaattattgaacatattttatttggcattaaattggcagtattactattctcttcaaatggagtactccctaaaatctgtttataaacacagatcttttcagctcttagaaatatttcaagtggtaatcagaaagactaatttagaggatgaaagcactatattttaatgaatattgttctgtgtaataaaatgatattttcttaaaagagacttttctacttaccactatttttttttttggaccgtagactactttgccaaatactttccacttttaaaacaaacttgttatgaaaactttcaaaacacatacaagagcagatacaagaatataataaacccatttattcatcaaccaccttcagtaattatcaactcattgtttcatctgtttccctacaaatttaaacaccccaccccatgattattttgaagtagatcctagacaacataattcatctataaatatttttctatgtatctctagaaaatacgggatcatttttaataatcagatatcattactaaacctaaaaaatcagcaattcctttattatgattaacttttaaaaattagtgttgggttgaatttgttttacctagtattatagtggcattttaaatgttttatagtttaaaatgtagaatctggactccagaatgatttttagttttacgttttaaaacttactaaaacttattattataccaaagcttattaactgtattatcaagatataattctagatctctatcactatgttgttttatcaaactaaatttaccagactgagtcagtgtaatgtgctatgaggatctacttagttgtttccatgtccagaataaggaaagcacacgttagacttatagtttagctgtatttcctatgtttgagcaaggttttttatctttatcttatccacttaggtaaattatttaaatattgttaaatattcggttttggccctctctttgaatttgtactcatttaaataaatttattagcctactttcattttaataatataaatattaaagacattgttagataagcaatttctgtcatgttctttaaattccttatgaattctttccttggctcttttccctggaccttttctgtattatcagtgctaaaagacaaaactttagtttttataaaagtaagaatacaaaacgtcagttttgtatagccaaaggacagttttttgtagtatatcatacctcaagggaagtttaacagtaatccacttttcgtggaagtggtaggaaagaaggttgcttgctgttttcctccttgtattttcattatgtatgaacggatttttctccttttgcttttcttcttaggtttgaaattccagagccagaacctactgacgcagacaaattggcaatagagaaaggcgagcagccaatcagtgcagaccttaaaagatttcgcaaggaatatgtccaaccagtacaacttaggtttggcttgaatattttttatatatatatatacacatatatatatacacacacacacatattttatgtgtcagttttcaatatatagttaacacaaaagctctcagcttttaattcaaatatagggaatatttttaacttcacagcagttaagttaaactaaaagagttctttctcagtgaagctattcttaaataccctgaagaaattcaaatatttaaatatcctatgtttgcatcacatatctctggcatgtgatatgttatgcttacgtatcaggatacctattttttattgtaagtaaaaattataaaatttcatgtgagctttcctgctgtcaaccttttttcacacttttttccttcatttccctttgcgatcatacagtaatcctggctttttttacaatttataatatttgtggaagttctagcccttttcccacttatctctcacaaaatatatagacatttgttagtttaattgcaataatttctaaaaatgtgtttgattgtagaagcttccagttaataaatactactgtgtgccggggattaccctaaatgctttatcttttttatctcattcttacaacatgattactattcctactttatatataaggaaattgaaacctagcaaggtgaagtaatttgagctaagttatgtaaagggagtggcaggacaagattcagactcatgtctgactttctttgcgtgtgtgtgtgtgtgtgtgtgtgtgtgtacgtaccactaagcattgaaaattggaagcgccttctcttagccctctttactgtccaagtaaccaaagtattatcttcctccttccattggaaaccaagttatcttattaattatatgtaatttaaattttttttctctctaaatttcaagtttccttgattactgttgaccaataaattgtaattttggaactgagtatattagttatttatttcccaggataattgccacaaacaaatgcagttttagaagaatgatagtgctcccagctatatgtctttcactaaaacttttaacgtcattctttgtataagaagatgagattatttatgtatcagcaataaataagtaattcttttctactagctgtgatgcatttgtacttatctacaatcacattaaatcccttgatatgacacatacatttatgaggttgctattgggtggggtagggggtgggagtataatcttcgtttctcagtcatataagctctttatgtatttctaagcatttgctgtgttctcagtcctgtacttataactatgctaagtacaaaaataacatagactgtcatgatattgtggctttcttggggactttactgggggaaaaagacacatgaaacagttatatattgttctacttggagtgcttaagtgacttagaaaaatacatccctatacaatttcaggaatagcaaagattaggccagagtaattagggaaggcatcttggagaaggtaaaatctgagactgcccctaaaggatgtataggctttagataggtagaaaggtgactgtaggtattcagggtcatgagaaatagtatgaacaaagacaagaaggcagaaatgagaatggtgtgctgaggacacagataaggacattgacctgagaggaatgtaggcattgtattgcaagtagtagatgagattacctgtatggaattggatggagtggaaaactgtgaaatccaagccaagttattaaacctgttatataaatattgaaagatttctagtaaaatgggtggtagtaatttttctaacattttattatgaaaaattttaacatacagcaaaactgagaattttacaatgaacacccataaacccaccacctagatatgtattcatctattcatatctattcatttatgtgttcatttatcattcatctatcagttcatttttttgtatgaattttgaagtacactccttaaatacttcaacttgtatgtcattaacagttcagtgtttgtttttcttttgttctaaaatgtgcatataattaaatacatttttttcttgctgccactgaagacagaagatacacacatcttaagtgtacttttgttgagttttaacaaatacatgtatctccataatccaaacgcctttcaagatatcaaatgttactacaccccagaaagttcccttatgttccttctcatcagtttttgttcccactgcccaaaggcagtgttccaatttctccctccatagattagttttacctgttttagagtcttaataaatgcattcttaaaaactcaattttgtgtcttctttcactcaacatgcttttgaatttgtatcaatggcttattttattgcgaggttgtgttttattatatgaatataccagtttattcatttttcccattgaaagatacatgggctttttctcgttttttattattatgaataaagccgctatgaactttatcttacctgtcttactgtgaatatttttcacttttcttgggtaaacaactcagagtggagtggctgggtcagaaggtatgtgtatgtttagttttgaaagaaactgccaaaacttccaaaacattctcaccaacaatgttcaagttgcttcatattctcaccagtgtttagtaatgtcagtctttgtgccttagccatactgctggatgtagtggtatttcattcatacttattttgtggagaatctgttcaaatcctctaatttttgttgagatacttgtctctttattactgagttgtaggagtaaattgggtaggactgaatgccagtcctttgtcagataaacattttgcaaatattttctttccatggcttgcctactagtttccttccttccctttccttttcccttcttcctcttccatttccctcctcttccctctccccttgtctttcctttcctttccatttgcatagttgattaaatctctctttgcaaggttataggtaatcatttttgtgatactgtaaaacaaaacagttctatttttgtcttttgaaatgaaataagagactgtagtatatgtgtagattacatagaaatttgatgataggctgggtgcagtggctcacgcctataatcccagcactttgggaggctgaggtgggcggatcacctgagatcaggagttcgagaccagcctggccaacatggtaaaacgtcgtctctactaaaagtacaaaaattagcccagcatggtggcgggcgtctataatcccagctacttgggaggctgaagtaggagagtcacttgaacctgggagttggaggttgtagtgagctgagatcgcaccattgcactccagcctgggcaacaagagcaaaattccatctcaaaaaaaagaaagaaatttgatgatagcacttgcatttagaaccagatacagtacatcttagttggttttccattttaagtgaaaaagtaccaaaatttaaatcttaaaaatgctttttatgaacttaaaatagcttttgtaatatagagcataagttttctacatatgaataaagggtacttttccttaacataaatgggaagcacagaaaccactatttttatgcttataaatattttaaaagtatacattttattaataaataatacaccgtttggagacctactctcctcttgtcattgaagcatttaaagtattaattaaatacagattagagagtctttgagtattatgttgacccttgtatgtaaagctattatcgtggcattagagaaggaagaagtgtaattgaacacttacgtttcactaaaatgtgtttctttccattttatcaggatcttaaatgtatttcggcattgggttgaacatcatttttatgactttgaaagagacttggaattgcttgaaagactagaatccttcatttcaagtgtaagaggtatattatataaaggtttgattgaatcttatattgaacatgagtttatgttcaaatttgtgtgactttaagaaactaaaacatttctctctctttttttttttgaaacagagctttgctttgttgtccaggctggagtgcagtggtgccatctcagctcactgcaacctccgcctcccaggttcaagtgattcttctgcctcagcctcccaagtagctgggactacaggcacatgacatcacgcctggctaatttttgtatttttagtagagatggtatttcaccacattcaccacaagaccagcctggtgtcttgaactcctgacctcagatgatccacctgcctcagcttcccaaagtgctgggattacaggcatgagccaccatgcctggccagcatttttcatttttaaaaagctgaaataacatttggaatgttttttatagacagcaagaaactcacatatgtttagaccaatcatctgaggtctcagaactttgccttttcaagtttttgaggagaatatttcttttaaagaagtcgaaagttctttttaataaatttaagctatttaattttatctcattgcaaggttgccatttcttcaactgaataaaaatatgtgtaattttatgttttctttctttaatcttattcttttaatgattaacagctttcttataatatttacatcttctggaaatgtttttggtatatttctgaaatctgaaagagaggagttttctactttaagtttcagaatcatagcccaagaaatgaaaccctaggccatgaacatttaaacaaatgtgtcatcaaatgtatattattgaatcaagaacatttatgttttatctgacattatagggcattacaaatactataacaagtgtaacttatttcgtgttctacttgttctttaaggggaatattatttaaagttaagaatgttattcctttgtttctactttgagatgtttatgatacatttttatgtgtgccttgaaattgtcataatactacattttcaagttgtattctaggccactgcaatggctcacacctagaatatcccagcactttgggaggcagaggcgggctgattgcttgagcccagaagtttgagaccagtctgggcaaaatggcaaaacccagtctctacaaaaaatatgaaaattagccaagcatggtggcatgtgcctgtagtcccagctactcgggaggctgaggtgaagcgatcacttttaagcccagagctcgaggctgcagtgacccgaaattgcaacactgcacacaagcctgggcagagtgagaccctgtctcaaaataaacaaaaaacaaaaatttatattctaaatgagaatactggattagacacaatctaagaagcttctaaaatacacacacacattagaataaattaagtaaatggttatgttaatgtccaaagttcttttctatactagttatacttcagaataaccaaatagttcatgaggaaaagtttatttttgtggaagtatttcaactagtaagtgaagaaggaatggtagaatatcacatttctcaggtcctagtaaaataataaacctagggaattatcatgactggatgggtactatcacaaaaagttaactagacattatatgcctcctgttagaagtattcttggcaagtatttgtgtcataaaattaatcctgaatcagaccaagtcactatatctctgctttacagaaaatatagaggacagaaaaacatggcaaatgacaatttcttccacaaagtgcaagcaaaaatatgcaataaagcagtaacctgtagattaaaggagacttgagacacattgactcagtgcaatatgtgcaatcttgttcagatcccttttcaaactaaatataagaaaatatggccaggcacagtggctcatgcctgtaatcccaacactttgggaggccaaggcaggcagatcacttgagcccaggagttcaagaccagcttgggcaacatggataaaccctatttctactaaaaatacaaaaattaggccaggcgcggtggctcacgtctgtaatcccagcactttgagaggccaaggcaggcagatcacgaggtcaggagttcgagaccagcctggccaacatggtgaaaccctgtctgtactaaaaatacaacaaaattagccaagcatggtagtgtgcacctataatcctagctactcaggaggctgaggcaggagaatcgcttgaacccgggaggtggaggttgcagtgagccgagatcacgccattattctccagcctgggtgacaaagtgggactccatttcaaaaaaaatacaaaaattagccaggcgtggtgatatgtgcagtcccagctacttgggaggctgaggtgggaggatcacttgagcccgcaacatggaagttgcaataagttgagattgcgccactgcactccaacctgggccacagagcaagaccctgtctcaaaaaaaaaaaaaaaggaaaataatcagagagagaaatgtgaacagtgacaaaatacttcaagataacaatgtattaagaagttgtcagttttatgtgtgataatggtgttgtggttattactttaaagagtgttttaaaggtgcttaaatatgaatgaaatacgatgtctcggatttgtttcagaataacctaggaagtgacgggatggcatgagtagggttagagaaaataaaaattggccatgagttggtaactgttgaggctgggtgaaagttaaggattaaatgaagatttgcagtcatgtctgtcaagtaaaagacatttttctttatgtgttctttttccagggaaagctatgaaaaaatgggtagagtcaattgctaagatcatcaggaggaagaagcaagctcaggcaaatggagtaagccataatattacctttgaaagtccacctccaccaattgaatggcatatcagcaaaccaggacagtttgaaacatttgatctcatgacacttcatccaatagaaattgcacgtcagctgacacttttggagtctgatctttacaggtagacaattaatgttaatgtcttgctttatttttaagaatcttgaacattacctattttcaaaacattttgcacattattcatgagtgcttaaaaatacctcatctactctcatgggcttagaggaaaggtcatagcacagtttttaactagtctgccctgcaagtaaaagtcttatgtctagactggggactagcaatccattacaagaggaatggcaggaagattttcaagtccaccacccctcttcaactcctaataccttctcaccttggtttagtttgaggtcagtcagtcaagtcagttagtatggatgctaggcccttagcagctaagtgaatagaatattgtgtgagatgggttttcttttctcatttacagctcaggctgttgcgaagggtacaggccttgcatgtaacagctctctgtcgaaaaatgtcactatcattatcattccatcaaaaactttttctacaccaacctctctgttttcccctcctcccagtccttcccagccactaatacctgcagttctactctctacttccatgagttcattttttttttagttttcatatatgagtgggaacatgttatatttttctttctgtgtctgatttattttgcttaacataaggtcctccgggctcatccatgttgccttgaacgacaggctttcattctttttttatggccgaatagtgttccactgtgtatatataccacattttctttattcattaatctgttgattccatatcatagctattgtgagtagtatagaagcctcaatttaaaatataaatgtgcttggctgggtatgatggctcatgcctgtaatcccagcacttaggaggccaaggtgggcagatcgcttgagaccaggagttcaagaccagcctgagcaacatggcaaactccgtcatacaaaaactacaaaaaatagccaggcatggtggctcgtgcctgtagtgcccctgtagtcccagttgcccaggaggctgaggtgggaaggtcacttaaggtcgaggctgcagtgagccaagattgtgccaccgcactccagcttgagtgacagagtgagaccctatctctaaaataaaaatattttcatggagttatcctgattagcagccaatttttaaataaagattacacagggaaaagcaagaatatataaaatttagtgctaataggtaatatagtaaggtacctttactacattatgtttactttatgttctttagaatttgcctagtttgcactggccatgccattcagaaccagacttttagcacacccaccagaagttgtcaacatctgactcaaaatgttatgttatattttaagtaatttagaatccaggtagctttgtttatgttgtgggatttgtgatacgtagaaatgaagggacttgttacttgaggtaaaaaaagcaaatagtactgcatcatgttttttctcacaatgtaattgttttacatgaatggacatcagaaaaaaagcacttcacttcatgtggacctactttcaggacatagaaaaatacctaatactgacttcatttgtaaactaaattttttttttttttttttgagatggtgtcttgctctgtcacccaggctggagtgcagttgtgcaatctcggctcactgcaacctgtgcctcccaagttcaagtgattctcatgcctcaacctcccgagtagctgggattacaggtgtgtgccaccatgcccggcttttttatatttttagtagagatggggtttcaccatgttggccacagtggtcacgaactccttacctccagtgatccacccacctcagcctcccaaagtgctgggattacaggcatgagccactgcacccagctttgtaaactaaatttctggtgaaataatagagccactttaagaaaacatttcagaaactgttagcaagtacttatttatacacaaatctactgattaaaaaatatttttttaatgaataaccaagtctgtaggccattgatggcaatgccaccagtcaattaaaaagaaaaaaaagagatagggtctcactgtgttgcccaggctggccttgaactcctggcctcaggcagtcctcctgccttggcctcccaggtgctgggattacaggtgtgagccactgtacttggccaatttttaaattgtgtattctgactcactgtatacaatgttttaatctgctcttctgtctgaattttaattaaatactcaggcattcaaaaaatataggaaataatataatgaatattcatgaacaacaaaaacattttagataaaattgaaatcctttgtgtaattctcccaaatcttattgctctctttcccctaagaaatcactaccaccctgaatttgatgtttactatttctctttatatttttaaaatttataaacatacacggagattcataaacaacgtatagcattgttgtacacttttttttttttttttttttttagaaacagggtctcactctgttgcccaggctggagtgcagtggcacaatcatagctcactgtagccttgaactcctgggctcaagcaatcctcctgcctcagcctctcgagtagctagaactacaggcacgcaccaccatacctggctaatttttttaaaaaaatttcatagagatgaggtcttgctatgttgcccaggatggtcttgatcttggcctcaagttgtcctcccacctcaacctcccaaaacgccaggattacaggtgtgagctacagtgcccaactggttttttgttgttgttgttgtttgtttgtttaagatggggtctcactctgtcacccaggctgggatgcagtggcatgatcatagctcattgcagccccagactctaggctcaagcagtcttcccacctcagtctctcagtagcaggaactgcagggaggaaccactgtgcctgttttttttttttgttttatttttttgagataagatctcattatgattgcccaggatagtctcaaaccctttgcctcaatcaatccttccacttcatcctcccaagtagctgggattataggtgcgcaccactgcacctcagcttgttttgcactttttttaaactgcatatacttatgtatcattctgcaacatgctttttacttaaatcatttttggcatttgttcaagtcaatgaatacagttctagttagcttattttagatgctgtgtagtgttccgttatatttatactccacaatttatccagtctctggatgatgagcctctattcactcttgtaaataatgcttcactgaatattcttgtaaacgttttcttataactttgttttttgtttgtttgttttgagacagagtctcactctgttgcccaggctggagtgcagtggcatgatctcagctcactgcaaccctctgcttcctgggttcaagcgattctcctgcctcagcctcccaagtagctgggactacaggcacgcactactacgcccggctaatttctttgtatttttagtagagatggggtttcgccttgttggccaggctgttcttaaactcctgacctcaagtgatctgcccgcctcagcctcccaaagtgctgggattacaggcatgagctgctgcacctggctcttataaatttgtgtaagagtttatctagggtatatgcatacttaagagtcaaattgctgagtcatccgatatgtatctcttcagtactatgagatcttgccaaattgttttacaaaatggttgtatcaatttttacttccctattggtgttcctgttttattatatttttatccatttggaattatcagacttttttttcgtttctttttttctttttttttttttggagacagagctttgctcttgttgcccaggctggagtgcagtggtgcgatctcggctcaccacaacctccatctcccgggttcaagcgattctcctgcctcagcctcccaagtagctgggattacaggcaggtgccaccatgcccggctaattttgtattttagtagagacggtgtttttccatgatggtcaggctggtctcgaactcctgacctcaggtgatccatctgcctcggcctcccaaagcgctgggattacaggcatgagccaccacgcctggccttgagttatcagacttttgttcatctaatgagtaaaatgggatttcattgtagttttatgttattttccctgagtaagggataaagtgtgttttcgtgtttgtagctatttggatctattcctctctgaattacttgttcatatatgtgttcatctgtcttttgggttagttgtctttttcttattaagttttagaagatctttaagtaatacaaatcctttataggttaagttgcactgattttcaattccataggaaagttcaaccgtctgaacttgtagggagtgtgtggaccaaagaagataaagaaataaattctccaaatttattaaaaatgattcgccataccacaaatctcaccctctggtttgaaaagtaagttttaatttactcttactacctcctaatagccataatattaagtcatatttaagctaaaattctggctactcataattatcttgttttctaagtgaggtgaagaaacttttctaagccatgaatttttgttgttgttagatgcattgtggaagcagaaaattttgaagaacgggtggcagtactaagtagaattatagaaattctgcaagtttttcaagatttgaataatttcaatggcgtattggagatagtcagtgcagtaaattcagtgtcagtatacagactagaccatacctttgaggtaagttttaggcttaactttttcatttttctcggggatgataaaattagcataaaagaaatttcatctatcatctgtctttttaattaaattctttgtaaattcatccttgcttcataaatatgatataaatatattagaaaatatgttgatatattagttaatatatgaatatgatatataatatgtgaatcctaggcttatattagaaaatatatcaatattcaataaacaatatgagacttgcactgccgtgtaatgtacttaacctaaatgtaatgaagttccaagtggatttattcaataacacattgattgatagtctcaaatgacaaaggattttaaatataaaaatacaagtaatgtcttaattacctttaggtagtcaacaatagtataacacgggaagaactatttcaaaaacttaaatttggccaggcgtggtggctcacgcctgtaatcccagcactttaggagg

SEQ ID NO: 1370 - DNA, 4002 bp, Homo sapiens
atgcaggcgcagcagctgccctacgagtttttcagcgaagagaacgcgcccaagtggcggggactactggtgcctgcgctgaaaaaggtccaggggcaagttcatcctactctcgagtctaatgatgatgctcttcagtatgttgaagaattaattttgcaattattaaatatgctatgccaagctcagccccgaagtgcttcagatgtagaggaacgtgttcaaaaaagtttccctcatccaattgataaatgggcaatagctgatgcccaatcagctattgaaaagaggaagcgaagaaaccctttatctctcccagtagaaaaaattcatcctttattaaaggaggtcctaggttataaaattgaccaccaggtttctgtttacatagtagcagtcttagaatacatttctgcagacattttaaagctggttgggaattatgtaagaaatatacggcattatgaaattacaaaacaagatattaaagtggcaatgtgtgctgacaaggtattgatggatatgtttcatcaagatgtagaagatattaatatattatctttaactgacgaagagccttccacctcaggagaacaaacttactatgatttggtaaaagcatttatggcagaaattcgacaatatataagggaactaaatctaattataaaagtttttagagagccctttgtctccaattcaaaattgttttcagctaatgatgtagaaaatatatttagtcgcatagtagatatacatgaacttagtgtaaagttactgggccatatagaagatacagtagaaatgacagatgaaggcagtccccatccactagtaggaagctgctttgaagacttagcagaggaactggcatttgatccatatgaatcgtatgctcgagatattttgcgacctggttttcatgatcgtttccttagtcagttatcaaagcctggggcagcactttatttgcagtcaataggcgaaggtttcaaagaagctgttcaatatgttttacccaggctgcttctggcccctgtttaccactgtctccattactttgaacttttgaagcagttagaagaaaaaagtgaagatcaagaagacaaggaatgtttaaaacaagcaataacagctttgcttaatgttcagagtggtatggaaaaaatatgttctaaaagtcttgcaaaacgaagactgagtgaatctgcatgtcggttttatagtcagcaaatgaaggggaaacaactagcaatcaagaagatgaacgagattcagaagaatattgatggttgggagggaaaagacattggacagtgttgtaatgaatttataatggaaggaactcttacacgtgtaggagccaaacatgagagacacatatttctctttgatggcttaatgatttgctgtaaatcaaatcatgggcagccaagacttcctggtgctagcaatgcagaatatcgtcttaaagaaaagttttttatgcgaaaggtacaaattaatgataaagatgacaccaatgaatacaagcatgcttttgaaataattttaaaagatgaaaatagtgttatattttctgccaagtcagctgaagagaaaaacaattggatggcagcattgatatctttacagtaccggagtacactggaaaggatgcttgatgtaacaatgctacaggaagagaaagaggagcagatgaggctgcctagtgctgatgtttatagatttgcagagcctgactctgaagagaatattatatttgaagagaacatgcagcccaaggctggaattccaattatcaaagcaggaactgttattaaacttatagagaggcttacgtaccatatgtacgcagatcccaattttgttcggacatttcttacaacatacagatccttttgcaaacctcaagaactactgagtcttataatagaaaggtttgaaattccagagcctgagccaacagaagctgatcgcatagctatagagaatggagatcaacccttgagtgcagaactgaaaagatttagaaaagaatatatacagcctgtgcaactgcgagtattaaatgtatgtcggcactgggtagagcaccacttctatgattttgaaagagatgcatatcttttgcaacgaatggaagaatttattggaacagtaagaggtaaagcaatgaaaaaatgggttgaatccatcactaaaataatccaaaggaaaaaaattgcaagagacaatggaccaggtcataatattacatttcagagttcacctcccacagttgagtggcatataagcagacctgggcacatagagacttttgacctgctcaccttacacccaatagaaattgctcgacaactcactttacttgaatcagatctataccgagctgtacagccatcagaattagttggaagtgtgtggacaaaagaagacaaagaaattaactctcctaatcttctgaaaatgattcgacataccaccaacctcactctgtggtttgagaaatgtattgtagaaactgaaaatttagaagaaagagtagctgtggtgagtcgaattattgagattctacaagtctttcaagagttgaacaactttaatggtgtccttgaggttgtcagtgctatgaattcatcacctgtttacagactagaccacacatttgagcaaataccaagtcgccagaagaaaattttagaagaagctcatgaattgagtgaagatcactataagaaatatttggcaaaactcaggtctattaatccaccatgtgtgcctttctttggaatttatctcactaatatcttgaaaacagaagaaggcaaccctgaggtcctaaaaagacatggaaaagagcttataaactttagcaaaaggaggaaagtagcagaaataacaggagagatccagcagtaccaaaatcagccttactgtttacgagtagaatcagatatcaaaaggttctttgaaaacttgaatccgatgggaaatagcatggagaaggaatttacagattatcttttcaacaaatccctagaaatagaaccacgaaaccctaagcctctcccaagatttccaaaaaaatatagctatcccctaaaatctcctggtgttcgtccatcaaacccaagaccaggtaccatgaggcatcccacacctctgcagcaggagccaaggaaaattagttatagtaggatccctgaaagtgaaacagaaagtacagcatctgcaccaaattctccaagaacaccgttaacacctccgcctgcttctggtgcttccagtaccacagatgtttgcagtgtatttgattccgatcattcgagcccttttcactcaagcaatgataccgtctttatccaagttactctgccccatggcccaagatctgcttctgtatcatctataagtttaaccaaaggcactgatgaagtgcctgtccctcctcctgttcctccacgaagacgaccagaatctgccccagcagaatcttcaccatctaagattatgtctaagcatttggacagtcccccagccattcctcctaggcaacccacatcaaaagcctattcaccacgatattcaatatcagaccggacctctatctcagaccctcctgaaagccctcccttattaccaccacgagaacctgtgaggacacctgatgttttctcaagctcaccactacatctccaacctccccctttgggcaaaaaaagtgaccatggcaatgccttcttcccaaacagcccttccccctttacaccacctcctcctcaaacaccttctcctcacggcacaagaaggcatctgccatcaccaccattgacacaagaagtggaccttcattccattgctgggccgcctgttcctccacgacaaagcacttctcaacatatccctaaactccctccaaaaacttacaaaagggagcacacacacccatccatgcacagagatggaccaccactgttggagaatgcccattcttcctga

SEQ ID NO: 1371 - DNA, 4002 bp, Homo sapiens; identical to SEQ ID NO: 1370

SEQ ID NO: 1372 - DNA, 46456 bp, Mus musculus
  misc_feature (1)..(2876): n = a, g, c, or t.
  misc_feature (23821)..(24010): n = a, g, c, or t.
nnnnnnnnnnnnnnnnnnnnnnnnnnnnnnnnnnnnnnnnnnnnnnnnnnnnnnnnnnnnnnnnnnnnnnnnnnnnnnnnnnnnnnnnnnnnnnnnnnnnnnnnnnnnnnnnnnnnnnnnnnnnnnnnnnnnnnnnnnnnnnnnnnnnnnnnnnnnnnnnnnnnnnnnnnnnnnnnnnnnnnnnnnnnnnnnnnnnnnnnnnnnnnnnnnnnnnnnnnnnnnnnnnnnnnnnnnnnnnnnnnnnnnnnnnnnnnnnnnnnnnnnnnnnnnnnnnnnnnnnnnnnnnnnnnnnnnnnnnnnnnnnnnnnnnnnnnnnnnnnnnnnnnnnnnnnnnnnnnnnnnnnnnnnnnnnnnnnnnnnnnnnnnnnnnnnnnnnnnnnnnnnnnnnnnnnnnnnnnnnnnnnnnnnnnnnnnnnnnnnnnnnnnnnnnnnnnnnnnnnnnnnnnnnnnnnnnnnnnnnnnnnnnnnnnnnnnnnnnnnnnnnnnnnnnnnnnnnnnnnnnnnnnnnnnnnnnnnnnnnnnnnnnnnnnnnnnnnnnnnnnnnnnnnnnnnnnnnnnnnnnnnnnnnnnnnnnnnnnnnnnnnnnnnnnnnnnnnnnnnnnnnnnnnnnnnnnnnnnnnnnnnnnnnnnnnnnnnnnnnnnnnnnnnnnnnnnnnnnnnnnnnnnnnnnnnnnnnnnnnnnnnnnnnnnnnnnnnnnnnnnnnnnnnnnnnnnnnnnnnnnnnnnnnnnnnnnnnnnnnnnnnnnnnnnnnnnnnnnnnnnnnnnnnnnnnnnnnnnnnnnnnnnnnnnnnnnnnnnnnnnnnnnnnnnnnnnnnnnnnnnnnnnnnnnnnnnnnnnnnnnnnnnnnnnnnnnnnnnnnnnnnnnnnnnnnnnnnnnnnnnnnnnnnnnnnnnnnnnnnnnnnnnnnnnnnnnnnnnnnnnnnnnnnnnnnnnnnnnnnnnnnnnnnnnnnnnnnnnnnnnnnnnnnnnnnnnnnnnnnnnnnnnnnnnnnnnnnnnnnnnnnnnnnnnnnnnnnnnnnnnnnnnnnnnnnnnnnnnnnnnnnnnnnnnnnnnnnnnnnnnnnnnnnnnnnnnnnnnnnnnnnnnnnnnnnnnnnnnnnnnnnnnnnnnnnnnnnnnnnnnnnnnnnnnnnnnnnnnnnnnnnnnnnnnnnnnnnnnnnnnnnnnnnnnnnnnnnnnnnnnnnnnnnnnnnnnnnnnnnnnnnnnnnnnnnnnnnnnnnnnnnnnnnnnnnnnnnnnnnnnnnnnnnnnnnnnnnnnnnnnnnnnnnnnnnnnnnnnnnnnnnnnnnnnnnnnnnnnnnnnnnnnnnnnnnnnnnnnnnnnnnnnnnnnnnnnnnnnnnnnnnnnnnnnnnnnnnnnnnnnnnnnnnnnnnnnnnnnnnnnnnnnnnnnnnnnnnnnnnnnnnnnnnnnnnnnnnnnnnnnnnnnnnnnnnnnnnnnnnnnnnnnnnnnnnnnnnnnnnnnnnnnnnnnnnnnnnnnnnnnnnnnnnnnnnnnnnnnnnnnnnnnnnnnnnnnnnnnnnnnnnnnnnnnnnnnnnnnnnnnnnnnnnnnnnnnnnnnnnnnnnnnnnnnnnnnnnnnnnnnnnnnnnnnnnnnnnnnnnnnnnnnnnnnnnnnnnnnnnnnnnnnnnnnnnnnnnnnnnnnnnnnnnnnnnnnnnnnnnnnnnnnnnnnnnnnnnnnnnnnnnnnnnnnnnnnnnnnnnnnnnnnnnnnnnnnnnnnnnnnnnnnnnnnnnnnnnnnnnnnnnnnnnnnnnnnnnnnnnnnnnnnnnnnnnnnnnnnnnnnnnnnnnnnnnnnnnnnnnnnnnnnnnnnnnnnnnnnnnnnnnnnnnnnnnnnnnnnnnnnnnnnnnnnnnnnnnnnnnnnnnnnnnnnnnnnnnnnnnnnnnnnnnnnnnnnnnnnnnnnnnnnnnnnnnnnnnnnnnnnnnnnnnnnnnnnnnnnnnnnnnnnnnnnnnnnnnnnnnnnnnnnnnnnnnnnnnnnnnnnnnnnnnnnnnnnnnnnnnnnnnnnnnnnnnnnnnnnnnnnnnnnnnnnnnnnnnnnnnnnnnnnnnnnnnnnnnnnnnnnnnnnnnnnnnnnnnnnnnnnnnnnnnnnnnnnnnnnnnnnnnnnnnnnnnnnnnnnnnnnnnnnnnnnnnnnnnnnnnnnnnnnnnnnnnnnnnnnnnnnnnnnnnnnnnnnnnnnnnnnnnnnnnnnnnnnnnnnnnnnnnnnnnnnnnnnnnnnnnnnnnnnnnnnnnnnnnnnnnnnnnnnnnnnnnnnnnnnnnnnnnnnnnnnnnnnnnnnnnnnnnnnnnnnnnnnnnnnnnnnnnnnnnnnnnnnnnnnnnnnnnnnnnnnnnnnnnnnnnnnnnnnnnnnnnnnnnnnnnnnnnnnnnnnnnnnnnnnnnnnnnnnnnnnnnnnnnnnnnnnnnnnnnnnnnnnnnnnnnnnnnnnnnnnnnnnnnnnnnnnnnnnnnnnnnnnnnnnnnnnnnnnnnnnnnnnnnnnnnnnnnnnnnnnnnnnnnnnnnnnnnnnnnnnnnnnnnnnnnnnnnnnnnnnnnnnnnnnnnnnnnnnnnnnnnnnnnnnnnnnnnnnnnnnnnnnnnnnnnnnnnnnnnnnnnnnnnnnnnnnnnnnnnnnnnnnnnnnnnnnnnnnnnnnnnnnnnnnnnnnnnnnnnnnnnnnnnnnnnnnnnnnnnnnnnnnnnnnnnnnnnnnnnnnnnnnnnnnnnnnnnnnnnnnnnnnnnnnnnnnnnnnnnnnnnnnnnnnnnnnnnnnnnnnnnnnnnnnnnnnnnnnnnnnnnnnnnnnnnnnnnnnnnnnnnnnnnnnnnnnnnnnnnnnnnnnnnnnnnnnnnnnnnnnnnnnnnnnnnnnnnnnnnnnnnnnnnnnnnnnnnnnnnnnnnnnnnactgcaatctccattaaaaagcttggatctgatttgtgttagctagctattcctgatcatgaggccaggcctggagtatggatgatgtagccagtgtcactccatgaaaacaatttggtgtgcccctctctcaccagctgtcaatttcagatagctttttggctaggggagggactttgtgcctacttctcctctgtgctgggattttgtctggtctgaacttgtatagaacgagtgcgtgctgacacagggtctgtgagttcatatatgcacccaccccattgtgtctggaaaactcagtttatttgaaattgttgaccacctgtggctcataatcctcttctggaatgttcctcagccttgagggaggtttgtgatagagatcccagttagggatgaggattccaaagtcattcattgtattagtcaggattcgctaagtaactgaactgatagtatgatgttgtgtgtctcacacacacacacacacacacacacacacacacacacacacacaaaccatatgggatttatttgagtggtttacatgtggtgcaagaggtccagcaatgtctgtctcctggtggaaagaccaatgattctggaattgtttagtccacaagacagtatgtttcaacaatcctagtctggtactggagtcgtagggaaatcctataaggctgacagttttctaacaccaatgaacaaatggctcagtgaagcgagggcaagcagacagaaaacaggagcttcctcatcccttgtgctttcatatgggcttcgaccagatgacaggggcccagaattagggtggcccttctgacctcaaatgaaccagatttagggtgagtctcccaccttaaatgatctaaccaagaaaaatctctctcagcgcacacagctgtttgggttttagttacttccaaatgtggtcaagttgatagttaagattagtcacctacccttcacacgaagtctgtgtgtcaaataccatcgatagcaagaagcaacttctttggtaagtgttgagtggtgtgtagatctaaagatatgacagtataccgtcagcagttgttttattgctacgttcttttagcaagataatagtagtaagttgtcccctagaatccatgacctatctatcagggctctggggaaccattttttaaaaaagattttcacatttatattatgtgcatgtttcctttatatgtatggatgtatactactagtgggcagtgtgtatgccttgggtcctcagaggccagaaaaggatgtcaaatctcatggatttgtagctacagatggccgtgagacactatatagatgctgggaactgaactaaggtcctctggaagagcagcaggctctcttaaccactgagccacaccttcagctcataagaagtaaaactacagttttcacaccaacttgaacatgggaactgtattttacttattttagcaatcccagtatccagcacaaatttcaacaccgcttgcattgttccaaccaaggatattcagaaatgtcctgaaagatgcatctcaaagttggacattgattgtgtagagttggaagaaggtactgttggcaatatggcaaaaatattaagtaaataaagttcattattcagtagagagtggtaaaagactatgctaaaacagtgtctttttggactgaaaggaccacatagtggacagaatagcctggaccctttctatttggcaaaggcaccccaggaacaaaaaagtgcatcaaagagaagagcctccaggctgtgttgactatctccatgattatttacggcgtacctataccatggataacaatcaaaatcacatggcccttgattttctcatctgaaaattggaacatgaacacttaccagatgtccctgtcaatggaaaattgtcattgtggctagaggccatctgtctggtgcagaggccattcaagaacagccataaagagagttgggcactctccagcttggcacagaggccagacactggtgcacaataaagcccttgcttctgaacactggagccagtccagaccatgttgttgattcaatcaccatttggttaggggtaggtgatttctttttcatagtgcctggttgtaatgtccaattatttgaggtgtgactatacaggaaatctcagccactaaatccatttttagataaggacccgccatgcagctgtcagccatatttgtagatgatggttgagaaattggagagatgagatatggtctggatctagcttctgttttgataagcacagcaggacttattttccccccacaccctccttgggaaagtagaaattagcaaagcttgaagggctccctgctctgcatgaatttggggaataaaaatgtaaaagaaaatccattgaaatagtctcttgattggaatgtgatgatacaatttttgtggatggaagattctacactaggctatggcactcattcgttatggttactttgtttccatttggaagaagaaaccacaactaagagagtttaaacaagtcaccctgctctcaaatcttttcaggggtagccagatggcaagccaggctctctacctctacagtagtatttcaccatactctgcagcctgccctattgggaaattacatggcaggatgaaatagcactcacttggtggagaagtgggtttagatagctctctcagtgtggaagggaatggaggggattcctcagagacagcggttaagtttagtattttatttgtggatttacccattttgtcttggagtccattaccctagcttggacttaggtaatgtcacatattttaaaatgtgatattattctatttctcttaaataagcagcagttattatctgtggagtctcagaaactctattgtgtatctcccaagaaaacatatagcagttagcattttctatgagaaattcatggactctctttaaaattatcctggtctacctacctctgtacccacctccaaggtcaacaaatctctttctttaaatctgattttgacaaatttccggccacatacataatctttagtctgctaatatttacattggtgacaaatcttgtattaaaaagtcatttgaattttctgtctatccagcaagaatttcctggttatatgatattgataatttctattttgcttatcattatatttctaaggtgtgactatgtggtatagtttatatagttcttgtgctcaatatttgtttcagaaaattatagataaaaagtttgggaatgaatctcatacaatagaacaaattgttattggaaagaatttgtatttctccattatatataacattattccatctcttattaagttaaggaagtttgcctctagtttaatttcctaagaattatttttaaaattgtaagactacattagaccttataaattttactttatgcattaagataattttataatttttcttttatgattcatcagtgtggtgagttactgtggtaagccatctaagaggaaactgttcttgcatccctgaggtaaagcctacacattgtgatatatgaccctcattctatcgtgatttattattatttctaaatacactatagaatcatgcaaaataatacttaggatttttgaatctatgcttagaagttaaatgtcctatagtcttcttaaactgataacatctagtttcagaatccagtttataataatttttatttgaaaacttcccgtcagtcttctttgctcatgactatggtgttatattgttagatcttagaaatattcaaattaatctagaattttttttctaattagtgaacttagtattttcacattcattacagcttctgtactattagcatgtaccatttctattttctatactttaaaaatattattttcttattctccatagagatgtccaaatttatctggcttagagataaaatatctatttctgttttcatattaagaatgaaggtggtgctctgctttaaggttgaactgaggtttcttttctgcaccgggttattacatttatctatcgtcttttttgagttgactattcctcatatcaaaatccccaatctgaaatgtccacagatcacaaaatttttaaatgttgatgataccgcaagtgggaggtgtcattcctgagctcatgtgacagacttaggaccagtacagatacactaaaaatattgcctaaaattgccttcagggtctgtgtaagatgtagaacgtgcataagggaacctggatttcattatcaagatagtttgttatatatgccagtgttctaagatctgaaaagaatctgagatttacagtgcttttggtcccacacatctgagagaagattgcctggacctctgtgttcctctttttacaatagtagcaacagtgcaattaagtgccctctggagttcccctaggaccacacaaaacgttattacatacaaagtgtgattaatataaattatattttttgaacttgtgcaagtgtgccgatagtttgttctggaggaattttcttttcccaggtttaagaaaatccccgtaataaacttgatccccgtgtgtgacagacatcctctagtgtttcctgtgacatcctcccaggagcactttccgttcaaatacttcctccaagagcaatgctcatgtggggctttgtaggccctgtgatatttttgttatactacaatatttgaatgacagttgggcttgctttaaagcgacaggttcagggtgcaggagacgtcagttcctaccaatgctctgctgctcactggctgtgttcccttaatacatgacaggttcatgttaatattttacaaatatttcctccctgtctgaatctataatttcactgtgaggcagaacactgccacagcaagtcgctattttgattgctttgtggagctcattatgctgggtctgtggagagacaaataaaaaaaaaatcttaattcatggtgttagaataagacaaccaaaatgtgagcaatgctataggaagggccttctgtttctcctgaggactctgcgacatctggagaaccagttcatttcataaactcagaaaccgagatgagaatagttgcatggaatatttgagggaacacagccagtgatcgggagagcactggtgggaactcacaccccctgcaggcaagccagtcccggtgggaggacacttcccagtaaagcccgaggctctgtgacactgccacctgctctgctagtccaggttgtggtatgtcgtccctgcagcaggtcagcaagtcccttccttcatcatggtgatctaggatggtttggagtgagggctgataatctatctaggagtgaggcttctctattggattattgtgttgtgtgaccagtgtttctcctcaagacctctcctcaagcagaccatccattagaggtgtaatttataacttgattaggtgaagttttactgggggtttagcatactctctgtcttacataggcacaaagataaagcctccatgaggtgcctacagcgtcatgtggcagttacacatgatgtaaacaacgggcataatgccctaggaacagagagaaggggactgatcatttctaggccaggaagttcagggggtgagtcacaaaattgttttgcctgccatggcgttattggtaggaccttgatgaaagaaatggggttgggtttctcttcagatggggaagacagggagagagtaccagcaggtgaggccaataagttaaaaaaaaagtccgggcgtggtggcacacgcctttaatcccagcactcgggaggcagaggcaggtggatttctgagttcaaggccagcctagtctacagagtgagttccaggacagccagggctacacagagaaaccctgtttcggaaccaaaaaaaaaaaaaaaagagcttgcaactggctcactgtgaaaggttttagtgtctcagctctgtggctaaagggtggtactggagtgtgaacctcaggcttacccattccagtcaagtgctaccttactgagcgatagtcctttagggcaaggcttttaacactggagaatgaaggatcagacccagaatgcattagatcactctgaggcaccatggaaggcaaaccagcaaggactctggactaccccgggggtataaccatatgatcttgacctgaaagtaactgggtcactggaatggagcctatgagtctgtttcagacacacagtggcagaatgtagccccatactgtatgtactgcggatggggaatccattactctttctttgagaggctttccattagccgtgttggggtcctaggattatgataagctggtactcctaaatccattaagtcacctttgggaaatcagcttcagttaagaagcctgagtgtctctgtttcttctttgagtgagtcggttccccctttctgtgtacataaccaaccgtctgaaacagggacccctatatttaaacaatattacatgccgccattttgccagggactggggccaggggaggagccgttacattttaaagtggaataaacagaaaagcaacaccgagaacgaggaggctggttagtgaggcttgaagagagggcaggtgtttcctcccatggtgagaatagtgacccctgggaatcgcatttcccgtcgagctgggaccaatggtaaggtcagtcctgtaaatggcctgatagtgtggaactgtatgtgagtgccagagaaagctcggtgctgtctgtattatcctttggacccctcatcgctcaaggagcgctgatccttgacctcatggtccacccttttgcgttcagactctcatgctcctcctatgtggcataacaccgtggctgtgtgcaaatggccgtggcctcctgtgctgtatggtggttagtcccaattggctggccctgtgtctcaagcactctccagccagtgggggccttgggggtgcacacagtgggttgacaggcggtgttgctgaagaaaaaaaagtacagctctgcctgaggtaggaggatgtgatgacgtggcccctctcagcgggaactcgggcctttaaaaagctgaagaaacagcctcagagtaaacggtggttccacgggaggaaagcacgcccagtcacattaaagaagccaaactgtctgcttcaaagagaaaaggcaacatcctgtcacaagccatgctctggcaaaaatgtaagtgctttgcttgtggctgtcagagccaagtaagcagaggcagggtccaggaatagagagctactgttggtgatgggagcacccagtctcgtcagggcctcgggggcatggagggctgaggtgggtgagatggagcctgttggagatgatgctcattttccaacctgggggaatgaaccagtgtcccaaggtggggacagctcattgcatctccgattctgtgcatgaatcactgaggtgacagaagggcagattatgattcatgagacggaaaccacatatgatatgggttaggagccgttcttcacgtgaggacctttcctttcatggaccccagttctgcaggttgttattgagttttgttggcccacttctagctgaattctgccagagttggttccctcctgtagatgtgtaggatggggtagaaactcagtcttatgaaacatctctctctctctctctctctctctctctctctcctcttttcaatttcttccttgttctgtggcaatggttggttttgtgttccactgcaaaaaaaaaactgtttatctttgaccttgatttttaatccctggacttgaatggaacaaaccatgaactgtattttccattctgtggattgaaaagaatcttgtgttatcgataacggaggctatatagacattctttacaacattcctttcacgaggcaaacaaagtcaactcaagagtcttgcaaaaggggaaccttattaaggctcaggactgtacttcctcaagcaaagagctataatttccctatctttctttgtaagatgtttaattccataaaacatcttttattggtttaggcatagcattcctcaatcaaatttatgtgataatccagattagaagaaaaagaaatcgtggttttacttataaaaagtaatctgacaatagtgttccattgattagagtgtgacatagtccccttatcacccacctattcccaaattctttgaaattgactcttttcatctgtgactcagagaagcaatcccaacgtgcctcagtttactaaccccattgttgatatgggcaagacttttttgtttaaataaaaataaatgaactttgatttggacttgagatttctgaccacagattctagtttgggtagcttaggactcatccaaaaaggtgaccagagcaaaaccttatctttctggaagcggagtggcagccaacaccattgtaaatactatgagattgtaggaacatggattttaatgtccttcaaagtgccaatatgccctcttgcttcaagtgaaatcaattgagttttgtgtgagctgcttttagtttttaaactcttagagtttgcatatttagaatggagtgaaaagtaatcccaccatgtataactgctcttaataagttgacggggcggccagaatgctgccgggtgctctgccctggtgttagccctgaggtatgggctgtttgcctgtatgaaaaagcccccatagcatctcattgttacgtaatccattttctctcctccagtgcctcttaagggatgaacagattttctttttgagagttgttagaggtcttgcttcttgctcataaactctcttaaactgtcttttgggggcttgaaggaaaacaagagcaggccttgtgcaacagacctatccctttaccctggtcatatggctgactaagacttgtgggaagtgagtgaagtctaggcagtgccagcgcaggcggggagggcagggtttgaaatcagacactgggagtgctgaaaaggcactttctttttttcagaaaacgcccttcaggcttgagctaaaatgactgtacccagggcgttggagagagttaagaaaacaatcatattgcccctgttgcctcctgcctgcttggcctctgactcctgttagtggactcatgggggaacacaggctttggttaagatgggagaacagtgtgacaaagctcagaactgttcacattgagatgtggaaacctggaggtcccagccctggctatgaggtcctctccactgtcagccagataaagatgttggtccatcttcagactttctccttaggttctgcatttgtagtgccaaggaagtgtttgatcccccttcatctcctatcccaagataggagcccatctgatgcaactcacagcagagtctttattcgagctagcttaatcaacccaactccctgtacaccatcatcatggggcaaggctttatagtaagcatcgaattggaaagctattgtgaccttcaacataattggctggtgctgggagtcatatcataaacttaacttctgctttccgctgcattggtggtcgttaggcagaaggcaggcttgttatctgggggtgcaggtttgttgcgggggaataacctggagatgctggtcttcttggggattagcctggagactggagctaggctctggttttgctggggggcaacttggaaacgaatgctaggtaccggcctgttagtttacctgagttcaaactttagatctctagaatggagtctgaatttaaaagatttggcctcttacatgagagacgtctctgtctcatgtagatgagaactagtgtgcacagggttgcatgtgacaattggctctgcagctgagtaatgtcatctcttcttcactcttaatgtggagatttgaacgtgtgcctatcaaagtgtctgtgacaatctaagtaaggaatgtaactgcctctggccagtattgtctgacgtactgggatgccagcttgggttttatgttaaccgttggttatagtccactatattctgtatgcaagcagtctccaaaaagtttgctctttctctgctaattagaaagataggctcatatacaaagtcacgtgttggggcgtggtggcacactcctttaatcccagcacttgggaggcagaggcaggcagatttctgagttcaaggccagcctggtctacaaagtgagttccaggacagccagggctacacagagaaaccctgtcttgaaaaacaaaaaaacaaaaaaccaaccaaccaaccaaacaaaaaaaccaaagtcatgtgtttcatcatggcatcttcctacatatgtgtcatcatgcttcttggtcttcctctgtccccacccacgtgccccttcctttgctaaactgatgtagacacaattcttaccatggtttccattaaaattttaagatagagagaacactgcaacaattaaatttcacatgagttaacatgccagctgtctgacaactttttagagctgtaggtttgcttaaagcgacaaaaaacaaacaaaaacaaaacaaaacaaagaagccccaaacaagaaaatgatgtaaaatcacactgtgccatcccagcacacacttagtctttgttctagagtctgagtccagcaaagcactaacttgcttacatgtgaaacactaacttctaaattcgaatcatacatcctcaaatggaattgaccaatattacttgtgtgaaaaacatgtatttttttcagttcaaggtcatattttaaactcttattaaggtttcaaaaatggagattattttatctagatgtaattttttttgaaaggttgaacttaggaaaaaaaaatgaatgtagctgaagtgaaactcaagtccccaataagcaagtcagagtgatcagtcagtgtcccattaggctatgccaacgtccttcctgcacattgtttcctatactttaaacacttccagtccaaaaattcttgggtgatagaatctaacaacattttcaaaggtctacaacataggcgtgcttatatggcctatgagccaaatcaggcttattgtctatttttgcaatttaagttttattggaacacagctatgtttattgacttgcatattttacagggccgtttttgctatagcagcagagctctgcatctgtaatgttacttgtatggtcctatcttgccctttatagaagtttgttcacttctagacttagatgcctggttgatacttgagacattcatttctctgggtttctttggacttgtatagtgttagcatcaatgttagataaagcacgcagatagttaattcaacgttttgttaatgacatgaatctaattaaaaatctttcttagaaacgatggaataatgtaaaataaattcaatatctcttgttgggaagtgttgtgaacatgaagatgagattttaatcattgcttcttgtattaggggaagatctgtgtgatagtgagaggtgaggttaactaatttttctttgcattgactgtctcatgtcccctggagttggccatgttatgttttaactgtattaagttaggggccctttaagaacaggaactagttattaccaaaccattatgcccatgtgcctttgtcagacaactggagcatatcaaagggttaacagataaattgggaactcacaattctcacaaatagtgaagtctgcctttaggatttaacctaaggtttcactagctaggaaatataattttaagggtagttaaaaagactcagggctatacatgtaacttttgaaaccttgaaatctcatgcataaactcagttatatttataacaggaagtaatttaaactattgtggaaacctctaacttttctattctatgatacagcctttgctcaattagcttagtaaagaccttccttacggagtttatgaggagtcattggtttgtaatgctaacagtaagtggagtccaaaggagagctgtagagagtcacaggttcctcgtgcaggtgaaatgggggtagcctggggaagatacgtgtctctcaggctctggcagtctctttacctgggaagacaagaacaaatgtctagcaagccaatgaaagaaccagatacacagttctacacaaggttgcaggtattatgagttcatttgattcattgaaaggagcatgggtcacccccaaatctctatcactaacaacttctaccctagcaagagtaatgacctccctaaatctgagcagtggaggcccctttagttaatcctttacttcttataagctccgccaagcacctcctgcgatgaattctcattgggaaagaattacatacagctggaggggaggggtcaggagttaggtgaggatgtaatggcctttcctgtcctctccttctatgatagaatgtgaacaggctcagtcttgtaggggtcacatggacaatcacagatgctctgattaaaatgggatcagctgtgtgattgcccagagtggtccccccccttttttttttttttttttgtctgtttgtttttgttttttgtttttcgagacagggtttctctgtgtagccctggctgtcctggaactcactctgtagatcaggctggccttgaactcagaaatctgcctgcctctgcctcccaagtgctgggattaaaggcgtgcaccaccactgctgggcggtgttattgcccagagaacactgttccacaacacaaaagtgaagtttaattggtaaaagagcaaatggtattcatggtggacattttccttgtcttcctatatttactagagatgtcaaatatgtattcctaattctcaatatttaccaattcaaaagtgttgaaaatggtccttcggttcagatctgcaactctgttcttttatgaagaataaagaattaaagttgtcgacacttgttcactaaatgtctggatgttgtatttattaagaagttcttaaatgtttgctttttagctttcccagtacaaagtaggtgtatcaggtcccctccccctggcttcccgacagtagcttagtttccaatgaaatgaaggtgctggataatttttcttgctctccaaaccaaggtgggtaattgattataaaagttattagtataactttcccgctagagcatccttagtaactcccctagttttctcagttttaggaagaacctcttggtcagagtgggactgccttgaatgaaagcaccttctccccagtaccttggttgtgtgaggctgtgtgaggctgtgaacagacacattatccctgcatttgtgattatacttcccagtctacagctaaacaggcttgggactttccagccactaccaaaccactatgggactagtcttttcctagctaagattagatagattgaactcaatcgctacttgctgagttttcatatatatatctatatctatctatctatctatatatatacacacatatatatgtatacacacacacacacacacacacacacacatatatatatatatatatatatatatatatatatatatatatataacatatatatatctttgtttatatatataaacaaggatttgtaagttaatagaaaggagtcttgtatctatccagagtgttcttttcaacattggctaaatactgagatgtctgggacgagatttaaggaatatcaataacttgatcccacctcagagcttctaattaagttgcccaggaacaggaattaagtatacatcgagatgtagtttttctttgtgggttatggtacttgttaactactgtgctcagcaggaggtaacagccaattttcaatgcaacttgaattagaaaaggatatgagaataaagattatttaagctttctaggcctgggaaatgttgagatagaaaagagaggcaagagaggtagaaataggagcaggtttcaatcatcttttcattatgccttgcttgcatatacttgtttactctgtatttcccatccaatagggtgacttctagaaattaaagaactatgagcgaacctcttcctcatcttcttcttcctgggtgatttactagtgctgatagctgaatcttgactcttttttttttttttttttttttttagtcttaactctttattagtaggataatgactccccaagcaacttacagagtggaggtagggtctagaacttaattatgaaaatattgactctttgtactagtattaacagaaagtgctccgttcttctgatagttttaaatggcagttgtggggtatgtacacttggtgccactcagaacatgaaatcattttggggggctactttgggcgatatttggttgctaatatagagatgtgacataacgtaagtttaagtaagattgtggactgtacgttttactacatagaagtccgtagtagccttcccagaatcctatggtctctgtactgccaacaatatttgggttcatttttgtctttcattcttatgtctttgtcatatgatatttgttctcaaaatttcctgattgtcactgtaacttgacccactgcatcaatgatcatcaaatcttgaaataagaacaaggaaaaagatctatctatctatctatctatctatctatctatctatctaataactgtaccttctcctaacagacaacctcttctgacatattaaggccactccagctacaaaggagaagatgtgacaacagccagtctttgctgtactttgtactatttaatctacttctcataatctctacattaaccatgatctgggtcctgttacaagaacctcctcattgatgagaaaactgtagcttaaatgttatattagtaacttacctataagataaaattcatctaaagcagacccaaaataccaacttgccaagctgcccggtctcctgccagatgtacatggtgaaaggcaaggctttccatgttagataaaggccaactgtgagatgaaatataacagaccctcagaatgcgtttgtgatgtgtttacttactggagagaaatttataatgagtagggtttttatttagagccacaaagggatattgctgctcttagtttgctttgaggagtttgaaggccagtgccagtgccagggtcaagcagatatgaatttgagacctagacctatctatattttactgtttgtgatgctggtaagtccctgctctttctgcatacaccaaggatgtggttcttccttcatgggttgtggtgggtgtttatgaccatgcttgacagtaagtaaacacccaataagttcttgttactattattgtattctctcattgaggacagaggctatgcaggttaattatagattacaatttgtgagtcattcatagtgaagtggtagggtgcatatacatggccatgtaattaagaatgagacctgggatcagggttaatgctgatggctaaggtgatctgtttgagactcacttgttcatgacttcctgactaccttcatcaggtagtatgaggcttgtgactggcaaacttgtgtttgtttttaattcacaaatttggaccaaggtatttataaattgggtgtgaggagaacaatacttaaaatagtcaagaaatagcactaatgatactgaaaaccgaaacaccaatgtgttgcctcaggttcttagtaatggtttcattagtactactttctgggaaaagctggcagctaaagaattataagccagaatcattttcagactaggtgctagtgcccaaaaggagtctcccacccttcaggaaagctcaattaccttttaatctattagaatcaagctttaactgggaggggaaataataatatagacatgataataaatataaataataaagtaatgacaaatgttgaggagctgaaaagaaaagaatgagaaaaagagtagaaaattgcaagttgatgaaagctttgtcagctcaggagagaagagtgtagaaagacagtcaacccatcttttcattatgctgtgcttgtgtgtactcatacaggcgtccagtctagtgttggaactcctatagtaatgaagcaatggaataaaatgtcttcagcaaaggggaagataggaccagtgatgatggcatggaacatttgtaggatatgaaggacacatgatgataatcaagttcattgcttagattctgggaaatatactggcatctgagcatttgaatagaaatccaaggatgtctaggctgatgcacataaatgttgtaattccttctataccttcctaatgctataacccttaaatacaattcctcatgttgtggtgattccaagccataaaattatttcattgctctacttcagaattgttattttgatactgttatgaattgtaatgtaaatatctgatatgtaggatagctgatatgtgactataaaggggttgaaacccactggttaagatccaccactctcttcaaatcaattctcttgcaggagtccaacatcaatcaagatgaaggatctctgggataaggatgcttagagcttggtttgtttgttaatgtcccgattttcttgcctctgtaggcacttgctggcatcataattgtgtctagggttctaaccagcccttcacttctttggctaagagccctggtagctagtcacaggttcttggcttacagagtgagtctctgtgaagcactgtctcgattttcatgaagtgttgcagctgtgaaagttatgtcttcagtcatgtgagtttcttgtgaattagggagtaggcaatttcctaaaatatgacttagcgacatatttatcagacttgatattctaataaccactcttctaatgtccctcatgaggtagtctcccatatcctgagagccactggttagtaaacccgagaattgtcccaaaagctcatcttgtctacaagttatgtttttcttcatgagtcagtcatcaggactaactttacatgtggaccaaaaccttatgctagtcataagccttgaggcttgggtagttggatccgacccttaaatacaacccctgctgcttctaaaaatccttgaagagagtagtcctaatccaagaatctcaggaaaaaatatttcttttgtaagactgtctttagccttgaaagtctaaacaatgagttgcttaagtctagaaactgagtatccttctgcatcttcaagctgcctaacaacagtttcttcctgacctatatcagatagagccaatagttctagattcgggtctttgtttagtaaagaaagatgtattccattcctatgctccatccctccttgtggagttgctttcctggagaagttaggtttgcaatggatggttaagtgtaatgtgggacagatgctcatagttctcaaggccgtttaacccccaccttgaggctgctgctctctgtgaagctgaggtttccagtgtgtgagccaggagtctaccttgctctaacaggtgacacaacacctacagcccccaaacactacattctagaattgtattccattgtgtatatagccacatatttacttcatcccgactcattgatatctacaacccagcctcagctgtggctatgtccatgtctttttagagacacctacagattccttaagggctggttaacagtagagatcaggacaaagataagccgttgtactctgtctcctacctaactgctagcattcaaaagttttcaaggtatttactcttaggtgcaacttttaaaaattccttaaatataccataaacccccatttatctggtgggttctgaagatagaactatgctctgctcatacaagttttacaaaagccaaggctttggtttcctgttcagggttgctgtctttaagtgaggtctttggtcaatccctggtcatggctgactaaaacctatttaggttttccttggggactttaggcccatggacttgaaggtgactttcaggatcataataaagacaaagggagacagactttgtaggtcgcagagtcctggatatgtccagatatttagtctcagtatgtaacaagatgtgctgagctatagtgacttttacttggtacctattgtatgccacatgtgttaggtaatacacaatctttataatagctccttgagacagacaatattattctcattttacaagtagagaaactgaggcttccactagtaagttacttgttgagggtaacacaggtgttaagcaatgtagcaagctttccaaactaggtctgcctgatcctaaccctgcaccacaccacaccacacctatatatcagtgcgaagggatcttgaagggtactggattttcattccactttcaattgaaataggtccaccctagatggaggtgggctatgagttcatcaaggctaactctacactgactcaaacatcactgcaaatttgagtatcagaaggagatactgaatggatagagctccgtcggtaaagcgcttgccgtgctaggatgagtactgagtttggcatggtatcgtgtgcatataatcctagtcctaggaaggttgaaacaagacagatccctggagatcctctggctcgtcagcctagctgaatcagtacgttctaggccagtgagacaccctacctcaagaagaaaacaaaacaactaaggtagacagcatgtaggttgacatgtacacacacacacacacacacacacacacacacacacacttactccctgtgtccttcacagacatgcacatacaagaaaagaattaaaagacattaatacttgagatgattagagattctgaatctagacgatgttcatcttataatgactccttggggctgttcttctgataagctgatcagccaagggcagagagcagttggtgaaacttcctgaggagtcacagagggtctgtcactttgtgtatcttggcagagactgatactttcatactcatggtatggcctgagccactgaccccaggtcattctctacattggagagagaccatctgccttgcttctaacctctctcctctttatatatctctagagacagcttgctgctttttcaagcattaatgagtcaggtagaggcggaagtcaaaactcttcaggtctgaagcagctacagcttcattacaattcatttgcttgtgtgatgatttcattaaagtctgcatatgacacctgagtggactgaaagtcgccaatggcagagatctagtctgatctgttcaacaagtatttgctagataaatggtctactagatgtttcttggtcttgaccctgaattggagatgtggtgtatttgagatgggaaccttttctgctctggtgaccttagtttctataaaaggcaagcagatgcagctggcttctcaggtggactcatctgctctcatttcaatagaaaaatacccaaaataaaaccttgccaggaatcgagtctctcggttcttgtcactcctcatgtgagtagacttttggcaaattttttgtggaagactctctgacctcaaaaccaccattttcttttttggagaattggccatcaagaggatcacatagtccaagccagtactccaactgaaggaaggatggttaggattggcccaaggaccttcaaggccacatagagaaaaaatgagacatatagaggcaagaagaaggtatgtggtgaagcaaaaatgggctgtgttggagtcagaggtcctaaatttggtcaatgacatcactactgttccttggaaagttcactaaatatcttttaagcatcaccttcttcatcactaaaagaagggatggagagtagactagattctttgtctgtttcagaggttatagtgcagcccccccccctcaatatcctttatgtcagaggctctgagaaccacaaccacagaacttaatgaaaatgtaggtgaggatttctgagtttctgggagttacaattatgttttggaaacacatgggctgttaccactcaataattcaacattaaattggtgtgcatacagaagaggtatctgcagcaacttcctgtacctgctagtcctcagtagattggaaagagagtggacaagtggcatgcctagtacagttgggaaaggaatcttgggcagtggggtttgtgtgttaaggaacattgccacacagaaagttcccacaccaccagcccgtggctaactttgcttgaggccctggtgaaggacagctataattcaaggcttccacaaagaaacaccataggcagaagttgggtaagtcaggatgagccatgtataaatgagctttcttgagaggcataggcatgaccctggctgttgattctctgatctccatggttttcatgagacagcatcatgctcaaataactttgatctgaggcttgggattctaaaactgcagtcacccccagtcagcatcaaaactggctcatgctactcaccactgcccgtcttgtttctaggggccctcttaccatgtccaagtttgaggactttctttgtgactctagccctccttgagattttcccagtggcctcacctgtggctgattttgaacactgaaggactgttgagggagcaacatgcttttttggaagtcttggggagaggaaagaaaattgccagtggtttccttttgtctgactaagccagcttcaaccaccattttgggacctcttaatagagacctctcaggtcagtcactaggaccctcgctgttttctctctgccactctagcagccttacatacggtatcatcctataatccaagtgcagtccattttctctcagatcttcggagcagcttttgggaaggctgtgctcccttcccttgcccctttcacatctctgcttcttctctgccttgagtgttatctagcttgctagaatgtatagatggcacgttnnnnnnnnnnnnnnnnnnnnnnnnnnnnnnnnnnnnnnnnnnnnnnnnnnnnnnnnnnnnnnnnnnnnnnnnnnnnnnnnnnnnnnnnnnnnnnnnnnnnnnnnnnnnnnnnnnnnnnnnnnnnnnnnnnnnnnnnnnnnnnnnnnnnnnnnnnnnnnnnnnnnnnnnnnnnnnnnnnnnnnnnnnnnnnaggaggaggaggaggaggagaagaagaagaagaagaagaagaagaagaagaagaagaagaagaagaagaagaagaagaagaagaagaagaagaagaagaagaagaagaagaaactgagtgggaaagtctttctgtagtatcaagtccttctggccaaagaataaagtcttcctgtttgaaaaaaaatcagccattgtccataaatgaataaatgtgaaaactctgactgagagcttcaccctaagaagaacacctgcagtagcgttttcataaagaatgtgaacaagcctgtggcctccctaaactcatgtttcccagaagatctcagccatctcaggtcagcaacacaaacacgattcttcacattaaagtgtcagcaacttttcagactttgttttcagtagagctaggacaagtttgttagccccaggcttgggacgtcctattgtttgactatttgttttggttttgctacaagtaaagagagtattagtggtcttcctccttaatgagttctattttctttttgataatattgaacaccagcagtgaaaggaaatatcccacagcggtaatctggagtgattcagagggtgtcttacatggtagcatgtcatgtgaccttcacatctaggtgattacttttcaaagtagcccatgtggctaagctgtgaggctctactagttgtgaatggaagcttgagccatctgttgagttgggatggaagggctcctatagatgtgagttctcttgttctttcattccctggtgatgcaaatccatgcttaactatatattacgaagggttttattttattttattttattttattttattttattttatttttggcagagctcttaattgttgtcctgtctgttgattggcccgatgacctatgggaaatctcaagagaacaatggctgaggcaagggtcttctctcagaaaacacctattggacataggctcatttaaagctaaactgaaagacaagttacagatgcttggggctggctactggctctgtagctgagtagcatgtgtgctgtggtttacatggggttgctaaataaacaggtattgtggttctgcataactccttcgtgagattttattgtactttattgaggaacccagagtaccatgcttatttcactcagtagatgcctgtatctctcaggttggtggacagtaagcatagatgccaatgtgcatacaggggctgtggaatgtgtgacctattggcttcaacctgttgcactgtgtgccttcaggtgggtggcagcctctggcctctttttcctgtgatgtacagcatatctgggtgtgtggtgggcgaactgaaatgccctctgctgactgttttaactctagaccattcattgctcatttggaaaaggggtagctctctctgtgaccaaatgtatgggttttgctatcaactaggcttcttaaaagctttttgtccttgaataccactggcaactgatgtccaaaagtaaagaaaagcagcaaggtgaacacctgtccaaagattcccagaggttcatgttcaggtagactgattttccattgtgatggattcttcaagcctacagaagctacaagggtcctcagactaacaaaaggaatgtcagaaagtttccagcctttgccaggatgccgtccagacctgcagtttgactagggagttattaaattctctagttagactttcttctttgccagtagagtattatttcaactttctattttatttccttcatataccatttaaaattgctatcttaaattattttgatatcttgttttaaaagttgcataatgctttagtgcagtcattggaaacttagatcagttcaaggattcagcagcccaaagccaaggtaatcgtggctttggactagttttcttcttccaaatttccatagtgttggtgcaggtcacagttgaggtcatggtgtttgctgactcttgctttccatagattagtgtgaaagatcccaacaacaagttgtcaacttgcaaatactcttttctattgagcttctgagggagatgtctcggggctttggattcagatattttgtcagcactttgaagagacatggtcaaaagcatcctcactcttgcctgctcaggtagagtcagttacaaggctccctgtcagatggcaatggatacagagctgtgggagtttcgcagctgtactagaatcaagtggagacagagatgatcttactgtctctcatgccagtctatacacattgggtctgtgggcagcgccagatatcattcttgcacacatagacaagtcatgcaaacagctcttgtgcagggttgacacgttcagaaggatgattaggggctagaaacatgccactgagaaatttaaacctgcctctgtttcaagataaggaaaacgaagtctagagtcagtatataaatctgggaattttctactaataggtgataggtcatttttgaaagtgggtatttctggctcttatgtctgttgttattgatgctttgagcaaagatgaagatggtctcagggcacagttactatgctggctttttcttatatacactcttatgccagtccaaacctctcatttgttgtattcatctcattggtggggattttattgcttatgttctctggaatacttacaatccatgtgagtagggatcacatccacgtgtccagaaacattctggaagaatgagtatgggagagagattcccttttatgacagtgactactaacatgaggaccatctcctgctggaatgctatagagtggttctagtgttaggttggggatgaagtatcagagctctaaccccagtcatcttcagaaacactgcaagtacttttatacagacagactccttggcttaagtggctcctccaaattatactccatgagaacaagaccccgggtatctgtattttgtatcggtttctagttggttctgttccacggtcagggaagagaccatagcatctatggaaccctaggctgaggtgcttggtcttgactctcactgtctgcctctggggttcattctccctccacttgctggccatgcaaggcttctttgccttccagctttcaagaccagaccatgctggtgctgagagcccagggatcctgcaagaggtcttgtgcagactggggcactgttgttatcagtatcagctgggtgtttactgaacaaagttcagtcaaggcaggcctgtggatccgggttgaacagataccctggcttcctggcctttgatacaaagcgtgcgtccttgggctcttatcagtggaggataatgggctccttgtgtgagtcccagagaccattgcttcttgatcttggatgaccttgatcttagcctacctgccatgggcctttccatctgagagggtaggttgtctctgatctcccaggcaatgacaagccctatgtcctgacttggatttaattgatgatttcttggatttttttgaaaaaagggaaaggaaacattgtcccagtctccacaaggtggatactccagttctaggacgcatgagtcagaggtggatgtttgtctcatgtactgaagataaccaaggacctggaagccaagtttttccccccttagttcattaaccctaaagatccaggagaagtgagaaaagacaaaaggaaggacatttgaaagcactattcacttgatcagttaatgaactgccatgactaagcttacagagagactagacacggtctgccactccagggggcagaaacaacaccatatcttgagaggtttataatctagaaatcattttaaattcacctcaccaaggataactaatcattacctagcaggctatagatttattgaatttgtggggcagagggtgtagctcagttgtagaaacttgtctagcatgtctgacgctctgggctttatccatagcaccaacaaaacaaggagacaagaaaacaaattgcatcaatacccatctgataagaaactagagattgtgaggctcagagtaatttgaggacttcacaggatgccatagctagattgtgactgagaggggattggaatacagttatacctggcttgagagttcttgggctgattagcatcccttactgccacttatgtgaaagctagtcagatctaggtgtgttggagaggtagatgtaggaattccattgcttacagtggtcagagaagttgcccccagatcagaattatgactataaggaatagcaagaaaggtagagaggtgattcacgcaagggtatgcataggagtgtaacgaggccttcttgctagatccagtttatatagcttcagaaaaatgagtttctggtacctttgggaagccctgtcacttttagacataggagagagggcttaattatttgaatttagtagggccacggaatggttggggacagaaggagtcttgggagaaatactctaggaggtctcacagagattcaagttcaagtacaacttagacagtagaggaagtgggcattttgtggttgggggtatctgagaagggccacaagttcaagtgacattccccttcatagccacagctccagagcaagctcctgccccaccaaggccataccagggtgttcgagtcaaggagccagtgaaggagctactgagaagaaagcgtggccataccagcgttggggcagctgggccaccgaccgcggtgaggagctactgtgggctgtgtgactgcagtgtgtgtgtgtgtgcaggtggacttggcagggtggtcagagggataaggcaagagtgtccttctctgactcatgcaccgtctgtggggcatgaaggcggaggattacatggagaaggtggaattggatccaataagctggtggtttgttgggtggtcaggggaatagaggagcttcttgcttttatccataaggaaaaaatctattggtgaggcttcagggagccaattgtacacatcctagtgtgagttgggagttcataaagtttctccaacgtacagccttcttgctaaactgaaatacaaatccctcaaaaatgcaggtggcgatgactggggtgtgggatggcaggttcttccctcatgattctcctatcctgggacccagagagtccctgagagggcttgctgcagatagataaacacccatcctggtcttcttgtccccattctaggtggtactgccccaccagcccctggccacctacagcactgtgggtaagagctctcctacatagtttggtgtctttggggaccccccttctgggggagcctgcacttctgttatttcctttttcccacaggtccttcctgccttgacatggaggtttctgcttccacagtgacagaggagggaacattatgtgctggctggctctcccaacctgccccggccactcttcagccattggctccatggacaccctacacggagtatgtgtcccatgaagctgtcagctgcccctactccactgacatgtacgtgcagcctgtgtgccccagctacacagtggtgggaccctcctcggtgttgacctatgcttctccaccactcatcactaatgtcacggtatgtcacacaaaagtagagatctatccaccaatgctgatacaccctctgagaagatttggttttcttgtctattgatttccatggttactgggtcaattaagttcactgcatcctccagggtgacttgttcctattcctattaactgaaactatttattctccacaaagacactgtatgcttgagttgtcacatcctttacttctgtgggttgggaagatctgttgcttctagcccaaaccttcccagctactctggaagcagtgggtctcagtgagtgaagtttttagtagatgaagtattaggtgaaatctgtgtagggtctgggtttttgtcagttcagataacctagggagtagttgtacacttagcaatgggaactactataatacttccaggctgagcaaaagttaatactagtcatcaagggaactactttggggtctttttttttcatttcttgctgtaacatcaagttacctgtatttatcactctttctctctttcttaatagccctgtgcttagtactttgacctctctgaacccagagtcctcatctataagatgagagagactaacaagatgtttgctattgggatcagatgagctaatacatataggactgtgtttagcacagagacagcactccttaaatgttagttattagcctcatggccatagtctgccaccagtgtcaacaaatgactaccttcacgtgtcaggtaggctgggaggccctctcatccttgatgagtagaggaaaggagttatagttttatatgctgggtggctatgtctccaaaagaatgggaatccctgaaatgcttgtgaggagaggcctaggaagcagtgatgaccagtgccactctggagctctgggcagtacagctggaacctccctagttgtctcagaacccttgcctgagatccccatgtcccctctgtttaccgtcaaggtccagtgtcactctagttctctgcttcaaagcactttcctggcaaagcctcccctgtcatacccacctggatacccaacaaggtgacttggggggtgggtcttgatgccagtgagtaggaaggagttaattgaacagcttccctaggcaactcatttccatagtgggggacctggggtggaggatgtggtggttcacagccttctcactattgaagattctgttcattatttatccccttctatcatctgcaccttccactcagacaggttctgggtatcaaacaaactgtatttattaagaaatgatttgttttgtccttttgtaaattaactcaccaaagctactggctcagcacttctgagcagcagagataagacctgcaattctatcccttggcaaggaaccagccattgccgttgacctgtataggtagaagagtcaaaagtcaaacgtggattttaaaaataatgatagtaaggttctaccaggtcctgtctgctttcaggaatccaggctggggagcaggggctcaccccgaaagagaagaaaccatttatgctgttacactagcctgcatgttgggagcccccagctccattgttcaaatagagaaacttcaggaagccttgcttctcaaactgtaatccccatatcagccaggttagcatcctcagagatctgactggacttgcagaatcccaggccctactccaaacctctaggatcgggattcatattgtgacaaactctcctggaggctgatgaaaattctaatgactaatcgctaaatgactctagcggcttattcttaagatgcagtggcagctgaggagatgacaggggaggatggggatggaaagtggggtttggaaatgtctttcttctgcccatgcagagaacttccttatccattagcttgctgtggaaagataagaacataggccctgcctcgctggcttgaggtttgttcgagtagctgatagttgaatgtgatgtatggtttgtagagtacttgagagaagagccccctgccacagggagcagcagctcagagaaaaggggagagcagggtcaggtaccagacaatagctggatgaggccacaattgcagataaaacagtgctcccatgctacaggaatgctaggcttcctggattggtcagtactagaaaggcaagagctgagtgagttatattaacccatggggacctaaggacgtcaaagctgcttgggaattgttttaattagtgtctcgttgccgtgaatagacaccatgagcatggcaactcttataaaagaaaacatttaattggggctggtttcagaggttttgttcattatcgtcatggtatgaagtatgtcagtatgcaggtaaatatgatactgaaggagccaagagtttctacattttgattcataggtagcagaaggagactgtgaaccatactggctataacttgagcataggagacctcaaagcccacccccacagtgacacagtttctccaacaaggtcatacttactccagcaaggccacgcctcctactagtgcataccctgtgtgccaagcattcaaacatatgagtctatgggtgtcatacctatttaaatctccatattccactctttagcccccataggtttttagctataatacaaaatgcacttagtataactaaaattccccataatctatcatagcctcaacaatttctaaaagttcagtttgaaatgtcttctgagattcatgcaatctcttaactataatcccttttataactaaaagatgactaaaaaaacccagatcacatacttccaacatataacgacacagaatatatactaatattgcaaaagggagcatagtaaagaaatactggaccaaacaaagtaagaccaaaaaataactgggaaaactccaaactctgcatctccgtgtctgacatcaaagcactcttcagatctccaattcctttcagctttgttgagtgcaacacatgtctttatcttgggatggttgcatttcctgttagcagttttcctcagcaggtttcccacagctcttgtgtctctaatatcttggggtctccaaggcagaacaggcttcaccttaatagcttcacacatggtctttctaggcttccatgcagggacacccctgccacacacctggccttagcaacttttcttagtctcagatggagattccataacctcttttatctattcttaactctaaagccagaactacagatgccaagttctgctacttgctggggttggaacctgagacccttgttcaattacatctttgtcagttttctgtttccagtaatgatttcctttactgcctaaacttggctgtcatggaacttgtgctgtagaactcagagatgtgcacatctctgtctcgtgagttccaggattaaaggcatgagccatcatcacacctggacctaaactgttctttaatttcttttcacaagatggacgcttagctatgtgggatcctgccctgaggtcagcactccctcagttccatttaacatcttgaatctgtttatttctatcaacagaggatttagctccattccacttcctggtgccccctttctccttgacccatacattttgtattttttctcgcttagcttgctcctttccatcaaagcactcttcataagagtgaaccacacagagtctatactatactgttttgagatttccttttccagtgcaattaatctaacaagcttcactttagcctcaggcagactcttcagacaaggacaatgagcagccacgttcctcgccaaaatatcacaagaagaattctaggcaaaatattaaaattcttctcctcagctccactgttcttcatgttcttactagtatggcccattaagtccccattaaagcatttaactgcttttctaatctaaagtccaagaatccacaatcttccaaacaaaaacatggccaggtctagcagagcaatacctcagtccgtggtaacaacttctgtcttagttaggatttcactgctgtgaagagataccacgagcatggcaaactcttataaaggaaaacatttaattgtggatggcatacaggttcagaggctcagtccattatcatcttggtgggaagcatggtggcatgtaggcagatgtctagagaaggagctgaaaagttctacagaaggggactgtgtatcccactgggtatagtttgagcataaggagacctcaaagtctacccccatagttgcacacttcctccaataaaaccatatatactacaacaaggacacatttcccaatactgccataccctatgggcctaacattcaaacacatgagtctgcgggaccatacctattcaaaccaccacaggggtctgtgtcacctttctgtctgggcttgatagtagtcatcttcaagaaacagctacaaggctatgagacaggctcattatatatcaagaatatattttgcataatttaagggttttttctttcattttttttgtttttttgcaattagaatatattttatattcagtgaaacctataaggcctttagtttttcaggggtatgacatcattattttctgtaccctctttcatgaaaaagtgaagcttccaagttgggaagtagcagaagcataccgttagaagaggggggaacacagctgaaacgtgtcaagctttctcttctaggagactgagcaggaggaggtggagccccattaagtgtaacaccagtaagggaaggtggggtataatagatcatgatgggggcaaggaggcaggtgggcaccccagttctgctaaccattgctcctatgtttttcatcacagccaagaagcactgctacacccgcggtggggccccagctggagggtcccgagcaccaggcgcccctcacttatttcccgtggcctcagcccctttccacactgcccacctccagcctgcagtatcaacctcctgccccaaccctgtctgggccccagtttgtccagctccccatctctatcccagagccagtccttcaggacatggatgaccccagaagggccatcagctccctgaccattgacaagctgcttctggaggaagaggaaagcaacacgtacgagctcaaccacaccctctccgtggagggcttttagggctggcttgcatctaacagatgtttcacccatagctgagattttaaaagtgttcaatagagcccagacttctgtttgaagtagctatttcacaggcttcctttcttcctaaagctaaattgtatcccttcttttctcccttcttccttccctcgcttccttccttcccccactgccatcttgcttatttcttatttctccttccagttttcttcctctggagcggcaaatgatagtgatattatgaacaacgctttatacggaatgtcaccaagtctgcagctcagggttttcctttggtggcacatcattggggaagcaaccttctttcaggtgccccctgtttcctggtagcagtagctttatagatctactctatgatacgttctgcgccccagttttgttttgtgtgctgttctcagccttggccagatatactatctaagtggatgtttctggtctggttacagggggatgggacaggaccatcagggtgggtagggacagtgagtgagtgatgggagacggggctgaggagcagcaggacacacatgtgtgtctgtggttagagagggagtgaggaggggcaggggaaggagtgatctaacagctctgaaaaaaaataccactttaatgtggtttagctgttcttgtcagcgattaggaggaaagctggatatggtatggaggataaatgacgagtctgcttatttctgcctctctgcaggcccgctaacatgatgccagcacttaaaatacttctgtcagcatattgccatagcaacaggaaaagaaacaggtgaagccgatcattgaggaggcttgcacttagtccttccacgtgggcttttaattcctgttgtgactcacccagggccatcctgacgcgttgctatggattcttgcgcccactcaccggctgtctctggggtcctgaagtcctggtcagcaggcccactggccttcattttcagttttatcagttttattgcagtttttgctggagaagcataacacttgctgttgagtgttttgctgtctcctagtgctttgctcctgaagtggatgtgtctttgggaactggcccattgtttactaatgataccatcattacacatacacaagttttagtctgtagaatccatgtagaaccaatagatcttctagaaatgacagtttctttgatatcccaccctctttctttctgcttccaatgaaaacttagagctacctgttttttttttttcttcttctttctttctctgctttgtgtttattttgattcagacatctcattatctacctgaagtcctggtatacttagcttgaatttgttattcctctttaatatttagattaaatgctagatctgaatggtaggtttacacttctgttggtggttaccatgaacaagaaagggagagggaagcctcagcctatttaattaagaccttgttgcacttaaaaacactatttaagatttcccagctacttgggagtttgaggcaatcacagaggagttaacactgggaaaacaaacaaaacagcaaagaaagtagtgtgagcggttgctgggattgaattggcatctttttcgcttcttatcttgagacctcacgtcttggctgcaggcatccaaacagatttcctccagagcctcatttgcaacattttcaataaagattggttagatgactttcctgtgccgaagtgttttatttctcgtctattaattcctctcacctctcagtagagcgtctttagaggaagaagctttcagtagggctgagcttgcaaactgatctgttgctctaggaggggaaagctgtccccactgtgtctgttgggcaattttcacagtggaatatgtattggttggcgggtttactctccagggcagtgggggcttagagggtgggaggaaatcttgctggcctactgctcttcctgttatctatgctacatgagcgacttctctcgatgcttggtgtctgggcttctaccacaggccttggtgaagctgtcagtcaggaccctggacatgtgacacaaagagagacctgagaaggcagtcatgtcccccacccagactccatccttgcagcaagtaattctttctgaggggtgaccacccagactccatccttgcagcaagtaattctttctgaggggtgattttggaaaaaaaaaagtgcaattatatttattcatttaattattttctgagtttactgccttcattgtccatctttatggagtcatttttgtaaatcatccacgttattctgctgtataattatttccacataccagaatcacttggacaatcagcatcattatttctacacatttacgcacaatttaagagggggaaaggcatagaacagaagggatttgatgggaagagagaagtactggtattttacaggattctcatctgaagctatgcaccttagtgtaaaaggaaccaggagcagacaagggtgttgtcagacaaagtggaccatggagaaagaatcaaagtcacagcagagccatcctaattcttctgaatatcaggctgcactggcctttaagtgggattttgaagttaagttctctctctctctctctctctctctctctctctctctctctctctctctccatccctccctccctccctcccttcctcccttcctcccttcatgtgtaggtatgctcaggtgcctgtgaaggccaaaggtcaatgccaactgtcttcctcagtgtcttccttaatttcttgccactttattattatgtgacagtttctcagggaagctggacttcacaggttcagccagagttgctggccagaaagtctcagccttcctcttttctctgcctcttcagtgctaggattatagctgcatgaggcttagcttggcttttctgagggggctggggttctcagccttgcacaggaagtgctggctgacagagtcatctcctcaacctctgttaccaaacatgagatttttgacaccagaaaacatggctaactttaaaaaataaaacaaaaacaaaacaaaaggaaacaaaacaaaacattgtttacttaatctgaggatctcagcgaatccctgttgagctggggttaatttgggaggttctccgtcagctgttcctaaacactgatgtggatgcttgtaaatagattgctctggcatctttctcagtgaaacacagacacatgatactgcccactgttccaaatgttttctctgcatgtttggagagaagcattcattagcccgtgtcctttaacctgtttgtcagttcttcaactctgggtactgtgggaagaagttttattctttcattcaaccccttaaaaatttatcataatttaaccatttatcattatatgtattgatggtatacacagtgttgttatgaaatagggttcagcttcatttgattttggtactttgaatggatgctataactgtaaatgctgccacaggatggtatttatatccaaataaaaacagtggatcattggctatgctaggtaattaaggaaaacaacattaaaaaatcctttccctcagttccatgaaaatgctttattttgaaattggcgggtaagtttctatttttgctagtgtccactagtcttgaagacttgaagactttacatccaaacatctttttttccagtctgtgtacacatgtgtgcagtgtatacatgtctgtaactgggggtggcataagtcttctgaaacctcaaagctcagccccagtgccaaaccccctccaccatggccacacctcctaattcccaaacaatcccagcaggtgaggaccaagtactccgatttatgagcctataggaggtggtagggaaattcccattcaaaacaccacaacttccctttttattccctggaaagttaaaaatagattttttctgcttgcctgtggtgacacatgcctttgatctgcactcaggaggcaaaggcaggcagatctctgagtttgagaccagcctggtctatagagtgagttgcaggacagccaagactacaaaaaggaaactctgtcttgtaaaaacagtacacacacacacacacacacacacacacacacacacacacacatgcacgcatgcacatgcacacaaacatttgacagtttcttttaagttatccaatgtgttggcatacccttttctagatgagctatcagcaattaatggctgcagaaatagggagaaccagtctaacacacagtcatcagccctcaagagcaacactaaatggtcttggtgtctcagaagggcgggtatgtatgtgtggtgtgtgtgtgtgtgtgtgtgtgtgtgtaataataataattaaagatgaggccatgaattcagagaaggagttggcagaaggacagaaaggggtaaatgataaaaatccagtattcatttaaaattctctaaaaaatcgagatgagaagaatgggggcattgtaactcaaatataatgccatttggcgggacaggactgaagctgggagggggattaaagagtgtcttttgtggagttattaggaactaatttttatgatctggctctttggggtgttttcattaagtggggttttatgggcagtgtcattctaacgccagggtgggctcccttggagtggccagggatgaggtgggagccctgcactatgccacagggagactcagcacagaaaccagctgtatacacacagcattggagtctctggtgaagcttccaagaagaaggacaatgaaccatagagaattagcatcagtaatttgggggctacacacctcacccctctttcttccacatcttcatttgatcctcttgtttctgcaccccaaccatacataattaaatattttatttccacccttcccaggcagattcatcccttcctactcttctctcactttatccctagcctctatcattagatacagtttagcttgcttattgaagatttagcatccacatataagcacattacacaccatatttgtctttctgggtctgggttacttcactcaggatgagttttccttgctctgtccatttacctgtgaattctgagatttcactttttaacagacgagtaatactctattgtgtacatgtaccacatattctttatctactcatccattgatgggcatttagtctgtttctaatttctggctacttaagaatagagcagcaatgaccatggttgaacaagtgtctctgtagtaggatgaagcatcttttgagtatgctcaagagtggtatagctggaccttgaggtagatctgttcccagtgtcctgaggaactgctacactgatttccatagaggctgtacaagttggcacccctaccagcagtggacgaatgctttctttcctctgcatcctctccagcatgaactgtcatttgttttattgatcttggctatttagaccagtgtcagataaaatctcaaagtagttctgatttgcatttccctgatgactaaggatgttgaacatttctttaagcattcctcagccatttgtgtttcctctttgagaattctctattaagatccatatactattctttaattatgttgtttgttctctttatgtcaaggttcttgaattctttatatacattagatattagccctctataattgctaagaatatttccccattttacagcttactattttgtctgaatgatggtttcctttgctttcagtttcacaaggtttgatttattaattgttgttcttagtgcctgtgttgttggtcttctgttcagaaagtgtgaataaattcaagactgtttcctactttctattctattagattcagtgcatcttgtcttatgttgaggcctttgatataagtggagctgagttttgtgcacagtgtaagtatggatctgtttggattcttctacaggtagccatctagtttgaacaataccatttgctgaagatgctgtctttttttcccccagtttatgtttctgactactttattaaaaatcaggtgtacataggtgtgtggacttatgactgggacttcaattcaattccattgaccaacatgttggtttgggaccaatatcatggtacttctattactatggtactactattattgctgctgctgctgctgctgctactactactactactactaaatagtagtagtgtaatatagtttgagattggggtggtggtgcctccagaattttcttttactatttagaaatatttgagctatcctggatttttgtatgcttccacattaattaagctgaaaattgttctttcagtttctgtgaagaattatgttgggattttgctgggggttgcattaaatctgtaggctgcttttggtaggtgtattagtcagggttccctggaatcacagaaccaatgaaatgtctccctctattaaggggatttattgtaatgacttacagtctggaatctgactaacccaataatgggcagctgtgaatgggaagtctgagaatcttgtagtggctcagtcccatgagactagttgtttcagctggccttctgtataaactggaatcttgaagaagtaggttccaacagatgtgctgacaagtaattacaagcaagggaagaagagtgagcctttcttcttccaatgtcctcatgtaggcctccagcagaaggtgtgacccagattaaaggtgtgtactacagcgcctggatctggagtttgcttcgtcccagtctgtccttgaactcagagatctgcttgccttagtttcctgggattaaaggcatgtactacttttcatagccactattcctcaatatctccatgtcaagatctgggtcaaaagtcttatttaatttcattcttcaaagacttaaagttttgttatacaagtccttgatttgattgactagagttaccccaagatattctattttatttgatttgaggctattgtgaaaggtgctgttcccctgatgtctttcccattctgacatttatcatataggaaggtggctgatttttatgaattagcaattgaatttttatttgtctaaatctcatgtcttgctcttaagtgttcagtgcccaccagaaaggggatttagctaggaactgaatagtagttcttgtttattttctgttttcttgtttagatgctgagttttatgatgcctagactcgaacttgcgattttattaaatattcctatttttgttacctcattttcttcctaacaaaactgtatggtgcctttggttgtcactgagctcaaccttctaatctttacttcaactacttggtgttctttaaaataacttcccacccctgtgtctttgacatggccttgctccatggtcattcatctccaatgtccagatcaaaggccaccttcccaaaaacttctcaagcatttggtcaatcagagtaaataaatgaattcctaaggcccttagaagaggtcactccctttctcaagagccctaagaatgaactatatgaaattcaccaaccccttcagaacatagggtagacattagcttctaaacccttcagggcagggacaaccagcgaatccctcaattccccctaagtggtcactttcttctcactggctttcaggctgtaggaaatctctatcaaccgaaatatcaacgtttgttttgtagatggataaaaaaagttaaatagttcagcaatttccaacttgcctggcttggtagtttctgaagaatctggaaacaaataatttgcatactgtagacctacctcctggaaggtacagttcctgaaatccaaatggaaatcaactctagctttattaacagctgaggtatgtcccaggtgtcttttaggagaatacctttttctttcttccccaaagacctttcagttcttctatctaccatgaatctcatcttggagatgactcttattttttcctagcagacagtattagggatacagtcaggagttgagtgacctataaaagtctaaggtactcttcagtctcacttcattttattgcttctttcgaggttcctgacagcataaatatacaaggtcatctcccatgatctcagaaagcatcttattatttaacaaacacttgtatagtggttactatgggtgaggctctgctgtaaacattcaacagatatgagctatttcaccctgatgcatgctcaaaaccctatctctggcctaaactggccatgaccatgagctacacggtcatagagatagcaagtcacaccttgttttataccatttggtggacttgatattttgtctcttttatctactgtaaaagccataccttggagtggtcatctcagtagatcctgtaacactccctgttcacttaatctggagacaaaaaccatgcataacatctgtatgctgaactctctccatctgtaaaatgcatcctgaagggattaccttaaaaatagattagattttacatgcaaatcatggagtctggggaccaatgtctttcacaattagtggctataatgacaatgatgaaaacagaacaacaccaacaacaataacaacaacccccaaacccaaaaccatgttgcccaagtgaattatctgtggacttgtgggatcagcgaatgagcagaagactgtctacaatggtcttggtatatgtgattccatgacctcagatctgctagctattgaagtgtggaggggaatgctgttgaaccagaggtcctacgagaagagtcttagagactgtccagacagaaggcttagccggggtgcatttgtgtctctggttgtttttcttctctacagagaccttttgttttctaacagtcctattagataatcaggcaatgagtctattagacaatagccatatggtggttttgaatgagtgagtttattaagtagacagataaataggtacgtagattaagtgatgctctaaatatccagcagaaattgacagaggaagtcgtagacagacagtcagctagatttcttgatagagagaaggatccttggcaaagcagttttcccctgagaattccaaccaaaagaatagctaacagcagaaagctaaccaaagacatggagggttacaaatgcacagcagaaactaactgggggaacactgtgaagatagccaggtagagttcccagctacgagagtctcgaacagagcaggtgtacccgtggatgaggcttccaaatacagcagaaatagcagcagaaagaacttacatcatcaaatggggtgctcacagtatgaaacagaaactgacatgggaagttgaaaaagtcatctggggtttctgattaagctttttctcctaatggatgacttctccatggctgaacttctgacctctctttccctccacaggcattgttatagcgggggataaatagtggtaccctctgttggaagtggtgtttaccttctagctgttctcaagggcacagtgtctttactcttgtggtaatttgttgttctcttccctggcagagttagcagtaggcagcccatcccaagacaagggttcttagggaacacagtgacacgagcatacttaggtctgaaatggggaaggaaccaacctcacttctaaatccagcttctcggtgaactcaatcaataacatgaaaacttatcactcttggtagtttggatgaaaatgggccctataggtccaggaagtggcactattaggagatgtggtcttgttggaggatcctctcccagactcctcaaccaatatttcatcagtaaattgttggaccctacaattctttcactggtccatgactgattattgacaggaactgtcttctgaaggcccagtatccgtggcactgtaagctcatgattacagtgcctatgctgttctcagaggctgacatgtctcagcccctctacttgtcttccagcttttatattcgtctccttctcttctttgcaatgttccctgaatctcagagggtgtggtagagatgccttgtttagggctgaaccctcatctgccgttcatcttggcatcttgggcaactatgtatctctccattcattgcaaatagagacttctctgaggctgggagtctcttctttttatgggtagaagaggacattaagatggcaattcaattctttttcagtttagctaaacagcagtaagaagttccatgttgggcctttgacctgtccagacaggggttattaactggtttacagtacaggcatggattctaccttgtggaacagttcttagtacaaacaaagagcatttggttgtccctataacagctatacaagtgttgctcaggggggcacatcttgcctagcccattggcttcatagtttataaggttcacagctagataagaccactgatgcttcttgaccccctagaaatgtgcatagctcctcccagcactttaaagaattggagtaaaactctacaggccagttccaaattgttttctcagagatgtgtgatgtcttcagccatagagtcatattcttttgtttgggtgtgtattcaggaagactgattagtctgtattgtttgagggaccttcctgaccacaattcctacagaaggcatctcatatctggcattctggcactgggagttttgtttagtgacccattacttctaagagtagcattatttagtcatgtaggctatgccacttcaatctctctcttatatacgttaactgggtcataagccagtggatttccatatgacttttcacacacccttcattttggttaatgcacatccctttgtctcttcagtccccttgcctcccatttaatctttttatgcccaatatcatccctctctggctacctaggacagtagccatcccttcctcatctgcagggggaagaaaacatttcaaacctgtttctttgttggaaatgaagatggactggaatcttgattaagggcctattgtgtttcctggaaaaagacatgaagaggctggagtccacgatgacacagacaagcctgaaaggcatgcagtctttggtgttggcatgtcactttagactcattctttctctgaggtctgggactcttggttgtccttgcacttgtgcaggcttcctgacctctggtccagaaggcatgaaattgttgggggattcagacaccaaggagccttcccaagccttctccctaacctacaagttaacaacctgagtaatgcattaagttccacaggtgatattatcttttcaccatatacctcagttgtaagctgattttgttgaggagtgtggatttagatcttataggtctcagagaagtatatgctaaggtttcctgtgacagcatcgatggttgtgatatggggataaattttactcgtgtagttcttgggggaactgggttttcattgactctagatgatgcttggagagctattgccaatatttaataaggatacataggattcaggtctcaaagccacacttaggacttgagtttgcaggctcttgttgggagccaaggaaagtccctggcataagctttaagggcaagattctgtatctgctttctcagagtcagtgatggggatttggatgcatgtactgggctgtacagtactctgggtccctgtgtctttaatagcatgttggaaatttgtatct

SEQ ID NO: 1373 - DNA, 2578 bp, Mus musculus
taaacggtggttccacgggaggaaagcacgcccagtcacattaaagaagccaaactgtctgcttcaaagagaaaaggcaacatcctgtcacaagccatgctctggcaaaaatccacagctccagagcaagctcctgccccaccaaggccataccagggtgttcgagtcaaggagccagtgaaggagctactgagaagaaagcgtggccataccagcgttggggcagctgggccaccgaccgcggtggtactgccccaccagcccctggccacctacagcactgtgggtccttcctgccttgacatggaggtttctgcttccacagtgacagaggagggaacattatgtgctggctggctctcccaacctgccccggccactcttcagccattggctccatggacaccctacacggagtatgtgtcccatgaagctgtcagctgcccctactccactgacatgtacgtgcagcctgtgtgccccagctacacagtggtgggaccctcctcggtgttgacctatgcttctccaccactcatcactaatgtcacgccaagaagcactgctacacccgcggtggggccccagctggagggtcccgagcaccaggcgcccctcacttatttcccgtggcctcagcccctttccacactgcccacctccagcctgcagtatcaacctcctgccccaaccctgtctgggccccagtttgtccagctccccatctctatcccagagccagtccttcaggacatggatgaccccagaagggccatcagctccctgaccattgacaagctgcttctggaggaagaggaaagcaacacgtacgagctcaaccacaccctctccgtggagggcttttagggctggcttgcatctaacagatgtttcacccatagctgagattttaaaagtgttcaatagagcccagacttctgtttgaagtagctatttcacaggcttcctttcttcctaaagctaaattgtatcccttctttctcccttcttccttccctcgcttccttccttcccccactgccatcttgcttatttcttatttctccttccagttttcttcctctggagcggcaaatgatagtgatattatgaacaacgctttatacggaatgtcaccaagtctgcagctcagggttttcctttggtggcacatcattggggaagcaaccttctttcaggtgccccctgtttcctggtagcagtagctttatagatctactctatgatacgttctgcgccccagttttgttttgtgtgctgttctcagccttggccagatatactatctaagtggatgtttctggtctggttacagggggatgggacaggaccatcagggtgggtagggacagtgagtgagtgatgggagacggggctgaggagcagcaggacacacatgtgtgtctgtggttagagagggagtgaggaggggcaggggaaggagtgatctaacagctctgaaaaaaaataccactttaatgtggtttagctgttcttgtcagcgattaggaggaaagctggatatggtatggaggataaatgacgagtctgcttatttctgcctctctgcaggcccgctaacatgatgccagcacttaaaatacttctgtcagcatattgccatagcaacaggaaaagaaacaggtgaagccgatcattgaggaggcttgcacttagtccttccacgtgggcttttaattcctgttgtgactcacccagggccatcctgacgcgttgctatggattcttgcgcccactcaccggctgtctctggggtcctgaagtcctggtcagcaggcccactggcttcattttcagttttatcagttttattgcagtttttgctggagaagcataacacttgctgttgagtgttttgctgtctcctagtgctttgctcctgaagtggatgtgtctttgggaactggcccattgtttactaatgataccatcattacacatacacaagttttagtctgtagaatccatgtagaaccaatagatcttctagaaatgacagtttctttgatatcccaccctctttctttctgcttccaatgaaaacttagagctacctgttttttttttcttcttcttcttctttctttctctgctttctctttattttgattcagacatctcattatctacctgaagtcctggtatacttagcttgaatttgttattcctctttaatatttagattaaatgctagactgaatggtaggtttacgacttctgttggtggttaccatgaacaagaaagggagagggagcctcagcctatttaattaagaccttgttgcactaaaacactatttaagatttcccagctacttggagtttgaggcaatcacagaggagttaacactgggaaaacaaacaaaacagcaaagaaagtagtgtgagcggttgctgggattgaattggcatctttttcgcttcttatcttgagacctcacgtcttggctgcaggcatccaaacagatttcctccagagcctcatttgcaacattttcaataaagattggttagatgaaaaaaaaaaaaaaaaaaa

SEQ ID NO: 1374 - DNA, 771 bp, Mus musculus
atgctctggcaaaaatccacagctccagagcaagctcctgccccaccaaggccataccagggtgttcgagtcaaggagccagtgaaggagctactgagaagaaagcgtggccataccagcgttggggcagctgggccaccgaccgcggtggtactgccccaccagcccctggccacctacagcactgtgggtccttcctgccttgacatggaggtttctgcttccacagtgacagaggagggaacattatgtgctggctggctctcccaacctgccccggccactcttcagccattggctccatggacaccctacacggagtatgtgtcccatgaagctgtcagctgcccctactccactgacatgtacgtgcagcctgtgtgccccagctacacagtggtgggaccctcctcggtgttgacctatgcttctccaccactcatcactaatgtcacgccaagaagcactgctacacccgcggtggggccccagctggagggtcccgagcaccaggcgcccctcacttatttcccgtggcctcagcccctttccacactgcccacctccagcctgcagtatcaacctcctgccccaaccctgtctgggccccagtttgtccagctccccatctctatcccagagccagtccttcaggacatggatgaccccagaagggccatcagctccctgaccattgacaagctgcttctggaggaagaggaaagcaacacgtacgagctcaaccacaccctctccgtggagggcttttag

SEQ ID NO: 1375 - DNA, 47443 bp, Homo sapiens
cacagatagtgatagcaacactgggttcaagtcaaaatctgtcacattcattattaatgaaaaagtagtaataacagaactagctaccatttatagagtcttttctatattctgggcattgtgcactttggtggaccacggatcatggatacccaggtattgactgaatgtcagactttgtctctgggttcactgaggccaggcttagcttactttattcattagtctcactctagtgttactatggccaacaaatgcctcaggtagagttaatccttaattgaattgactgctctatctttggaagcagatttctttttttcttttggaccttcaaggtgtctaaaattttgagttgtcattatctctttctcactctttcctcttttttcttcctacactgacatttctatttatatctcgttttcattttctctgtctcttcattcattcatttattcaagttactttcccaccaaattacagaagtggtagttgaaaaacagcagtgcagctgccagccctatagctccacccatgaccgaaagttgcccaggagcatggcatgcatgcaaatagacttgccttcgcatgttggatccttttcctttttataggaaactacacctttgattcataaggaaatggactttggctttattgtaattcctattttcatggtgttttggcacaaatcatgaaatacacctggtgaaactcctgagtcactggagggcttaaagtttcaggaagaggaagaggaggaggttcctgtgtggcatcttcagaaagaaggatgattggcaagtattacctccatcactggacaaactcctttcactttactcctttgagcctttagctcaaggggaacagggcattggtcagtaattgatcaaaccaccagcatccccgatatatgaattctggggggctctggccccttgtgggcttttaaatgctgcacagagaagaagtgaggctgagagctttgagtcctggacaggcagagtgtgtgccaggtcatagggtcactggatcactattccttgggagaaccacaggaatgcgattgtttctgggtgtggggcgtgcgtgaagccaagatccctcctgtttgtgggaaatgatggttatgtgtttagctagacaaaggatgttccatgctacacttaagctggaggcttttgtttttcttggtaatcagggcattctaggggcattccaatgaagaaaacttgaaaggggatagatagaaaaggagatcatgagaaaaaaggaaggactagtgtttggttgtctagggttgtgcttccaaaatcccaaagcaatgtcacatgaaattaaaaaaaaaaaaacacacacctccaaaccaaccaaccaaccaaccaaccaaccaaccaaccaactgagtcatggccactccagatctactgagtcaggttctctacaagtggggcccaaagaatatctctttatagtaagtatcccatgtaatttagatggaaattctctaggaattcttgtgggactttcagttataagaaaaatatatcaggtttttcataccagcaataacttgcttgagcatagggactttcttaccttgttatccctaacattatttccagcacaaagtttgtgctcaataagtatttttagaagtatcatggaaaatatttcttaaaggtggccactgactgtgtgggaagtggggaaaaataatgttggtaatatggaggcaaaactgtcaaataaagcccattgttcagtgtgtggtgctcagtaatggcaaagaagaaaaaaaaaaggtctctgtgccttggacagaccacatggtgagtagaatagcccagaaacatattctttttgcaaagactatttttcccccaagctccatgacataatagcaccaaaagtaataactatcaggctttcttgattatcttccaagatcatttatggcagtctcaggccatagataataattaaagctacctggtccttggttttctcatctgcaaaatggggcatggacacttgccagctgcctgtattaatgcaagtttgtcagagtggctagaggccatctgtctagtaccagaaggagttcagaaatggtcataaagagagttgggcaccttccagcctgctgtggaggccaggctgtcacacacagtaaagccctggcttctgaacactggcactcgtccaggcgccacttgggttgatgcaatctctatttgatcacatgaatatgatttccttttcattgtgcctagtcacaatgtctaattattgaaggcacaataaaactaaaattccaatgattaggcctcttcctagataagaacctgccatccagctgtcaaccatatttgcagatgatgtctgggaacttgagaagatgagaggtggtttgaatcttactgcttcttcagataagggtagcagggcatgatcttttcttggaaaactagaaattggtaaagtttgaagggctcactagtgtgcatgaattttgagagcaaagatatgaaagagaattcagtgatatattctcttgatctgaatggtacaataaaattagcgtatgtagaaaactctatactagcctatcaatgcaacagttactattattatttcaacttggaagaggaggaaattaaagctaggagagtttaaacaatgtgaccaaggccacactgctagcactgcagccagattccaaaccaggctctctgactctaaattacataatctcttcactatatcctgctgcctaacccagagggaaattatgcataagaatgaaatgatatacatgtgccagagaaatgagaaatgggcttagctggctcactatgtaaagaatatgtgggaaattgcctgaaggcaacaatgggcttcggtattttacctgtggattaccctttttacctcggagcccattactgtcctaactggacctaaagcaacttatcttttatatatttaaaatttgatatcatagtatttctctataataaacagtggttcttaaccttgagactctcatgaacgctatgaactgtcttccaaggaaaatatgtatatacacacaggattcatggccctcctttaaaatcaccctggtcctctcttctgctcccatctgtagggtcaagaaatcctctataggtctgactttacaaactgccctgaatttctggaccatagaaaatcttcatagtttagaggttgttgagcctctaggccatcaatttttctatgcactagtccatgtctgagttgatgacaaatcatttattgaaaggtcgtatgaattttctttctatctaacaccgggtgtctagctatatgatactaaacatttctgtttttttcattgttatagccctaaagcctggaatagaacttggcacaattacatgatgtaagttatatgttttattttttgtgtcctatatacaaaaaattatgtgtaaaattgtgtgtaaaaaatgtttggaaattaattatgaaaatgcaataggacaacttgttctttgttgctcaggctggaatgcagtggcacgattacagctcaccttgacctcctgggctccagcaatcctccaacctccaccttcaagtagctgggactacaggcacatgccaccatgcctggctaatttttaaatttttttgtggaaatggggtctcactatgttgtctaggctggtcttgaacttttgggctcaagcgatcctcccaccttggcctcccaaagtgctgggattgcaggtgtaagccaatacactgggccagcaactcgttcttaaagggaatttgtttacaatttccctattatgtataacatcactctagatttttggcatataaactttatcaagttaaggaagtttccttctagtcctaagtttctaagagttatttttcttaaattacaaatagatgttggactttatcaaatgtttagatatttgattgagatactttaataatttttctcctaaagtttatcaatgtggtgaattatattgataggttttctaagaataaaccatccttgcattcctgggataaatcttacatattataatatattattattatatcatgatgtattagtccttaatatactattgaattcagcaagcaaatattttgttcaggatttttgaatcgatgttcacaaattagatggcctataattttcttttcttatattgaccttatttagttttagaatcaagtttacatgattggctctttaaagtaatttaaattaaatgcagaaatctgtcttttaattggtgagtttaatcttcttaaattcattatcattactgagctagttgaacctatcctgccaacttattcctgttttccattcattgtaatttttaaatacatccttcctgtttttcacagaaagattcagtttctctcagaatgctcaaaagttaaatgtttaaaatttaaaagctaaactttgaaacattaaaagttaaacagaatgtttaacacatcatttatgaaaaagttaaacagaatgtttaaaagtttaacttttgttttattttttgttataaaaaaatttttttttgtaataagaacaaaagtggcagttgcctcctacttcagatccacttttatgtttatttgtccttcagatccacttttatgtttatttgtccctattgatttcttaaatttattgatagctatattttctccttagaaaacgaaagcattagtgcattttgatttctctttgatctccttaagggccacattttggaaaattaaatataatataaatggtgttctctggacttgtgtaatcatgttattttaaagatattttgttttgtgttgttatggatgaattttctccttttcccagctttaagaaaattcctataataaactttacccagtatttgattaccttttgctctcatagttcttgcaacatcctcctgagtcactcttttcatttgaatgctttctctaagagcaattttaatgggagtcttgtaggtctgaagacatcttcattagctacaatatttgaatgacaatttggctagatttaaaattataggttcagtgttcattttcttaaatactttaaaaatatttcttcattatccgcttgcatctagttttgctgtggaaaagtatactgtcattttgattcttgttccttagctataaatatattctttttcttagtaagcttttagaatgtcctgtttgtattagttgttttaaagtttcattataacgtatccaagtgtttgttttaccttatctctattgttgtccatgaggcctttcaaagatttttcatcttttttttttaattttaggaatttgtcatttctgtaagacaaggacagggcaagaataaccactattagcattattacttgtcatagtactggccaacaccataggaaaggaaaaaaacaagagatggaagaatcggaagggaaaaaataaaactgccgttactttcagaagagattgtcttctacctagaaagactatgataaccaacaaactattagaataaataaaacagttcagcaaggtttctagaaataagataaactctcaaatattagaatttttctatagcatcactaaccaactagaaaattatataaaaaacaagatgccattcacaatatcaacagaaactataacataattgagaattagcttatttaagaatatactgtacttctgcggagaaaatttaaaaactgtaataataaaaaacatggaatatgatctgaagagatggagagctgtcccatgctcagctggaccaaattaattttataatgatattactcttgcttgaagtaatctacaaattcaatgaaaaccaataaaaatttcagtgtttttttttgggggggtgctggggagtctctctctgtcacccaggctggagtgcagtggtgcgatctcggctcactgcaacctccatctcctgagttcaagctattctcccacctcagccttctatgtagctgggattacaggtgcccaccatcatgcccagctgatttttgtatttttagtggagacagggtttcgccatgttggccaggctggtctcaaactcctgacctcaggtgatccatctgcctcggcctcccaaagtgctagaattacaggcatgagccaccatgctggctggaattttttgaggaacttgatagacttatctgaaaaatttaagctgtactataataaataacaataaaaactaaggtacaagaacaacgagaccagtaaaataaaataggtccatgtacctaaagtatgtatttctattcaaaaaaagcacactatgaataaagttagcagatgacaagagtgaagaaatttgtgttgagtaaaactgaaaatatctagaattgtacatctagaacacagatgtgcaaagaatttctgctgatcaacaagaaaaagggcaatcctggtacagaaattggcaaaggaatgaacagacattttaaactggcaagaacaaatactacacttgatcttagccaaaaggccaagaggtgattgaagaggtattttggagaagagaaactccatagggttaacatgcatatgaagacatgcttccatttattagtattataatgtaaaataaaccactacactatcactacactattacactaaaacacacacacacacacacacacacacactacactgttgctatcactacatgtaccacactggcaacatttagaccttggataatgtcaggtttggtggtaaagtggaaatatgagaagctggtggaaaaatgaactgctggtggaagtcttggacagattagtattcagtcagattaaatatacacctattctttggcccagtaattccacctctgggcatataacctcaatgaaattttcacatgcctctgaaaaaagatgcatataagaatgttcatcaatgctttgtttgtggaagaggaagttggagacaatctgcttaagtgaaatgcagcgctcacacaccatagaatactttgcaggtgttaaaagtggtgcacagaatgtctacatcaatgtggatagatcttacaacactgtgctgaattaaaaaataagaaacagcgtgaaatgtgtaatataacatcacctacataaattaaaaatctatacatgccaaacaatacagatcttataagaacaggcacaaatgtctacaaataaaagcttcagcatcaaccactgaaaagagttgccctgattggaatggtgggtgggtgatgggggtatgaggggacaggaaaaagaatagacatggaaaatgagggggaaagtagatgaatgaataaataaattactgagcaaaataagataggggcttttcataaatcaaaaatgatgagaatgaagatgattaaaggctaaatgaaaagaaaagattaagacttggcagaggtaatgacatgtaataagcactctgtaaatatttattaaatgatggaagaaatgaagtcgatggtgaatctttttgcaaagctaaaatttatttcacaatatgaatcagtgcgctttaataaattattttagaagttttgatgtttgtatatcagattctttaaaaatgtgagcacacctgtatttggagtcatctggaccatgttcacagattttttcttcttttcttccacttcttgagacattgcataaacatagtcgcctcttttgaactatgccatgcagtttgacttttgattctaagtcacagaaaatgttttcctggaaaatatttgctgtttcgatcaagtcttgattccaaagcatctgcctgtatgtggtcactgatatgcagggtatttgctggaagaaatgagctggaatctgcctcatgagctgtgaggccataagaggtgatgggtttatcgctggccatgatggtgggcttgcccactgacattttgtttttctgccactgtacaagatctgatttgtcagagtagctctgggtctcaccttttccttccctctttccagaggacagaaatttattccgggggatatagcttctgttgatctgcttcaggttttaataataatgatcctatattactactaacaaacatggctgacacttggcatttactgctttcaacttaataaatatcttttattttaatgatttagagctctggctctagtcagatgaacttgggtctggcaccagcctataacctgatagcttggtgacattggacagatgaaattccctaagcatttgtttgtttctctgaacaatacaggtagacgtttccttgcagcgttgttgtggtgactagattaggtaatgtatttaaggcttaacatggagcctcttgcacagtaagtggttatattattactttgtggaaatcatcatgctaggcctgtggggagaaactgagatgaataagaaaaagttctgaatttcacggacttggagagaataagacatgaccaaaagagacaaaagacagacccgtgggagagaggaccagcgaggccacatatcctcctacgaacctgtgagacactcacagaactggttcttcattttatagatgaggaaactgaggctagaagagttatgtgacttgttgaaggggacacagtgagtgagtgtcagagccttcatgggaacccacgtctcctgtgactgaggcaggcctgagggatgtgcctctgtttctcatggaaactccttggcgcagcccaaggccttgagatgctgccccctgccaggccagggtgtgggctgccagccaccacagcatgggggcctccactgtcctgaacttcagaggctttgcggggagggcttataggcagccaggagacagccttctctggcttttaagtgaatcattgataaaatgttgacagcatttctcctcaagacctgccctcaaatcagcaaccgattagagacagtaattcataactttatcagatgaatttttattgggggtcactatgctccaggtcttgtgtggggcactggagaggcaaagatgaaacctccttgagaaactgtcagagtcatgtgacaattcaccatcacataatgaacaaagtgctctaagatctgagaagacgaacaagtattctctgggctgggggtttgtccttccggcaagagaggacggcaaggtcaaaggcagggaattgcatgggtgtttggtggtgcttagagggcactgggaccagtggtaggagggcagttggtggtgaggctggaaaggaaggcaacggctcgattgtgggaggccttctaggcctccagctctgtggctgaagggagaaggtgaatgctttgtaggctaggggatagcatgatcaggtctaggtggtgcaagatggctctgaggcagtatggacggcagagcagcaaggccccacacctgctctagggggtgtgccaaggggtcttgaccccaaactgactgagtccctggagcctgagcatgtggacctcagatatgcagtggcagaaggcttccaaactgtgaaggaaccggtagccaacaccatctacacttccagatggtgagcccatgacttacttaaagaagcttcctgttatcagtgggtgggcactcgcaaagaggctctgttcatcttgtgcctacaagcccagatccagtcaaagagcacgggcatgttctccttccttccttgagggttggcctctttctccgtgggcatagccgacatcagagccagcgcccccatatttcagcatgattaagccttgccattttgggggtggctgggggcgaggggaggggctactgtgtttcaaaatggaataaacagaaaagcaatattaaaagaatgaggaggttgtttactgaggcttgaagagatgacaggtgtttcctcccagttgagaaccagtgacccctgggaatcgcatttcccgctgagcaggcgcccatggcgggctgagtcctgcccatgccctggtggcctggaagcctgcatgggcgccgtgcaaagatcaacgttttccagaggagcttttgggctcatcactggcctggggagggcttgacacggggttcccacagcttgccccacaccaccttcacacccacacacagcaggtccccgcggggccggtgcaggccgtggctgcccgcgctgcgctgttgctctgtcccagctggctagctccgagtgtggagcgctctgggccggggccgctggggcgcgcacagtggggtgacaggcggcctggctgcagaaacgttgcaccggtgcctgaggtgggaggatgtgatgacgcggcccacgcagcgggaacccaggcctttaaaaagcccaggaaacagcctcagctcaagcggtggctccactggaggaaaacacaccccggtctcacattaaagaagccaaactgtcggcttcaaagagaaaaggcaacatcctgtcacaggccatgctctggcaaaaacgtaagtggtttggctgtggctgtcagacccaagcgagtgccagcggggcagggcgatcacagcttggcctggaattggggagctggtggtggaggtgatggcgccacggggggagggggtctgggttccaagccccggagcagggagcggggaggtgggcgggatggagcctggtggagaaaccagcctgtcagaggtgatgctgattttccaggctggaggggaacgaactagtgttccaaggtgggacggctcagggtacctccgcttctgtgtatgaatcactgtggtgaagaaagggcagtttatgattcacacaacaaaagccagatgtgggatgggtttggggttgggagggaaaagccatgcagttctttacaggaggggctttatttccataagcagtggctcttcagccttctgttgaataccctgggcctgtttctagctgagtgacttagctttctgccagggtgtgacttgttcctgtggataccctgggaggagtggagatctggcttggtgaagcgtgtcctcacttgctccactgtcttgcctttcgtcattctttttccccttctgtgacaaggcttgtccatcccactgcaaaggatgcagtgggtttatctttggccttgatttttatccccggagttggatggaacaattgtgaactttattttcctttatgtggaccaaacagcgacttaccttactaataactgaaataatacagattatttacaacattcttttcacgaggtaaacagcgtcaactcatcagcttctgagagttgaaccttattggggctagttctatacttcctcaagcaagaagaatgaccaaaaattgctctgtctttctcttaaagattcttggttccttaaaattccttttaattaatttaagtatgctgtgcctcaagcaagcttaatataagagaatctagatttacagaagaagatatattagggaatgtttttattttatggaaagatacttgattggatccactaaagttcggaaaatataacttcattgattaaaatgtgacactgtcatcaccaatttattgtttgctttatgtcttatgtaaatttctctggaattaagctgattaaccagtaacacagaagagtgatttcaaaatttctcaggttgtgaagacccaccattgtttgatatcaaaaggtcaattttttaaaaaaataaagagaaatgagctttaatttgggtttgagagttacggactccttccaagataactaggaatattcaagaattgttggcacgccactcttcccaacaggcgatggagcagcggcagcctatcctttctgggacaatggcagctgaccctgttgtgagtgctctgtggatgagagcaggtgggcattcatctttttactgggggcccctaagcatctgtgtgccctttcactcagggctgaatcatttgatttttgtgtgagcccctggaaggagttttgcctcagctcctaccttctatgagcaagccactttcctttttctcaatccttaggttttttgtatgttaagtgggggtaaaaatcatatccacactgaggatctatccttagtaagtgaggtgccaccgaagtcatgttcattgctctgtctgcatcagcctctgagatatgagttgcttccctgcattcaccatctgccatattctcccctcttggttctgtagtacattttttcatttctaattccttctaagagatgaacagactttttttgtttgtttgtttgttttttgagacagagtgttgctctgttgcccaggctggagtgcagtggcgcgatctcggctcactgcaacctctgcctcctgggttcaagtgattctctcgcctcaccctccctagtagctgggactacaggtgcccgccaccacacccagctgttttttttttttgtatttttagtagagatggtgttttactatgttgttcagcctggtctcgaactcctggactcaagtgatccacccgctttgacctcccaaacaggtgtgagtcactgcacctgtcccccaaattttttaaaggggatgctggagggcatgcttcctgctcacaccctggagaccagtcagatagatcaaaactccattgtaagggagaccacattgtaagctcatcaatggaataactggggtgaatgtttccacatgttcagatgaacacaaatcaaaattatcttgaattgtcctttaagccttaaaggaaaagtaggagagaccctgggctctggacccacccccttagcctgaacccaagtatgtggtatagagggcacctgggtgactaaaccgtgtgggaaaatcagtaaaaacagggcagcatgtcagcccacttagagtcacccgatggaagggcagggtttgaaatcagacaccaagagtgctgaaagggcactttcttttttcagaaaacaccctcgaggcatgagctgaaatgactgtactatggggttctggaaagggttaagaaaacattcactttgtgaatgttacctcctccctacctagcccatgaccctagtttgtggactaaatgtgaaccctggcttttggttaagattagagcataaagtgacaaagcccagaactgctggcacagagaagtagaaatcttcaagccccaaccaatggatttgagatttgcttgatgggccaattggatgaagaagtcactccatctgtagattctctccctgggttctggacttggacctgctggtcaggtgcacatgtgaagaattaccatccctccccagctagtaacagtgtagtggaaatagcaggaaccttggagggagacaggtctgaaagttgcctgtgcaacttagttctttctttgtgagaaggaaatttccattcatttccttatctgggaagtggggattctaatgtctgcctcccaaggtttttgtgagaattaaagtagagaatgtaggtaaaatgatagcaagtttcctgataagtagtggtaggggtgagttagtaccttccgtcctggaaacctcctgtgggcccatcttgaatgatcagtgttatgttaaattcatatattcttttccacactttgattagaatagttaaaaagccacagtctaaatattcttgggtgataggatattgcaaaattttccaagggtctaaaatagtggtctgcaaactatggcctctgtgccaaatcaggcctgccactccatttgtaaataaagttttattggaacacagctatgtctatcatttgaatattgtctagggctgcttttgcagagttgagtagttgtgacagagactgtgcagcatacaaagcctaaaatattttctctctggcttataatagaaaaacattgccaacctctggtctgagatgatttgcttggttcttcaggcattcatttccttaagatactcagtatcaggccgggtgcggtggcgggcgcctgtaatcccagcactttgggaggccaaggcgggcagatcacgaggtcaggagatcgagaccatcctggctaacatggtgaaaccccgtctctactaaaaatacaaaaaaattagctggggttgtggtggcaggcccctgtagtcccagctactcgggaggctgaggcaggagaatggcatgaacctgggaggcggagcttacagtgagccgagatcgtgccactgcactccagcctggggtacagagcgagactccgcctcaaaaaaaaaaaaaaaaaaaaaaaaaaagatactcagtatcctggggttgtacattgccaacaccaatgggaaataaaacttgcagccaattcattaaataatttgtacaatgccccaaactgatttgattgaatttcttccttaaaagtgatagaactgtgtataataaactgaactccatttgttagaaagtgaacaaattggacagttgctttttattgttgttgtttgtattagggaacaatctacatgctaatgaaaggcaggcttgactgattttctttggactggctgattgtcttggtgtcctgtggacttggccttggaacaggaaataattcgtatcagattattatgtcatggatatgcctttgctttcagacaacttgaacagagcagagatttagcaaacagaaaaattaaggacttaaaattctcatcaacatagaactctgctcttcagatgtactctagggttccactaaagagccaatattgtttgggaggcagttaaagataagtaaaatgtgtactatgcatataatttttggaagcctatctcctacataaatttaagcacaacttacaatgagaggtaatttaggtttctggacaacctctaatatttctattctatgttacaacctttgcttatttaataagcctagtgagcacctttacttcttaccaagttgattccattgattcagcagttctttttttgagatagagtcttgctctgtcacccaggctgcaatgtagtggtgcaagatcagctcactgcaacctctgcctccaacttcaagtgattctcctgcctcagcctcctgtgtagctgagattataggcacatgccacaatgcccagctaattttgcattttcattggagatggagtttcactatgttggccaggctggtctcgaactcctgacctcgagtgatccacctgccttgacctcccaaagtgctgggattacaggtgtgaaccaccacgcctggccaattaagcagttcttgctgttaagggcaagtagaatccaaaagagagacacaaattcacgtgcaccgtctggaggtgaaataaaggacaaacatcaaccaaatacacagatttaattggtaaaagagcagatgatgttcttgatggatattttacttcctgccccttatatttatttactaaagaaaatgccagatttgtccccaaagttactgactcagaagttttgaaagctctctcccaattcacacttgggattctgttctttcatgaggaaccaaaaaaaaaaaaaaaaaaaaaaaatcaagttttcctacagctgttcattaaatatgtggacatttaattcataaagaagtcttataaatatttgcttttaactttcccactacaaagtgttttttccccctttgacatctttctaaagtagtttatcttcccacttaatgaagatgtccacctatttcttattctgagccaaccaaaccaaagttggctaattgattatgaatattaacataattctcacctttatgaaatgcttaataacactctagttttctcatttttgtagaactgcttgacaactaagtgagcctacctgggatggggaggccttctctgaaaccctcttgtcccgcttgtgtgatactggggacaaagcacttgtaggcaggagccaggggttttactttccattctacagataattagatgagagaccttaagcaagccacctaaccactttgggtctcaaatgttctagtgctggaatggaacttgccttttcctggctaattttcctggagattgaacttgattgaggttctttgccagctctaattgctgagttttcctgagtgtttatacaaaaaataaattaaagtttaaaatcagaagtccttaatttaatagatgggattcttctatctgcttagggcagtgtttttataccttggctacacactggaatgctctgaggagatttaagaaacacagatgcctggatctcaacctagagcttctgattaaattgtcttgggcattgaaggagagctgcaaatggctcccaggtgagaaggctgagaactgctgacctggaggttgaaatggatggcttctaataaacctttgggcattgctaagagcagaagaatgctcaatccttttaacagtgataaacaaacatctctggggaatggagaacttatttggtgctatgcagtatacaaaatgttctgttggatcagtttggattacatttgattgctggtgaagagacctgaaataacgtagatttaagtaagacagtggtgtcctttctctcacataaaagaagtccacagtagggtgttcaggatcttatggagtctcacagtgccaacatcatcccaggctcctttttcctttctaatctgccatccttggcatgtggctcttgtcctcaagatttttttcatagttgccattgtaactccagccattacatctgtgagcatcacatcttcggacaagcaagaagaagaaaaaggaatagcaaaagatcatgcctcctgatcgctgccccttctccctcccaacacacaacttctgctgacatctgatgccatttctatctacaagggagaatagcataattgtttagctgggcacattgccaccctccataatgcaggggctgttagaaaggaagggaaggtggatgttgagtgtaacaactgccagtcttcactatgctttgagtgcattatctcatttaatcctcataaaaactccatgaagcagattctgttgtaaggttcattttatagatgaggaaactgaatcatgaagattaagttagtaactctcctacaaagcaaaattcatgtgaacagacctcaagtgttggcctgctaagctgtcctgtctccctgccacagtgcctgtctctctcacattgcttaggaagtattcttggtaaaagcacaggccttccatgtcagataagggaccaatggcaaaaaaagccctgcagatggtagttcataccatgagaaccccttttgtttaacatttacttcagcttacctgttgaagaaaacaaggtctctgcttgctgctgggcctcttctgcgggacagtttgaagatattttagctataataaaaggctcagagaaggatctagagtttgcccccaaataacccagccctactcttttctgggcagttttagtagagagcccgatgtagcaggcagcctttgctgggagccaaggcttctgcctccgtggcacttccttgattctgaactttctagactttggaaaagtcaggctgctccttcctctctctctctctctctctctctctctctctctctctctctgtgtgtgtgtgtgtgtgtgtatttgtgtgtgtttaggtggggtgtggagagtaagatgtagagagtagggtttaactttgagttagagagtgacacttctgttctttctttgcctttagtagttaaagcttagcttctggggcaggcagatctgagtttgagtcctaggtttatgccttactggttgtgtgacactggtaagtcctttttcctccttctgccaccatttctttataggcatgcaccagaggtgtgactcttaccttatgggattgtggtaggggttttctgctgtgcttggcattaagtaaacactcaataaatattagttgctattattattttcccattctgtcacaatctacctctgaagacaaaggttatgccggctaattttagattacaatttgtatgtcctctgagttctgaatttcttgtgaaatggcagggcacacatctccagtcttgtaacttgtggtgggttagtgatcatggttacttctgatgattaatctgaccattctgtgatcaaacttggaactcgcgtcacaattttcctaccgaccttgtaaggtagggtggcggcaagacttgtactgactggcaaactcgtgtttgtttttttaattcacaagattggactgagtgtttgtaatctagttgtgagcagaatgacacttgaaatatgcaagaaatagataccgaaaactgaaacaacaatgtgtggcctccttttcttagtaacagtttcattagtaccactttctgggaagagctggtcaccaaaagattataaaccagaatcattctcagaccaggtgctgggacaaaaaaggatttgaccagtcttaaactgaattactttttaatgcactagaaagagccatacatttcattggaagacagcaagcatacaggacattgttaaaactttccaggactaggaaatgctgaggtgacagaaaggaaagaaaagaagagaggcaagagagttgacaatagaagcaagtcttaatgttggatgaaaggtacaccaattcaggaaggaaaggtatagaaggaaaatcaaccatctattcatcatcccatgcaggtatgcatccctctaagcatccatccaataatggaattatttccagctagagaaaccaaccaatgaaataaattatcttcagcagaaggtggggatgatggaatcagggaaggtgtcatggaacatatagcattgggtttggatcctgaagaatagatggtaatcagacttcttgcttagatcctggggtgtgcagatgcatcttaggacataaaatattagcactgggaagaaaatccaaggattttaggctgatgtctataacatttttgctacaaactcccttattcaaaccaaatctactgtagaacttcagtataagaataaaaatcgtgcggttttggggggctatctggagctctgattgctcatgttcccccacatttccctgccattctcactctgttggcacctgcaggcaccataactatattccagggttcttcaggtcacagctggatccccctgacctggccaatctacccctctttttagcaagatccctgctagctggtcacagagagtggcagtgagtggctgtgaaacatattgcattggtcttcatcaagctctgaagctgtgaagactatgtgttcggtctttgtgggtctcttgtgaataaagagggggtaaattcctaaaaaactgaccaagtgacttctttctcaggcttgatactaacaaccactccccttctccaatgtctttcataaaggaatcccttgcatcatgagggccattggttagcaaagctgaacattatccagaaagctcctcttgaccagctgtgatgtttctcatgaatccattgttagggctactctcacttgcgaaggctacaccccaggccaccatgagccttggaacttgggcagttgggtctgaccccaaatacaaaactaatgctgggatctgaagagtccattctccaagaaagtggtccttacatgatggtctcaggaaaagttaagttttttcaataaagctctttagtcttgaaaagccaaaattagatattgcttgaatcaaggaacaaaaaatcggatatccatctgcctcctccagctgcctaactacaggttattcccatcctagctcagatgggcaattctagattcaagccttgatctaataaggaaagagacagccctttcctctgctccatccctcactatggtactgccttgctatagaattggggtggccactggggtaggtggactctcctcattcaccttctggtctgggacggtaggtctggagctctgtttaggccctttctctttcctgatgccccactctcagcaaatttgaggcaatgccaaatatgtaatccaggaatctgctttgctctacaaggtgataaaactcccatctatgggcactgaagagccctcccttgcccattgccacatttctattccatatgcgatatgtgctcctaggtttctagcccccttgagggagtatctacaacatagcctcagccatggctgtgtccctggcctttaggagatacatataggttccttaaggggctgcatctgaggtcaggacaagggaatgccatcatactctgtctgcaacctaatcgctgccattcaaaaatatccaaggtttttcatttctgaagtcatactttaaaaactcacatctgctgcaaacctaatcctctggtgacttctaaagaaagaagtcttctgctcagctcatcgtatctttataaaaggccatttccagggtttggcgtctcctgtctaggattgctgtacgaaagcgaagtcttttaccagcccctctgcagcatcattggcttccctgtctcctaagtaggggtatcttgctgcctggggattccaggtacctgagggattaattccaggagcataatgaaggcaggtagagacaggcctggcaggcaacagaaggccctgggtatgctgaagacagagacattcagtatcaggatgtagctgaatggaggcaagttagggtcactgtaccaaggctacttctccgatgacagatgggccatggattgttggctgagatcaaggagaaagggctatttgttgggagctcattatgcaccaggtgtttcattgtgttaatctcatacagttctcatgattaccctttgagatggatattattactttcattttgcagatggggaaactgaggcacacaatggttaagtgatttgccaagagtcacacaggtgataagcaacataacaggctttctaaactaggtctagtcccaaactgtaccacactgcttctcaatgacaaggattttagtgttgcactgggtgcttcttcctctcccaattgaagagggccctcgcttagatggaggcaggttatgacttcatcaagggtagctctagcctggcacaaaagcctctgcagatttggatcttagcaagtcacgctcgagactcagtatggaagctctgaaacctactgatttccatcttagaatctgagttccctggactcctcttctcttggtgggccgatcagccaagataggataggaccagctagtgacacacccttaggattcactcaggacctgccacttagagtgtctgggacaagggtctgctcatggtgaggcctgagtctctggccccagaccagcccctctgcactggagatccaacagtcatatctcttgcactcacctctatacagtctctacagacttggggccccagtttgctgcttgttcaagccttactaaaccaggtgtaggtggaaaccaaccaaacaaaccagaaccacttcagttctgaggcagatgcagctctgtcacagtttgtaattctaaatttgtttgtgcaattatttgattaaagtctgtgtaccccactagactagactgtaagctccaagagggcaagaacctcatctgttctgctcagcaagtacttgttcagtgaatgctctgccaggggtctcttggtcttgtcccctaccctgggacacagtgtatctgcgaaccctttctgctccggtgaccccagtttctgtaaaaggcaggcagatgcagctgctttctcaggtggacctgtccgctgtcatttcagtcgaaaaataccaaaaataaaaccttgcggggaattgtttgggtctctcagttctcgtcactcctcatgtgagaaggctgctgacaaggttctcgtggacagatctctcctctcttggctgggcaacaccatttcttggggaaactggcaattgagggagactggatcagggtagtccaagcccagactttaactggagcaaggagggttaggatggggccaggaatcatttgatgattaactgcagtgtcgctcagagaaaaaaatgggacttgcccgggcagagacaaggcaggcagtgaggcagaagtggagtgtccttggaatcacaggtcctgggcttggttgaggacactgttacttacaagtatagtcgtttggcaagtcactgaatatctctgagcatcaatttccttctcggtaaaggaagggagcggaagaggaatacgttgtactgagcctctatctgcaatcattagtgtcaaaatctctatggaacatcatgcaaataggagtgtggtgatttcagagctcccaagagttaagaatgtgaccaggaaacacatggacctttaccacccattcattcaacagacctgagtccctgggagcagagaatgggtacaaacagccttctgtgcttgacctgatctgcaggaggctcagaggaagggaggtgtggtgtggaaggtgcggagagcgccggggaaaggatccctgggagtcttgcctgtgagggaagggttagagggccactgccacgtggaaacctctcgcactcaaggcctttggctgcccctacctgcggttgtggggcgggacacccagaagtttagggacaatccaagtaatcctgaggccttagggtgtaaatgctcaggtctgagcttggtggagaagggtggtcttctgtgggtcagtgggatcttgacttcagcctaatacaacctagagggatccctgtgactgccctgggggtccatttcctgttggctatgacctctgttaagtaggaatcacttggcccctagaccacttttgtctggggctctgtggctctaagactgaaaaaccctctgctgtcacctccaacatactttaagagtgtcccctgggtctcgttgtcagggctcttctttctaggtcctggtggcttgcctaggtctggggaaattctcagtgaccgtggaccctggttcagcctttcccaggggacctgcctatggttgatgagtgagatcttcagggctgatgggaaggaatagtcttttagaatgaggacacagggagggcacatgtcactgtccctttatcttctccacccagaccagagaacgtgaggtcagccaccatctttgtgatctgatacagacatcccagcctaccaagcaagatattacaacttattcttcagctgtccagcagccttgcaggcaacatcaaattgtacatcaatcatggttcccctttctctcatgtcttccaaccacctttaacgtcagttttctccccctgctgtctttttctcctctgtcctgggtatcatccagattgcaggatatatgagtgatgtgtttataattcctggctgcagggtcctctcagttcaaatgttagtgaatggaaagtctgcgtttacatgcatatgggatttctttgttggcctacattaaacaccaacaacaaaggtcaactaaaatatagtgtaaatgagcgggaaagcctttctgtagtgtgtcaagtccaacctttggccaaaacccaacttctttcttcctgtttggaaaaaaaatcagccattgtccatgaatggaaagaacaaatttgaaaactttgactcagaccgtaactgtaagaaaagcacccacattagtgttccagttaaagatgtgaataatcctttagccaactggagttaatgttctctagaagtccttgggccacaagtacaaacaaaattctttgcatgaaaatgtaaacaaattttttttttttttttttgagatggagtttcgctcctgtcgcccaggctggagtgcaatggtgcgatcttggctcactgcaacctctgcctcctgggttcaggtgattctcctgcctcagcctcctgagtagctgagattacaggctcctgccaccgcacccagctaattcttctatgaaaatgtaaagaattctttatacgaaagtgaaaggtgacaacgactattgtgacttcattttcagttagaagccagggcaagtttgttggccatagtcttgaattcctattgtttgattagttttgctacaaataaagagaaaatcgtatttcttctcagtggggttttttttccttgaagattcaacagcagaagatatttccattgattacttagagtgatcaacagtgtgtcactattaacggtgtgtcacatgtccttctgggctaggggcttttatcttgcaaaatggccttgtacggctacaaggtttacctgttgtttaggtaagttcctaaaaaattgaccaagtgacttctttctcaggcttgatactaacaaccactccctttctccaatgtccttcataaaggaatcccttgcatcatgagggccatttgttagcaaagctgagcattatccagaaagctcctcttgaccggccgtgatgtctctcatgaatccattgttagggctaccctcactcacataggctgcaccccaggccaccatgagccttggaacttgggcagttgggtctgaccccaaatacaaaactaatgctggggtctgaagagtccatcctccaagaaagtggtccttacatgatggtctcaggaaaagttatgtttttcataaggctgtctttggtcttgaaaagccaaaattagatattgcttaaatcaaggaacaaacaactggatatccatttgcctcctccagctgcctaactacagatcattcccatgttattcctatgctagatcagatgggcaattccagattcaagccttgatcaaataaggaaaggtacattcctctcctctgctccatccctcactgtggtgctgccttgctgatttgaggttcaaccagtcagttgtgaatggagagtactctcagtaggtgagatggtgggacggaaatgcatgcttatcctgcagcccacctcgccattagagcaactctcttaactgttatccaccctggtgcctggccctggcagctcatgggacgtcacaagaggacaatggctgggagaaggaccttctctcaagggtgccttggaggctgttttagggaatgaatggcttctgacatgggctttcttaaagttgccccagaagagaagttaccattgaccaggccctaggtgtttgcttagctcagagccatcaggagggtcttagctccttagatgagcagctcctgcactgtggtgtgaacgtggtttgcaaggtgccattaaataaacaagtgctgacaattttgcatgtttcctgggtgatattttattatactttcatcaaggaactggagcaccatatttatttaaatcagtacactccatatgttcctagcttggtgcaaagcaggcacaaatgtccacatgcagccagggtgctgactgaggtgaccagtttgcttgagttttcatactctgcactctccagtggaacagcagctgcaggactcttatttttgtgatgtggagcatgtctgggtgtgtggcagggggaactgaaatagtctctgctgactttttgtacctacagattttgtttcattgctcattttggaaaagggaagcccttatggggccaaattaatggtttttctgtaaatgattttttttccccctcaaactccattggcttgacttccagtggtatagaaaggcaatatggtgaacttctcagcccgaaaaaggagatctccaatcagggccgagaggctcatgctaaggtggaaagattttcctccgtgatggactcttggatacctacgggagacttaaaaggccctcagaccacaggattaatggtgagaaagcttcaggctttgagggtgaactacttggagttacaagttaatcgggagcttattaaaatctctggagaactctactgtgggaaattgggcttctatcttctctgctgatatcttattatttcaatctcctggtttattttctttggattttttattatgattttaagaaattatttaaaaagttaaaaatatttcttttacgtattccagtttagttgttttgaagttaattcagggatccgggatccccaaggtgaggcaaccgtgattttagacaaacttttttcctctcccaaatttgtatttgtgggctcagttctcatgctggtggcagtagggagctcagtgtttactgtggaattaaaaatgtttattgttgctgcacataggttggtgtgaaaggtaccaactgcaagtttcaacttgcaaaaacacttggccgttgggctcctttggaatcgtcttgaagcttcagattctgatatttcatgagcactttgcaaagtcactatgagaagcaccctccttcttacctgctcagctggagtcagttacagaattccttggcagctggctgtggacacgtgccgggcagtcaggagacccgtgggagctgtgggagtcctgcaacgtcaataggaagaggtggggacttagagattgccccacatatggtctgttgtgccagggcacacctgttgacactgagttccaaggaagtccagacattagagggtgatactctctgtccacagcacctccaccaagcgctctttgttcatcgacttagaaacagtaggaggcgggaagccctctcttgacaagatcctggaagtggccagctggtccctttccagccaagtgtgtggtgtgtccacttcctgggagggactgggaccaggaggcctctgagcccttcctcagaagtgtacatgcaaacaagagggggctgagccatacacctgtctctgagatggtctgagatatgtgcatatgggattgagcccttcttgttcctcagctgaattaagagggtgaccacagtgctcagacccccccaagtaaccccatttcccaaatttctcttgagtacacaatgcctcagactgtactttatgcctaaggaatagctgagaacccaactgaagacaagtgtgaactgcaggatatggttgtgaacagaactgacgtgtgcaacagcatggatggaactggaggacgttatgtgaagggaataagccaggcacagaaagacacaattctcatgttctcacttgtatgtgggaactacaaattcacacaattgaattcatggagatagagagtagaatgatggctaccagaagctgggaagggcagcagggggagtgggagtggggatgacttatgggtacaaaaatatagttagatagaatgaatatgatccagtatttgacagcacaacagggtgactatagtcaacaataatttatggtacacttaaaaataactaaaagtataattggattgtttataacacaaagaggtgacaaatgcttgaggggatgggtgctttatttaccctgatgtgatgagtgtgcattgcatgcccgtatccaaatatcttgtgtaccccataaatatatacactgactatgtactcataaagattaaaaccaaaaatgctgacgtggccatggggtgaccctgagaaagagtgagttgagtgtggcagggcaggtgccctgttcgctgacacgtcagattgtacctggggcctgtggtcatcgctgggcaccacccagcagtagggaaagtggcaaatggaacttgtgcaagagtgactcacccagaaggaaggtggggagactaaaaccatgtcatttagaaatagctgaaggaatgagaagtcccttcagacctagggggacacctggtatctgtcctcagatttcggaagggaatattactactaatactcatgataatcggagctcacatgtattaaatgctctgtgccaaactctattccaagcacttcacatgcaaatcttaaattaccctacaacatacataccattatgatcttcactttatagatgagacagctgtaaatggactaagaaatgtgagtttcattagaaggtaatggagggaaatatggcatgtgttaccataagttagcctcagtaggaggaagagctgtctgacatgataatatccccccgaaaggaaggtggaaatggccagaaggaagataattaaaaccacatgtattgagcatctaccctatgccagacatggcctttgaagctccccatgtattattttggttaatcctcacaaccactgtgtgagagaagaattattattcccgttttacaaatgaggaaattgaagcccagagacattaaataaatctaagaactttccaccagtaagtgacagcccagatttgaatacaggtatgtgtggttctcaagtctactgtcattggtgttcagagcaaaggtggaggcgcacaggtggccccggggcacagaaccaggctggttcccctgctagacactcctatagcagcctgaatttcacaagttgtgacacattcatctgctggtaacttttgttgcttgtcttccccgttagactgcaagatccacgtgggcgggggctccatgggtcctgtgcagtgctgtactcctaggcactagaaatatttgaaaaaatgaatgaataccagtagagatctcttgttcagacaggggaagttaaaataaggataatgaatctcctattgggatgttatcgggagattcttatgttaaattaggaatggattatcagcagttgtaatcccagtatattttcagaaatactggacagattttttttttttttttttgagacagagtctctctctgttgccaggctggagtgcaatggtgtgatctcagctcactgcaacctccacctcccaggttcaagccattcccctgagtcagcctcccaagtaactgggattacaggtgcctgccaccacatctggctaattttttgtatttcagtaaatatgggctttcaccatgttggtcaggatggtcttaatctcctgaccttgtgatccactcacctcagcctcccaagagagatttttatacatacagattcctaggcctatatcagccccctagaatcagactctcctggagcaggacctgtacctgtatattgcatcatttcctggttgatttgctacctggccagctgagagaccttggaggatgggtctaaagtccacctgagatactgggattcctgacccccaacatctgcccctgggactcatttcccacttcctgttgcctctgcccaagcttctctctgccttctgggcttcaaggccaggccttgctcgtggctggagcctggagggaggtctggtgccgagtcaggcatgggaccttatcagctgggtatttactgagcaaagttcaaccagggcagtgctgcagatccgggtttaacagatacctaggcttccgggactttgattcagagcccaggtccctggggcccttatcggtggataataatgggctccctgtggaagtcctaaggtctagtgtttcttggctgacccaggcctgctctctgagagcccaggatccctaggccacaggctgtctaggtgggcagcttgttgcttcccagccacggctgcttttcagttgctctcccaggccaggaagggccctatgcactggctcttatttgggtcaatgctttggtttcctggctttgatggcaagaggggaaggaaaccttccctcagcagcaggtggacactgtctggccccagggtacaaggatcacccttgggtaattgtcccatgccctgaaagtcactgagaacctgggagccacttgcctcaatcctaaaggtgtaggagaggtgaagggaagacaaatggcagcatgtcttaaagaatcacccaatcgattaatcaataagtatcaactgagcttaaaacgcatgggcatgccactgggaagacatagagaaataaggtacaataactcaccttgagacgtttataatctagttgtgggtataagacacttccatcaaaaagaataactattacataatagactgaatttttttgaatgcctaccctgtacctgaatttatttgaggcatatactgttctaccaatttcccacatcaagtgacttctctcaatattcctttgataaagaaactgaagattaagaggcacagagaggtttagtaacttgcccaggatcacacaggaaggtggtggcaggggcaggatttgaggcctgtgctatctggctcagagtccctgctcttatggctgtcctctactgccacctatgatgaatactaatcagatctggaaatgtttgagaagctgtagaatgtggaaattactcaggctgcaggggtcaggcaggagggttgcatttgtcttgtgtcagcaagaatcaagaggttggaagaagtgagagggaattctgaccacggaaaacctcaaccacagatgaggaggtgagacacgcaggaacacgtagagaacacagacagaccttctggttggagacagggtttgtgtagtagggagtgtgcaaagtggtgagaaaaatgggttcggatctcattctgaagactgtccaattctaggacaaggagctgggccttcgttgtctgggtgcaggggacccacagaaggtttgggagtaggaggagtgacaatactggagaggcattctaggaagtgtcacgtggttctccgtgttcaagcacgacttaggggagcaggcagatccatgaggaaatgagcactttggggtgggggctcgtctgagaaggaccatgggctccagggacattgcttttcacagccacagctccggagcaagccccagccccggcccggccataccagggcgtccgtgtgaaggagccagtgaaggaactgctgaggaggaagcgaggccacgccagcagtggggcagcacctgcacctacggcggtgagagtttgtgtgtgtgagagtgtgagtgtgtgtgtgtgaaagagaatgtgtgtgtcagggatagtgtgagagtgtatgtgtgtgtgagtatgtgtatgcgtgtgtgtatgtgtttgtgtgtgatagagtgtgtgagagtgtgatagtgtgagagagaatgtgtatctgcgtcagtgtgtgagagtgtatgtgtgtgtgagggagtgtgagtgtgtgagtgtatgcatgtgagtgtgtatgtgtttgtgtgtgatggcgtgtgtgagtgtgtgatagtgtgagagagaatgtgtatgtgtcagtgtgtgagaatgtatgtgtgtgagagagtgtgtgtgtgtgagagtgagtgtgagagtgtgagcgtgtgtgtgagagagtatgtgtgtgagggagtgtgtgtgagagagtgtgtgagtgtgtgagagtgtgagtgtgagagtgtgagagtgtgtgagagagtacgtgtgtgagagagtgtgtgtgtttgtgtgagaatgtgtgtgcgcgcaggcagatggcttgggaggtgaccaaaaggatcaggcaggaaggagcgcaggtcccttggtggaggctgccagggatagagctagggtggagcaactgggatgagggatcagggccggctcagctggcccaccgaacacagctactgtcaaggcctgagtgagcgaatgacttgcataccctggtgtgagttgggggctccccctgagaagaagaagacaccagctccctgagcgcacagacttcctgctaaatagaaacgcaaatctctcaagtgtaggtggtgatggttgggatacggggtgggatgttttgttctaaccagagagattcctatcttctattctcctgccctgaggccctctgggcaagttctctgcacagggccggttgacgagggctaaacattgaccctggtcttctcctctcccctctaggtggtgctgccccatcagcccctggcgacctacaccacagtgggtaagagtgccccgtagccctggtggcccccaggcctctcatctgggtggcatctgaagttctgtaatttccttcttcccacaggtccttcctgcctggacatggaaggttctgtgtctgcagtgacagaggaggctgccctgtgtgccggctggctctcccagcccaccccggccaccctgcagcccctggccccatggacaccttacaccgagtatgtgccccatgaagctgtcagctgcccctactcagctgacatgtatgtgcagcccgtgtgccccagctacacggtggtggggccctcctcagtgttgacctatgcctctccgccactcatcaccaatgtcacggtatgtcacacaaaggcaggactgcacccgcccatgctgagtgcacccttttataaccagagctgacttctcgatcctgatcttccttgctattgattctcaagataatcaggtcatcaaagctcgccttggtctccatggaggcctgctctgattctcatttcctgagataacttccacaaagatgtctcgcagcctctctcgtcatactttctgctcctcaggactggggaggtcttctctgattccctgttctaaatctccccagcttccctgcaagcagtgagtcttggttctgagttgaagtttttagtgaatgtggcaccaggcgagatctacatggggtcttgtgttggaactagcctttcatttctattcagataacttagggagtgattgttcacttaataatggggtttaacagaagatttctaggctgaacaacaggtgatatttttgatggtgtcagacccacgtgtggggtaattttttaaagttctgtctctactgtcagattgccttgttcaaatccctgtcccttcacttactagctatgtgactctgggtttagtgacttaaaactctctgagcctcagtgtcctcatctgtaaaatgggaataccaagaaaagggtcgttgtcaggatcaaatgaaataatgagtgtggagggcttagcacagtgtctggcatacagaaaccactaatatatgttagttatcatcatatcaaaatctgctaacattaaccaagggcttgatgggaaaggaagagcctcttcccccgggaatgaaggaaggaagggaaatagatttatgttaatgattcctgttcgactaaaggactgggaattttgcaagtattcaagggcaaaaagacctgtggttacagctgtatccagctccagtccagggaaaccgtgggaagtagagctgggccttgagcagtcccagagcccaccttcgatggtggtgcttgctttggtccaccttgtctcttccgtttccctccagggtccagtgtcatcctgatgcacctgcccctgcctccaagcaccttctatgaaaggcctgcagaagcccttccctcccaggtccacctgcctacccagcaaaccaattttggagcctggatgatgatagataagaaggagttaatccaacacctctcccaggcaactcatttccatgtcagaggcctggggtgagggtggtgggtggaggactcatggctcccacccatttcattaccaaggattcctttcattatttatcccctttcatcattcccaccttctgctttgaaaggttctgtttatcaaacaaacagtattcattaagaattgatttatttgttttgccattttgtaaattaagtcatcaaagctggctagagctgtaagtccacactcctgatcagcagagataagacctgctgtgtgctgagtggaagtaattgtattcccgagcaaagaaacctatagttacaggtttatgactgggaaatgtagaatttccatctggatttttgaaaagctgggaatcatgaggctttcccggattctgtctggtttcaggacactgggatggggaccactggcttaagtcaaaggagaggaagtgattatgctgtggtggggtgtacacctcagcccggatttcgggaggctggaaggcctctgagaccatttccagctctatcattctatgcaaaaacaccctaaagccttgctactcaaactcttgtccctggactggccacattggagtccccctgagatctgattagacatgcaaaatcccaggccccactctagacttcctgtgccagaagctgcgttctaacaagatacccaggaggttgagaaaagccctgccctaaatgattctaacagtttgctgtcaagacacagtgacagtaggagggatatatgacaggggagacagggatggtagggggagattttggcctccctctcatgaatccatgcagagagcatcctcttctatctgctttcctcaagtgtgaaagaaaagtaagaatccaggtcccgcccctgttgcaggcctgatctgaggtttgtgagggcagtcgccgtgcaggtgagaggtatgactcgcagagcattcaggagaaggactctaacacttggagggtcatggggggtgcccataagtgggatggccatggagatcagctcagagacagaggacgatgaggatgtggaaggcaccaggcagcagcaggaaggaaggccaagtttgctgacaaagcagtgcttcccccatctggggatggccaggcctccccatgctggccaccactagaggggtgggaggtgatggagctgtgttggcccaaggggacctccaaagctgttgtgtggagcccggactgtctttgtgtctgggcaggacagtggccaccttccagatacagcttccaggctgtggtttaacatatattttcacagattttaagatgcatatatttttaatgttttaagatctctgaaatagaaatgaattttgtattcaacgaaacctggaaaatcctctctaattggcctaacccaatgagttcattactgtttgtattctatttcgtagatgagaaaaatgagccttctgagcaggaagtggcctgagcaaagacatatagctaggaagggtcaggattggggctgcggttgaagtcagcctggctcctcccttggggaagactttgagcaggaggaggtggagccccatgaagtgagaaaccaggaaagggcagaattgaagggggagatggagacccctctaagggcaaggatgggtggatgggtctcctggggctgctaaccctctgtcacgtgttttcctgtcacagacaagaagctccgccacgcccgcagtggggcccccgctggagggcccagagcaccaggcacccctcacctatttcccgtggcctcagcccctttccacactacccacctccaccctgcagtaccagcctccggccccagccctacctgggccccagtttgtccagctccccatctctatcccagagccagtccttcaggacatggaagaccccagaagagccgccagctcgttgaccatcgacaagctgcttttggaggaagaggatagcgacgcctatgcgcttaaccacactctctctgtggaaggcttttaggcgtggctcccacctgagtcctgttccctgaaactgggattttaaaatgagcctggaattgagccccaggttcatgcttgtttggagtagtcatttcatgactacactttctacgcacagctagaattgtagacctgtaaaccttccttcccttcttccttcccctccctccctcacttcctccctctcccccatccttccattcttcccctccctcccttcttcctttccaaccccttccttccttttcctccctcccttccttccctccttcccttctccctttccaaccccttccttccttttcctccctcccttccttccctccttcccttctccctttccttctttacctccctccctccctcgcttcttctctctttcttacttcttttttcaattctgttccattttgggaggtaattatagggattttagcaataacattttatgtcaaatgttgccaagtctgtggtccatgggctttcatttctgtcacatttcatttcttggaaaaggcctccttcctccagtgcctgctgaaccatcttagggtcactcacaccctctgtaattttaagatgtatgtggtggccggcgggaagaccagccccgacagcacctcctgagaaagtcagccaagggcctaccctgatgccagagtccttgagctgtcagttcccacagttgctcctttgtttgctcttctcagcctcggccagatttacagtccaggcagcaaaatctcaaggcctggggctcagagtagtaaggggtgggaagtgggtggcagggagaaaagaacatcagggtgggtggggacaggccagtgacgaagagagggacagaggagggatgggaacaggctgtgcatcttagttggagagaggggtgtgggaggaagcttgagtttgatgcagggaggaggaaggctgaggaatgacttggctccagattacttggttattaagaagaacaataaactaaaggaaagcattgcttgaagagatggttttgctgctctccttgaggatacgtgcaagggaagttgggctgttgtaaacagggtgaagggtgtgtttggtcggccatttctgtctcacctctaggccctctgctggtgctgtggaggccaagaccccattaagcctaaaggtgatgggtcctcgcctagtgcttagtgctaccatgtgggttttgtttctttccttccttccttccgtccttccgtccttccttccttccgtccttccttccttccttccttctttccttccttccttccttccttccttcctctctctttctttcttttttttggttttttttgggacggagtctcactccattgcccaggctggagtacaatggtgcgatcttggctcactgcacctctgtctcccaagttcaagtgattctcctgcctgagcctcccgagtagctgggattacaggtgcatgccaccatgcctggctaatttttgtatttttagtagagacggggtttcaccatgttggccaggctggtctcgaactcctgactttgtgatccgcccgcctcagcctctcagagtgctgggatcacaggcgtgagccaccgcacccagccttttaccatgtgggtttctttagtgtcttaaaagcgtccataagccaccattctgtggaaccaaggccccctccacgcaaacaccctccctcctggggacctctggagcctcagccagaagtaccattaggtttaattttaatttgttttgctggagaaacatcaggtttgtaggagactgagttgttagcaggtgtgcttagctcttgatagtgaacgtgtaccttgggaactggctcacccacctgctaatagcaccatcgtcactattaagcagacatttcagttggtagaatccatgtagaagtcatggacttttctgggaaatgacttttctgggaaatgacagtttctttgacatattttctttgcccactttaaataaaaactctggagaaagttgtctgttttggattttctttttctgcttaagattaattttgacccagatttctctgtgcctgccttaaatcccagtacacaaatcttgaattgtttttattcagatattttttagatttaaaagttcaagacagcatttgagaagatgcatttacatctttgtcggtactgatggtaagtaggtgggcagggctctcagtcctatttgattaaaagccctggttttccataaaaaaagacactatgcaagatttttcagcgtaccatttgagagggtgcagaagcaacctccgtaaaggagttaaagttggcaaaaactagcaaagaaatatagtactttacgtgtttgctaagataaatggtctattttttctcttatcttgaggtcaaatgtcttggtagtagtccatctgggtttcttcccgagttactctgctaagatggaaacattttcataaagatttgtagagacttttctgtgccaaagtgtttcatttcttatcaagttgatccccctaagctttcagtcccatgttagacagtgtgattagaggaaggaacttaacactagtcttgttgactttgcaaattgatctgttgcagaagaagataaaaccagtccccaccgtgcctgcagtccagttctcccaagcaggacatgcgcgtggctagggggcttgttgtccaggagagtggggagctgaggagagagggaaatcttttaacttgattgctcttcctgttattcacgccatcatgagtaacttctcatgacgctgagtgttcagggataagttctaccacgggcatttccatagcaggctctgaaaatccatcaatcaggatccaggagcatgtgacatcaggcaggaaccatgacctaaggaagccatctcatagggccagacatcaccacggaatggaaattccagaagccaattagtcccctccaagatcagtcaatggagtgagttacagtttggaaggggtctccctttcctggtgattttctgagtttctaaaggcctctgagctcactgcctacattgttaatcttcgttggagtaattgttttaaaattatctacactattctgctatgagccttatttccagattttggaggagagagtacatccagttatttagccttctttagattaccagcaccattgtctttttggcttactctccctgaaaaccagaacctagaaaaatgacatggaaggaaagggtttgaggttttatcttcagctttagtgaggctcaagtgaaagggaagatctattaaaaatgcatttgccttactctcttttgaggtagaggcatgaaaaacttgatctgcaacttgaagaagagcatggccagtgtgatgtagattagtgctttacaagattctgatccatgaggctgtccaattccagcataaaacaggctagcaaggagacaagtatgtggctgagatgaagaagatagacatctggaaaagaacaaaatcacatgaccaagtggctcaaattctctgaacatcaggttgcactcatctctaagtggaaatctgaagacatgttctaaagctaaacacaaatttcttgaaatcagaaaccatagataacttattttgcattaatttacttcatttgagtgtcaaatatgagactctctcaataatttcttgttgaattgaattaaccggggggattctctgtccactgcttctaaatattgatatagatgattgcaagttgattataatgaagtctcctttattggatggacagagacatgatgcctggcagatgttttttctgaaagcttgagtagaaatattcataagctggtgatgttaatctgtttgtcagttcttctacagctgtggctgctgtggaaggtgtttcattcattcattcaacacagatttaaaaaaaaattattttattgaaagttgacaatttaaatatgtttgtggggtatgaatataatacaatatattatgggatacaatttacagattgatgttataatttatgaatacaatatgaaatacttaaatcaagctaacatatacattatctccaatacttattttttgtggagagaacatttgcagtttactctcttagaaattttgaaatgtacaatacattattattaattatattcaacatgctgtgcaatagatctcaaaaaaaaaacttattcctcctttctaactaagactttgtaccttttgaacatctctccattcccccataccccagcctctataactaccattctactctctgcttctacgtgtttgattgttttagattccacatataagggaaaacatgcagtatctgtctttctgtgtctggcttgtttcactcagcataatgttcaccattcatccatgttgttgccagtgatagaagtcccttagttttaaaggctgaatagtattccattatgtatatatgccacattttctctatccattcattgcttgaggggcacttaggttgatttcataatttgattattgtgaatagtgctgtgatgaacattggagtgcagatgtgtttttgacacactgatttaaaatcttttgggtaagtacccagaagtgagattgctggatcatatggtaattctagtttaagcttttcaaggaacatccgtacaattttccataatggctatactaatttacattcccaccaacagtgtacaagggtttccttttctctacatccttgccaacacttgctatcttttgtctttttgataatagccattctgacaggtgtgaaatgatatctcattgcggttttaatttgcatttctctaatgattagtgatgttgaacatgtttttcataaatgtgttagccatcaacacatatttattgagtgccaactctgggctaggcaggcatcttggattattatagatgtctgctttgaaatagttttctagctcagtgatttattttcagtatgagtgtccattcttatatatgtatatttagttatttataaattgtatatcccacaaacatatagctaattgtatgtattataaaacattcacaataataggaatttaaaaagatgaggtaaatataaaaataaatattttaactattttatttattgactacaaaaattcatttgacctcattaactgtaaataacatctagaaggagcatctttgtgacatactgatttgaagatctgggtttaacttcaattgatttcggtgttttgtcatagctgaaaaagataccatacaaagatgtttagatccaaataaaaatagtatatcattgattatgctaaataaattacaaaagttattttaaaatgtcttccatcagtcatgcaaaggtgttattttaaaatttggtcagcaaatttccaccttagctgatgtcaactggtcttacacacttattgaaggagttgcctttttaacccattgagttaaaaccactcaaactctttatttggaaaaattttcagcaacctaaaaaattctgcttctacatattttttaaaaaggctgaagatatggaagtttttatgggtaacacacacctatattgttgttagcaacaatatcacatgatggaaacattcctaaccatctactaaattttcacttgctaaatgttcccctcattgcatgaatttcaaaaagcattaatgttatcttgatcttgatgggctggattaagtacaaattgtgtttactacttaaaaaaatctgcaggtaacgtattttggacaaccaacttatcaaccaaaaaagatcagcaaatttagtgtgcttgtatttgtattaagtaaatagatatttaatatctaaattataattaatttaatttaatgatataactcattaatttaattatatgattaatttaattatatataattcattgctttaattatatacgattaatttaattatatatgtcattgctttaattatatatgcttaatttaattatctataattcattgatttaattatctatatgtgattcatttttaggtttcacagttcgttgggtgtctttagtcaagagataatcagtgattctttttatggcacaaaagggtctcatatcattataaagactgtacatttagagatgttgggtccataaaattaaccacactgatatcatccttaaatctcaatatgttgcaatatgatggaagtgaattcactgagggcatcactgttaccccccatttccatgcataacttcctcttgtccctcaggacactctcagaaccatgagtcacacataactaaagcgtggggagcaccagcactacggtgaccaactcatcttggtttgcctgggaatttcttggctttaacattgaaagtcctgttctaatatatccttcagtctggggcaagcctggacttttggtcacaccagtccacattaatattgtctggtccacgttaatgtggactggtgtgaccaaatgtccaggtttattatttatatgtattttcaaatacaaataaatcttaatttcctttttctttgcttattttttcttttacttctttttcttttttaaaataaattagaagtttcttttcgcattccaatggattgcctcatgtggtccctaagacacatgtgtcctactttggtctctttggagcttataaaagcaattcttgcttaatagattcctcactcaaatcccgtctggagaccacaggagagaagttggctctggcctgaggaaccctgacattatttgttctaagatgggactgggtccaggggcatcaatggttctgccagggggccatcctggtgtttgtcaggcagtagcatgagatacaccatctttatatgctctcctacaactaaaatccgcttctcattaaaagttttctttatccaaactatcctaaggtgacactcatattaatatgatagtgttaactcatctgggaaaaccttaagaggaagaaaacacacttttcataagatccagatgttgtctttccccgcccacgcccattaggtggaaatctgtaacagcagttctcaaacttggctgcacattagaatcacttgggaatttgaaaaatccctgtgtccagactgtgcctttggctgattaaaatggacttgctgggagtggatgcaggcatcaggaatttttaaagctcttccaggtgactccaatgtgcggtgaaagctgagaaccaccacacatctacctttcccctccagtggtgggtgggactgtggttgagtctgaatgctaagaaagagttctcagaggcaacttgtgtgtggcatgtagcatggatgctgtcctattcaattagaagttttttttcccccttactaaaccaggcagggttatggtaattcttactctcttcattagagagtgaaagcccagtggtcttagcagtcactataggaggtctttagagtagactgactcagcaaggaggtatcagctaaagtgattgtaaatgtcttttatctgacagcttgacgacttgcttttcatgtgtgtagacccataagcaaatacaagaatgaaacataaagaaaatagcaagatgtcggaggcatctgccccttgtctcacctgtgtacttttaaacctcagtagtggattgacatattcaaatatggggcaagctgggtcaggtgaaaagataatggagacagcaactatggtagaaccccaaatttaagactttatttgaagtctactcatcgcctccctgggcaaagggctttatgacattcaagccaaaccaaaatttaaagaacgagccatataggactgataaatctgcttttcctaattataagaactagtgttccacaactagtgtccttatttcctattttcgattctgcctatttcagtggagaaaggttttggtgtctgcagtagctggaagagctggaggacttgaggctcaggagcctaaagaagattgtcaccaacttctggtagatgagaatggagactcttgcttcctttacaatgtgctatagcattcatgtgctgcatactgtgctacctgctaaggaattcaaagaaaagtcaggtgcatccttgatcacaagaaactcagagttattggggcaaatggaaggttataacatagtaaaacaagtagagtggtagatataaacacagatgctttacatctcacatttgctaaggagatgttaccacgatctcacttaagcctctcagaaagcaaataagggatgcactactttaattcccaagtataggaagaagaaacagacttaaagaggttaagtcacttgtccaagtttacatagtcagtaaatggcagtgctggtgttcaaatccagcatgttcaatgttcgttcttttaatcctgtagccacatagctactgacattattggtggccatttggatgactactatttttattttatcaagccttagctcacatcaatacatcaagtgtttgttgagtgtctttctgtcatggcagacactatggatgaagaagactggatggttggaatgtttccagctggagtgcctcagatcatagtaactcagcggtctatataatgggagaattcactccaagaggaggagacagagagaagtggatgtgaaagtttcatgtgtgtgctttgggacatctagccagttctgaattcagagtggatatgcagagagaagggcaatattttctgccagcgtgttggttgctctgtgcccctgtgatctagaatctggatggttagtggtgcctctcttcaaaatcatatataggctctagtaacctaatggcatgctaaactttcatcttactgtgctgattgcctatgtatcaatttccaaacctcatggtttttgctaccaaatgaagtaattttgttttgaacccacagtatacacactcagtagatagaggaataaatatgaatctacataaatagacatatttaatggatacagacagattatagccagaattcttaccttctggtacttttgtggtctcttttgaactttgtccctcagttgacttataaccaatgtataggtcagcagaggcagcagcatggctgtgtgcaggggcttttttttgggtgttctgatcttgcaagttgcaattagaattctgagtttgctatgccatcttgggctcagattctttttctccatcaatcaaagagagtatcatttgcccatttcttagaatgagacattttgagattgtgtctgcaaaagtacttgatgcaagatgatgcctgggtgctttacgaaatcaaggggcccaattgtggcagctttattttcattatgctccttttttaggccttgtttggggatatattattcaccgattcaacaaatgcttagtgaggaactactacgtccagcccagagcttggacacttcacaagtcaagagagtgttgccttacttctttgtttcctgacatatttaacacaagtcagaatatttaaaagactaaaagtaaatgtattaagcattttggtcagtttcaacacaaaatatagttctgataagttatctatcaaaattttctaatctgtagatttggtttaaaatgcctttcagaagatggaaagatgtgatcaatgtgatgtttttacagagaaaattctaaataggtatttctctttattctaaaagtgattgtcttttgtttttccaaatgactcagacttacatatccatgttctcaccttgtaaactgaaatcagcaagccatcttactaaacaaaaatagtgtaatcctttgtgtatataccaacacagagtcccagggccttggggaaaagatgcaataaaaatgcctaaataacatggctgacctgatttctagagaaattctctctgccttgggaaagtaagttagaggaaagctttttcagggttgcatcatttggccctattcacctctcaggaacagtgactttctggtctgtgtacttgaagaccaagaggcaggccggagatcctagtgaggctcagggattttgaggagccctgccagatcccagcagtgactcagcgctaatacacagggaagagttcagactgctatgcatccgttcactgctgtgttccattattacatggttatatacatgaaatgtccactgatgacatatcataagcagaagattaggccttgaatcttaaacttttaaaatttaaaaacagttggccaggcgcagtggctcatgcctgtaatctcagcactttgggaggccgaggtgggtggatcacctgaggacacaagttcaagaccagcctggccaacatgatgaaaccccatctctactaaatatacaaaaaaaaaaaaaaatttgccaggcaatccaggtgtggtggcaggcacctatagtcccagctattcaggaggctgaggcaggagaatctcttgaacccgtgaggaggcggttgcagtgagccgagattgcaccactgcactccagcctggacaacagagcgagactccgtctgaaaataaataaataaataaataaataaataaataaataaataaataaaaacagctcacaggtatgatagaaacactttataaacaaaatttaaatacaaattatttttcttatagctgatattgaaatagaatctcctggctggaaaataattattttcttccatattgcagtcctttgtcaccagtttttagtctgaagtaaaagtaccttttatatacttaaattatatgattgtcagaagctttatcatactagtaactgcagttattaaaattagaatgtacacacagtcttactgaaaatcctgcatattcttctgctgggaaaatgcaatgcaatagtccaggttgatcagaagcttgggtgttggataacccattcaagacacaggtgggctggtaagcagctgggagaggtatacctactggggctcgattccttaggtttatgccctgaggttaccatagagagttttgatacttcacatcagcgttacttttttttattaatcattttattatgaaaaatttcaaacatgcagaaaagtttaaagaattgtacagtgaatgcctgtaatcacctagattctacaatgaacatttagctctagatgatcagaaatctatcaatccatctattgactctgtatttttctgttagatgcatttcaaagtaagctaagccatcagtgcactcaccctaaagactttaggatgtatatattaaactgatattaacttgaggttctttctttttttattgtgaggtcaaatttacatagagcaaaaaaaacaaatcttaaggacatcattcagtgagttttggaaaatatgtaatgctgtgtaacccaaatctctattaatatacaaaacaatactattaatccccaagtttcctcgtgctccttatcaatcagtctccacctctatctccttagaggcaaccaccaatttcttttcaccatagatgagcgttgcttgtagaataagggtgaatggaattacacagcatgcgctctttgtgtagctcttctttcacttagcataatgtttttctatattcatccatatattgttgcacgtataggcagttccttttctgctgaatagtattccattgcatgaatctaccacactctgattatttattctcctattgatcgacacctgggctgtttccagtttttggctattatgaatacagctgctaagaacattcttgaacaagtatttttttttcatatttggccagatgttttttatttcttctggataaatacttaagaatgaaatcactggcttgtatagtagatatatgtttagttttacaagataactgccagacttttttccaaagtggttgtgccattttatactctcaccaccaacaaatgagaattctggttattccacaccttcaacaacatttggggtatttcacctggtttat

SEQ ID NO: 1376 - DNA, 3314 bp, Homo sapiens
gaattccggcaggcgcccatggcgggctgagtcctgcccatgccctggtggcctggaagcctgcatgggcgccgtgcaaagatcaacgttttccagaggagcttttgggctcatcactggcctggggagggcttgacacggggttcccacagcttgccccacaccaccttcacacccacacacagcaggtccccgcggggccggtgcaggctgtggctgcccgcgctgcgctgttgctctgtcccggctggctggctccgagtgtggggcgctctgggccggggccgctggggcgcgcacagtggggtgacaggcggcctggctgcagaaacgttgcaccggtgcctgaggtgggaggatgtgatgacgcggcccacgcagcgggaacccaggcctttaaaaagcccaggaaacagcctcagctcaagcggtggctccactggaggaaaacacaccccggtctcacattaaagaagccaaactgtcggcttcaaagagaaaaggcaacatcctgtcacaggccatgctctggcaaaaacccacagctccggagcaagccccagccccggcccggccataccagggcgtccgtgtgaaggagccagtgaaggaactgctgaggaggaagcgaggccacgccagcagtggggcagcacctgcacctacggcggtggtgctgccccatcagcccctggcgacctacaccacagtgggtccttcctgcctggacatggaaggttctgtgtctgcagtgacagaggaggctgccctgtgtgccggctggctctcccagcccaccccggccaccctgcagcccctggccccatggacaccttacaccgagtatgtgccccatgaagctgtcagctgcccctactcagctgacatgtatgtgcagcccgtgtgccccagctacacggtggtggggccctcctcagtgttggcctatgcctctccgccactcatcaccaatgtcacgacaagaagctccgccacgcccgcagtggggcccccgctggagggcccagagcaccaggcacccctcacctatttcccgtggcctcagcccctttccacactacccacctccaccctgcagtaccggcctccggccccagccctacctgggccccagtttgtccagctccccatctctatcccagagccagtccttcaggacatggaagaccccagaagagccgccagctcgttgaccatcgacaagctgcttttggaggaagaggatagcgacgcctatgcgcttaaccacactctctctgtggaaggcttttaggcgtggctcccacctgagtcctgttccctgaaactgggattttaaaatgagcctggaattgagccccaggttcatgcttgtttggagtagtcatttcatgactactctttctacgcacagctagaattgtagacctgtaaaccttccttcccttcttccttcccctccctccctcacttcctccctctcccccatccttccattcttcccctccctcccttcttcctttccaaccccttccttccttttcctccctcccttccttccctccttcccttctccctttccaaccccttccttccttttcctccctcccttccttccctccttcccttctccctttccttctttacctccctccctccctcgcttcttctctctttcttacttcttttttcaattctgttccattttgggaggtaattatagggattttagcaataacattttatgtcaaatgttgccaagtctgtggtccatgggctttcatttctgtcacatttcatttcttggaaaaggcctccttcctccagtgcctgctgaaccatcttagggtcactcacaccctctgtaattttaagatgtatgtggtggccggcgggaagaccagccccgacagcacctcctgagaaagtcagccaagggcctaccctgatgccagagtccttgagctgtcagttcccacagttgctcctttgtttgctcttctcagcctcggccagatttacagtccaggcagcaaaatctcaaggcctggggctcagagtagtaaggggtgggaagtgggtggcagggagaaaagaacatcagggtgggtggggacaggccagtgacgaagagagggacagaggagggatgggaacaggctgtgcatcttagttggagagaggggtgtgggaggaagcttgagtttgatgcagggaggaggaaggctgaggaatgacttggctccagattacttggttattaagaagaacaataaactaaaggaaagcattgcttgaagagatggttttgctgctctccttgaggatacgtgcaagggaagttgggctgttgtaaacagggtgaagggtgtgtttggtcggccatttctctctcacctctaggccctctgctggtgctgtggaggccaagaccccattaagcctaaaggtgatgggtcctcgcctaggcttagtgctaccatgtgggttttgtttctttccttccttccttccttccttccttccttccttccttccttccttccttccttccttccttccttctttccttccttccttccttccttccttcctctctctttctttcttttttttggttttttttgggacggagtctcactccattgcccaggctggagtacaatggtgcgatcttggctcactgcacctctgtctcccaagttcaagtgattctcctgcctgagcctcccgagtagctgggattacaggtgcatgccaccatgcctggctaatttttgtatttttagtagagacggggtttcaccatgttggccaggctggtctcgaactcctgaccttgtgatccgcgcgcctcagcctctcagagtgctgggatcacaggcgtgagccaccgcacccagccttttaccatgtgggtttctttagtgtcttaaaagcgtccataagccaccattctgtggaaccaaggccccctccacgcaaacaccctccctcctggggacctctggagcctcagccagaagtaccattaggtttaattttaatttgttttgctggagaaacatcaggtttgtaggagactgagttgttagcaggtgtgcttagctcttgatagtgaacgtgtaccttgggaactggctcacccacctgctaatagcaccatcgtcactattaagcagacatttcagttggtagaatccatgtagaagtcatggacttttctgggaaatgacttttctgggaaatgacagtttctttgacatattttctttgcccactttaaataaaaactctggagaaaaaaaaaaaaa

SEQ ID NO: 1377 - DNA, 771 bp, Homo sapiens
atgctctggcaaaaacccacagctccggagcaagccccagccccggcccggccataccagggcgtccgtgtgaaggagccagtgaaggaactgctgaggaggaagcgaggccacgccagcagtggggcagcacctgcacctacggcggtggtgctgccccatcagcccctggcgacctacaccacagtgggtccttcctgcctggacatggaaggttctgtgtctgcagtgacagaggaggctgccctgtgtgccggctggctctcccagcccaccccggccaccctgcagcccctggccccatggacaccttacaccgagtatgtgccccatgaagctgtcagctgcccctactcagctgacatgtatgtgcagcccgtgtgccccagctacacggtggtggggccctcctcagtgttggcctatgcctctccgccactcatcaccaatgtcacgacaagaagctccgccacgcccgcagtggggcccccgctggagggcccagagcaccaggcacccctcacctatttcccgtggcctcagcccctttccacactacccacctccaccctgcagtaccggcctccggccccagccctacctgggccccagtttgtccagctccccatctctatcccagagccagtccttcaggacatggaagaccccagaagagccgccagctcgttgaccatcgacaagctgcttttggaggaagaggatagcgacgcctatgcgcttaaccacactctctctgtggaaggcttttag

SEQ ID NO: 1378 - DNA, 96599 bp, Mus musculus
  misc_feature (3729)..(3748): n = a, g, c, or t.
  misc_feature (4902)..(4921): n = a, g, c, or t.
  misc_feature (7901)..(8020): n = a, g, c, or t.
  misc_feature (12187)..(12206): n = a, g, c, or t.
  misc_feature (36676)..(36765): n = a, g, c, or t.
  misc_feature (51928)..(51947): n = a, g, c, or t.
  misc_feature (56214)..(56713): n = a, g, c, or t.
  misc_feature (58367)..(58386): n = a, g, c, or t.
  misc_feature (63327)..(63350): n = a, g, c, or t.
  misc_feature (66416)..(66549): n = a, g, c, or t.
  misc_feature (67304)..(67872): n = a, g, c, or t.
  misc_feature (84883)..(84902): n = a, g, c, or t.
  misc_feature (91740)..(91802): n = a, g, c, or t.
  misc_feature (95348)..(95367): n = a, g, c, or t.
tttttgaaaggtagataaagtctaataaattctggaagacaactgagttatcacggtttgatgagagcataatttatattgagtatattttctatttattgctactaataccaacaaaaccaaaacaaacatctacatcattcagatataatattttctattaagattctggaaagaaaagaaacactcgtaactaaagaaaacttaaaatatctgacattctgtcaagcaatgaaaatcagctaatataccaatggtaacataagtacaaatccatgtcatgtgtatgtttatctccacacacaaaggccattgctaagcagcagagagtcaaggtatgtctgagcatgatggtggcagagcaggatcaaaaaagagcgtgcttctctgaacttgcatttgatcatattgtcagaacgcaagcctcctgtaaacttactatttattttcttatgatttcatggatactgagacattgataaccagagttcagcattttctgttgtgagacaacagtaaacttagccattgtgctagtctattgctgagactacagctttcttatagagaaacgcatgacctgaagggaaatttaagggttgtggatttgaataagagcaagaagtggtacatgggatggtttggagtgggggaagtgaaggaagaaaaggtgcaattatattataatctcaaaaataaaacagataaatattttttaattaaaaaagcagagataaagtgttttgacttggaaatagaaagatttattctattatatgcattcttttctggagattccagtatctgacgcttgtctcctgtgtggtaatactgaagttgtagaaacttttaaaacatcagacctgtcatctaaaccctaagagaacacaaacgccagcccagaatactatacccagcaaaaatctcaattaccatagatggagaagccaagatattccttgacaaaacaaatttaaacaatatctttctactaatccaaccgtacagaggatacgaggaggaaaacaccaacacaaggagagtatctacaccaaaggggggggggaacaagaaaataatcatccacaacaaaaccaaaagaaaagaatcacacacacacatataataccaactccagcaacaaaaaataacaggaaatgtcaatcatctgtctttaatatctctcaacatcaatagagttagtccctcaataaaaaggcacaggctaacagattggatatgtaaacagaatccaacatttttcttcatataagaaacatacctcaatgaaaaagagagacactacctcagagtacaaggctggaaaaaacgttttgcaagaaaatggtcccaagagacaagctggagttgccattctaatatctgataaaatagactttgaaaagttatcaaacaagaagggaaaggacacttcatatttattaaaggaaaaaatccaccaaaagaaagtctcaattctgaaaatctatgcctcaaataaaagggcacccatattcataaaagaatgtttactaaaactcaaaacacacatttagcttcacatattaatagtgggatatttcaacaccccacgttcaccaatggaccagtcattgaaacagaaactaaacagacagtgaaacaaacagaccttacaaactaaatagatttaacagatatttacagaacatatcaccccaaaacaagagaatatgccttcttcttagcaccttgtggaaccttctccaaaactggccatataataagacacaaagcaagactcaacaaatacaagacgaagaagctaaaaatatacagtgaaaaaaagaaagaatcttcaataaatgtactggtctaactggtggtctgtctatagaagaatgaaaatagacccatatttatcaccttgtataaagctcaagtccaagtagatcaagaaacacagtaaactagatacaccaactctaatagaggagaaagtaaaaaaaagcctcgaacacatgggcacaggagaaaactccgaaacagaactccaatgggccagactctctgatcaacaatttataaatggaacttcatgaaactaaaaagattctgtaaggcaaaagacaccatcaataggacaaattggtaacctgcagattagaaaaaaaaatcttcactaaccctacatctgacagaggccgaatgtccaaaatgcataaagaactcaagaagttaacctccaagaagcaaattgcccaatttagaaatggagtgcaaagctaaacagagaattgacaacagaagaatctcaaatagctgagaaacacttaaaaaaaatgttcaacctccttagtcatcatggaaatgcaaaacaaaattaccccgatattccacctcataccagtcagaatggctaagatcaaaaaattcaggtgacagcagatggtggcgaagttgtggagaaagaggaacactcctcgattgttggtgggattgcaaactggtaccctagacatcaatctggtgcttccttagtacatttgaaatagttttatctgaagacccaattgtaccactcttgggcaaaagatgccccaccataccacaaggactcatgctccactatgttcatggcagctttatttgtaatagccagaaggtggaaaccacccagatgcccctcaaccaaagaacagatacagaaaaatgtgctcaatgtacacaatagaatactattcagctattttttttcaaaaatgaggacaccatgagttttgaaggcaaatgaatggaactagaaaatgtcatctcaagtgaggtactcaagaccccaaagaacatgcatggtacatattcattgatgaatggatatagccaaaacgtacagaatactgattatacaactcacagactggaagaagtgcaacaaacagaaaggcccaagtgaggatatttcaatcccacttagaatggggtagaaaataatctcaggaggcagatgaagggagggatttgtgtgggagaagggaggatgaggggaaaagaagaacatgatcaggtatagggggagaggaaatattcagcctaaggggcagagaagagtggggaccctctagatagtaccagagatccaggaagtaagagactctcgggactcaatgggtgtgacccttgcaaaaattcccaacgatggggtgaagaaattcgaagactccacccccagtagatagatggggacaggcctccagtggagagacaggtttaccaacccatagtcaaaatttctgatccagaattgttcctgtctaaaagagctgcagaggcaaaatggagaagagactgaaggaaaggtgatccaatgtctagcccaaatttcaatccatctcatgggggagtggggcaccaaggcctgatactattactgatgcttacagacaggagcctggcagggctgtcctctgagagatcctaccagcagctgactgagattaaaatacacacatattatagtgcatggtagcaagtccaacatttttaaaaaatttttattatatttatttacatttcagccattgacccttctttcctggtctgtcctcccacagttcttcatcacattcttcctccccacttgcctctgagagggtgctccccactacacgaggcgtctcccttccgtggggccttaagtctctctaggattaggcacatctctcactgaggccagaccaggcaatcctctgnnnnnnnnnnnnnnnnnnnncattataaggtacatagtcataggtattttgtcatagcaacacagaacatagacggtagtcatcatatgtattctatgtactactccttaactgctattaggatacattgtaactgtcaatgtagttctgtttgttacaaaattacaatttaaagttcactttgacatcattttaaaatacaaagcaaatgtatactctaccctctgcccccaaagttagtatcttgcaaatattcaaatcagaacttaaaactggtaccatccactaaacaaactcagccttctgcagttatacatgctcctatttgtactggtgcatgtatgtaggggtctgtgtaatttgatcacatgtataactctaagcaatagttggcctaatcaagccatgtaactgcatcattgcttcaaatttcctacctgcatctacttctaattccatcccattctcttcctttttccttgcccagaatgatcagcagtatgttctccacaaatatgcactgtattaaagaaaaacatgttagtttaatacttaataaccttaaaaaataccgtgaatttctaatgtgtttattgtaaagattaataagaagctttagattcttattaattaattattaagtaagtacccctgagggtcaaggctttcccagcccgtaagtgaaactatgtatacacgggtagactaaagaagagacataccaaccaggaataaggggtgggccttatttgagctttgttttaagtattggaaaagacaaaaactcatgagacaaaggcagatgtgaaaattagtataacatatttgagaatatgttggttctcaggtggagccaacttttttttagatatggttaatttttatagttgaaaatgtgttaatcattaaaaggctagcttgctaaattattaccaaataaaaatatgttatacttgaaatcagcttcaaaagaatttatggtggatatagaatgttaaactgagaataatgaaacaaaatatgagctgataattgattaagacaaatgacacggtttactcaagctcattacacaatatctctaattggttagtattcttgggattgtcataataaaaagaaaaaatgatattcctgtgtaaatcagtacatgacaaattggggagaccattannnnnnnnnnnnnnnnnnnnctagtacacatgtttctcaatgaaaacaattctttcaggacatttgcgacttagataagaaattttactagaatatttaagactgattcccttcaaagagaccatactttgtccacaccgagcaatgactacaaataagaataggtctttggtgaggaaactgagggcaatgacacaattataaaaacattataaatatagtcattagctgtctttttaaaaaaaaataaggcctggtttataagaagccagtagagattatgcatgctattcgaaggtatccttgtaaatattatttgttgaaattaattttccattctcgactttcttgacagttttctggtctccccttcacttccaactcatacattttagctttgggttttgacattaggatgaaagatctttggaaatagtcacaaatgttttgaggactggggaggtgatttaatggataaagcacttacccaggcagaaaggtccaaaggtcctttgtattcctttatgtgggttcaaagttcagatctccagagcctacagaaatgtcaggaggtgtggcagcctcttgtcatagaactactctggaggtggagatgggctcctgggccactgtttgtgcacatttgcctgaactgacgatttctttgggaatgatagagcttccaagagtaaaatgaaaactcaaggaagacgacggctttgagcctccatatgcatgtgcacgtgctccacacaagaaaaagtcaaatgaagggaagaaatgttttcaaagtcaaatagtttattagaaggatgatttctacctaatctatttgttttgcggtgggaaggcctctggactattgcttgaaaagtttctcttctgatcgcatcaaccccaaagaacacgacccaagtcaaaccacgtgatctctgagaggatgcctgttaagtctaagattttaaaacatgttttatgatcctacaaatatcaagcaatcgcgcggtaagttgacagattgttttaaatctatacgaatttcagatatgaaatacaagcttgcaattactttgtctataatattagcatattagaattattaataaacatttgtatatctcattttcacagaatgcctagaaggccatggagatttaaaccttgttgtgtgctttgagagcagaatcagccatggaagtaggcagggatcacctttgtatgctggtcacatatatgagattcttcgcaaggatataatgcagaaattctaaaggaaaatttctaaatgtttatcaccactgtttgaacttacattagagtatctttctgatataatagtgttcattacggtcattttaaaatctgctaccccaggcttataaagcaatattatcatgtctttccatcaacaatattaaaaacattcatctctagaaaatgctataaagaagttgcactagaatgctgatctaaagatttaagtaagtggcaaattattatgtgacagactatgaatagattttaaaaaatctttacaaatgagtattataccttctcatgaaaaaaatactaatccttgaaatttaaccagtcacctgataatattttttttaattcaactattttgtcagggtatattttccccttagtccttaattatttttgtcatggttcctggtggttggcatgcattttatatgatctgaaccaaaactgtactgtccaattttgtggctactagtcagggggacttcctaattgcaataaactcagttcaaacctcactttccctgttccataaccatatgtggctggaggttaccatattacaaggtgaagatactaactatttgcactatcacagagctttctattgattaacagtgttggctcacattagtgagaccactgctgaggaacaggaaacagcagatgtgtgttctttatctccgagtctccttgactattgagatatgagtataggaatacatatattctgacacagagttaaagttacctgcacagcctctcagtgctggtgtgctttctcttctttgcctgggactgaatcttgaacattccttcccttccagaaaaggaattatgatatcagcaagtgttcagcaggtttgttttgttcaggaccatgatctaggctaatcgttgtctgcctcactctttactcaacagtagcccaagcttattttacaactagggtttctgttttagacagcaacctcagacctcagggtttgtacttgaaaatttgtcactagcacaagtaactaacatctgtttttacaggttcagggtcttcaggtctctgcaaatttctaacttccttttgctacagcagatgtttcttaattcagaaagtaaattttgttacatataaaaagataaaaatgcataaatagtataattatatagttatatgaactaaacacccctctcaaaactaaatgaaaatagtttgaaaactcaaccataaggctaaaccaggtacatttaaaggacctcccaaaagccttgatttaaaagtagtatatctgtatttagatgagttatatagctgatctaagagacaacaaataattctataactacaaatcattttaggttttaagtattttcatgaagattatatgaacataatatatagtatgtcatactgaaagtgatttgacttttaaaacaaacagcttattttattttttgtgattattttcaatataaatataaatttcacaaagtgaaacccatacaagggaatgtttagtagaactttcattttcttttcaggtattttagaaatggctcttgctccagagtaacaacatacttattgtttgggaattaaatttccccaatagatttcacagctcctaagaaatgaattagtatagtatattatgcaccaaagtgtatgtgaagaaaaagaaaaacgtgtggaagcttgggagaaagctagaagacagaggaaggacaaagggaaagagnnnnnnnnnnnnnnnnnnnnnnnnnnnnnnnnnnnnnnnnnnnnnnnnnnnnnnnnnnnnnnnnnnnnnnnnnnnnnnnnnnnnnnnnnnnnnnnnnnnnnnnnnnnnnnnnnnnnnnnngaggaagggagaaatggaggaagggagggagggagggaagaagttaatggagagaaaaaggaaaagagggatggaggagggcagaagggcagaagagaaagaggggaaacgatagaggagaagggagggagagaaggagggaaggagggatgaaggggaagaagggggaagtagaaagggatggagaaagggaaatagagagtgaaggagggagagagaggaagaaggagggagggagggaaggattgaaggagagaagtaaaggtatactaacttcctgctatttccccaaatacaaagttgagttgtggtaatggcacttattttcaagattctttgctgcacttaaaacataagttcatttcattcaatcactcactcctcgaccaagactgaagccaactaaatagctagtaatattcaccaatgaaatagtaccataaacttttctcagttttaaaatttgagaatgtttctctacacttaggtaactgctcctgacacaaggcctttgaaaagtggcctaacaaatattggtgtgtgatgtagaagtttgaaactcagttcattaagattgtgagtagctgttttgtacataagaatgagacctgatgggagaggttgggactaaacacatagttttatgaaatatgaggaaacctaagggttttgttatgacgcacataacaatgaaagacctgtttctttttagcaagctcctaaaaagtcccacccgtataattattaaataaaaacactcacttattcagtactcagctagcttttaaactctgaataagagaagtacacagtgagagaggtgcttgcatggtttccctggatactgggtgatgccattcaggtctatgttttatctgaaagtggagccctgcagggaaatgaggcttgttgagtggctgtttagacatagtaagttaataggaaccttgtttattctacaaagcgtttttattttgacccagtttctttctctcatcacacccaagcactgtaaacagcaatagtatggtagaacaggtactttttgcaactcccgttaacttcacttaagaaatcatgactgccaaagtggagtcttacaagattttgtcctagcatactccttcttagcacgctttctagagttggactgttaaatttgtgccagatacatcaatgaataccgcctgcctatctttttcttccaactgaatttacttatctaaaaaagaaatcgtctaaaaattcacctgctaataaatgtaaatgtccttaccttaaccagtcattaaggaataccagctaaatcagggtcacacatcaagggtctccacagacgtgagtgtccattttaaatggtacagtagcattgtgggttcccaatcgtttaagtgccatgaccatccagttttgacaccgagtctcttagagttacaagctttctaatttgggagcatgattaatccctcctatgtgataagttttaaccttctaatatttctttggattgaaaaaagcaaatgagctgcggcaaagaatggcaaataactacagtgcttaacacagtttaataacctgaaatgaagcaagtgtgtgctatgtttccattaaaaagtttccagccacaattaattgaacaaaaacttgtcttgttccaagattattcttggaaatgtaattttaaagcctgtgtgaaatgaggaaacttaactttttataccatatgaaagcaatttcattttttaggaatgattttggatagacttccgattggatattttccattggaactaacagtgtagaggcttggggtggggagagagcagttctgtgttcttttgccagcactgacaaaggtctggttgtcaatgatacctttacagctaaatttactccagagtgacatgaacaggtgcaccctggcctgccagacacttgtgcagagggatcacgcatctcaccgcttgacgatcaagggggcaaagcttcggtgttcatagaaaaggagaggaggcgagcgcagcccaaactggggggtttctcttcaaagccagctggtctggctttattctacaggaatttttttacctgtcagagtttggacaacaaagccctcagcaggtgctgacgggaacaacttcctggagaagcagaaaggcactggtgagtttcaattgccaaaaaatatgtacatttttttaatctctaaaagttgatttcgttttcttagaggagacagtgctggggtacctctgttcacaaggctgatgatgagtgagctggaaatggagccaacctccccaacagtggggttgctaggtgcacaaaacaacgccaacaacatttgatgggttttgagataataaaatgagcattttgtaatatatatatatatagagagagagttaatattactttctgattactattttaaatgtgtgagaataacgagttcatcacacttattacatgagactacacaatagcattttagtttcatttttatctagttctgatcttctttgaataaaatgtgattttccaatgaatttacaaaattaaattgtgaaatggcacatgctttcctcaaaaatcccatgtgctattaggagtgtacacattataagaagatgattaaaatacaaagttaattttatctaatgtgcatttaaaacatctaagtgaacagaataattaataattaaaaggaacaacattttctcatttttaacagggatttttttaaagaataaaatctttagaatagatgatcaaggaaataataaagcatgtttttacatcatttatttccaaaattagtacgtatacataacttagtatttttttattttgtgaattcaaaagtttggtaaaaatattttttcagaacaggattttaattaatgcaaaagaaggaaaaatgagagcacatgttaggacatatttttaaaaagtgattctatttcaaggactcattcttttaactgtgcttcacagcatttctctacacattgttgtattatagcaaattgaaaacatttatttaagcaaggaagcagctcaaagctagggactatacatagcaaacatatgaaaccattttaataagtaaattccatattcacaagcaacatgggctaatgaatgtaaaagacacaacggcatacattgatcaagaatgctataaattattatgcattaaaatcaattttctgggctgtggggggtaggattggtacttaagaagagaaaagcttctacaaaaataaatgactaagactatgaagcaaatgttttactctgatggtgccataaataatttccaatctacatatttaatacatatttgtaaagtgggaaaaatataaaatctgacttttgttaatgaccatcttatctaaaatatttttgaattaagtgtggtttggacataatataaacttatggatattttcttaaagagacttaacttccctttgaaaatacgaaaaaaaaatatttttaatgaccaaaaatggtctctagcccaaaatctaacactcaaaatagtagtctcatctacatgcatttctgaaatatgtatttttaaaacactgaaactccaatttactgtttattataaaggatggcgtgtataatgatctccagattatcaaacatctttacttaaggcttcgcatagggcttcactgctcttttcacagatgcattgtcagacttattgctgattctgagatggaaatcaccagacataccaaattttaaaaaacgttcatcagtctcttaaagaataagacatgtgaagcaagatattttctggtttgttaaattctctgtttttaaagaaccagcacacttgcctttggagaagaaaattgttttttacaaatcataagctcttgggtctactttggaattacacttattaagttttcatgtgtattagtgttggctaaatttatcatactctcattactaaacactgcaacagcaataaaacaacataaaaactcctgccaaactattggttatgactttcaactttttcatgggtagtggaacctacattaagatgttaggtagagtctaattatacaaaatatctaaaaatgtatcattttcattgtgccaggaattcagactttgtctaaaaagtccacatttttnnnnnnnnnnnnnnnnnnnncttatcccctgtttcccacagtgatatgtttttctttcatactaaatcttcaataccaggtcacaaaatactcactccaactcttccgatgtatacaaactggtttctttagtaagccttagtgagaaatctcagcttaaaatgacaccgagtcagatctgccctccactttaaaagattacttgaaatatatcttcacaacataaagataattatttcaggggtgggaatttaatcattctcctgattcagagagccactcaaaagattgttttgttcatattctgtattcataagaaagctgttgatttttctattaattaacaattattaatgaactgtggttactagacatctagtcaatctaaagcaacagagtttccatgtaaaatagtttatttgtaagtatttaaagaagcaaaagctattttggcagctttatatgtacctcctcattgaccagacacctgactgacaactgtcatctgtccacaggccagatgtaatttaataaagataaaaattgcatgttgctcaccctgctgataatgcgtggtgccagtaagtttacaaatcagaataaccaaactatggacaagacaaataaaaggaaagcggtggcttctgtctagcatccatcttccctcgtggattcattttccaccccttcttacttgtttaatttcttttcaagtctatacatgtttcatatgtagacagagttaatttccttaaaggaattgtcagactcatgtacacactgatcaaaatactaagcacccaggcagtggtgtcttagataggtagctgtccttgagtctgattactcttgagttcgtgaaatccttaaaagccacatgaggcaggctttgaagctccaacttctcattttaaagtaattccatagaagaataaaactgaacctaactcaaagtctctggtgtgaggaggtagacccagatttgggttgtctctcaggcccatattcagttttctttgatttcagtaatatggacaatcaaactgacagatgaaacgtatcacgtgaaaacttacacgtgtagagctgctttcaaaaccttttcagttactaaacaatacctatacaaggatatatttgcttaccaggacatattaaatggtggataaagcattaagaataattgaagtgtgcccttttgaacttctttatcattcaaattgatttatacaatgagaaatacaaatgtattttaaataataatttttaaaaatcacaatcatatgctttggaaaatgaatatagaaagcaaaaatttagccttatctttctgaaagtttagagaacaattaaaagcactaaatataccagaacataaccatatatatacatatatatatatatatatatatatatatatatatatagtatataatgcaaaatatactaaaaagctgattcagcaattaactcacttgatgtgtgtaggctaataaacaaaacaaagtgcagcccaaaggcttcatttgtgtgtcttagcaagctcagaacccataatattcagtagcattttattaacatatgtatttgacatcaattcaaatgttattgattatatcaactactattgatatgtttgttgatgatcctgtacaataaatgggttcagtcaagattaagaatatcgatattcaaataaactctcattttctgccctctagaaaggaaattgttcagattacaatacaactttctgattttcaaggaatatatcttatccttggcctttagagccgatcttgcaggtaagaagtgaaactttattacacagacaaattaccaaaacaaaacaggagagaaacttaaaatattgatatgatatattgataaaaatggtggctactgttttctccaaaagattgttttaaagtaatcaatagttctatgactaatatcgccacttaacaactaaatttcatacctaaatttataaatgttatttgctcattatattacatttggtccaaagtaacatcagacattgttcagcagatcatttgacaatatgcaatatcagcatgtaaatcatttgcaaagcaaattaatcaacagagaagtaaatataaccatctccagctatgttcttatttgtggaaaataggggcatcaaaacaaaatacacaaaattacaggatggacaaagaaacttagtcattctcttgcatctcaaagagttttaaggaaagtgagctgtcccttatctacttctaaaggatcacaagtatttctcctgagctgatgagtacggttcaaagaccaccctggcaggagtgcaaggatgagagccctagcccctgtttctgctatatactattgtgaccaaaaagaaatcactaatctctgtgacacacctaagtgaattggggctttggggatagtaatatacaaaccacaagacaaggcgcttcacctaaccaaggcagtattctctctgcttcatgggaggtgtcccaaaaggactctggaccattgttgcatttctagctagaatggcctgtcctgtgttctccaaattgctatgagtcccccaaatgagggaaatctcaaactggtgtggagctgggaagttaaatggtgaaacaaaaccattctgcagagcatttctgagtaagcacataggagaggactttggtttcattacaggaaaggacacatctcaacattacatcactacatggaactctgaggttcagtatgtattcccatagctaaactgggtgaaaatccaatgaacatttcatattttcagttttgtgaaatggaaggaacaatttaagtaaaaaatagttgtgacacgtaattgccataagccaacatgataatgcttgttttgtcagataaaaacaaacaaacaaaaagacattgcgtcaaagatgttctattctgaaacactaaagatacctgcactaagagcagcagttagatatgaagagggcctggatagacagcagttatgtatggagagagtttgaaggcttgagcaaccaattccaggagatggtaatgttgagaaggacttttctggtttctgggcaggcaaatccaattactaaattcttaagaacatctgaaagtctccttcctgtcaggtccctctattcaagtcaatgagacaattgctagccttatctgcagtgagtttaggctcacgagaaactggcagtcacagttacaatcacatctgtgctccatctctaatgttaaatatccctccatttgatgcccactttacaggtttttctaagggttcaggactccatccaagaataaggtttttactcagatatatttttaaatgaaccacaaattaagtaatttaggtccccagatgataccaagaggtcatccctgagacatacacacaagtcacatacagactgaggagggttacatttaggaagacagtgggtgtgtgtgtgtgttcatttacatatattcatgcaactataattaaagaaaaagaggccatgaaattgagagggagggtttcatgggagagttgaagggggaaaaaaaaggaggaaaaaagaattatatttcagaaaataaaaattattcatataaattccccatcttgcttaatcaccttttattgagcagtcttcaatgaggatgttatgtgtagtgtgtctttttgtttgtgtacaatctgagcaaaactgggtcttgaaacaattcatttagcttaaactcttgtccttattatgttaaaaggagttcatacacttgttgggattgcttgaaagaaaaaaagtaacagagagaaggaggagctatagcattagaaagacttcacaggccgggagtggtggcgcatgccttcaatcccagcactctggaagaagaggcaagcggatttctgagttcgaggccagcctggtctacaaagtgagttccaggacagccagggctgcacagagaaaccctgtctcgaaaaacaaaaaacaaacaaacaaacaaacaaacgactccacagttcttataatactcttgccagaaggcaagagcatataacaaaatgtaagtgactagcttccctttctccctctctttctcccccctttcctttcttccatttttcttttctttttgagaatcttgcagtccaggctagcctcaaattcaggcaatactcatgcctcagccttccaactgcttggattataggccaatgacatcatacttgatctctaaggagccatttgaaatgaagattcctaaagcatgcatgacagttcccagctgcacactgaaggctgaggcagatctctacaagtatgacaacaatctggtctacataacaagctataggacagtcagggatatgcaatgagacagtctcaaatttgtttttgttttttgttttattgttgttgttttggttattaaatcaattttcaaatgcagctttcaaagatggtgggttcatggacaaggagtgattcagatagccagggtttaactcttattgattctgaggtctttcacctttgcttgcaattatcctctcaaatcttctgagtgcaacattagttcttataacccaaagagctagaaaacgccaagtagtgtgagcccatatcctgagagactaagagtaacatatggctacggctagaaatgttccttttgtttttaatcattgtctaatatattgaatgctacactgcttaatgtaattcattcacctttatatttgaattggcaaatgataaatatccctcaaaatgagcaaagtcttgatcttattcaagtcttatactaatttaagacactaaataatatagttttaagtagacaaaatggcttcaactaactcttcaggaaagttattttagcaaaataagacagacagtaaacactctaagaatgcttactgctgatctggagaagcagtgggcttaattttcttctgggtgaattgttttatatccataggctacatagactagactctcaaagctatgtaaggctgagttaggaacatatggatggtaaatataaatctttcacagacaatatatgaaacaaaccatttttgttcattatgaatcatcattatagtgatgaataagaaaaatatcacataagttatataacaatattttcagtataagatctttgttggggaatttaatctgtggtggtttaaaaagacttgaaaaaattattagaactatcccatagttctaaaatgaaaataattctacacagaaaaggtaattggtcattaatatgaaaggacccttgtactgacaactgagaagaaatttataactgaaaatgaaggatgaaataaaaagaatagaagggatgaagtggaggagaaaaggaaaaagaagagaaagtagaagagggaagccatacgttgactgactattgattgctaaaagggtcaagagaaaaaaaaatgttgcaaaaatttctcatgaaatttttgacacaagacaagccctcttctttccagtcccctcagaatgatgatgattactacaaaactcactggcctggtaaaaatctctccagtcactcatattatgtgaccacacaaagttggagagtattttgttttcattttcattttattccatttttatcttattttgacaaaaagttatctatttgtgatttttatagagaagacagagatagggcataacaaatgttgccctttgacctttcaacgctcctaaatagtatgccctctgttcaagaaaaagtgcttattatagagggttctttaattcccttcaagaaattactgagtaactaataattttacatctaatgacttttaataaaaaggaatatacatgcagtaagctaaatgagaacatcgaagctataacacaaaggacacacattttttatttagttggtgtgtcactcatgtatatatatatatatatatatatatatatatatatatatatatatatatatatatatcatggagagagagaagcaaacaggatgggaatttaaagaatctgaagggcaagtgcatgggttttcaaggagctggcagagagctcatcttccaacctaacattttcagaagcaataatttttttcctcaggtccttcctgtgcatttgcccttacttccttgtgtactattaagtggttgtcaatggaatggacttgaggccataaaagcccctttagaaacacagcaggaaatgtatggacgggtttttctcttaaaagtttaaaaatattcacttaaagaggtaatttgttgatagtgtattgtggataagtcagtggaagcagcagattctgataaaatataatccatgggaattctggggcttacccggctgctgaggatgaaaggaccttgtaagtcacatcagtagaaggcaaaaagaagtagagacactcacaatggagctgttattgattttaaaagtgctactggatgagatgagcgttccaaggtgaaagaagggcaagttgaacatgaatgaagggaagggcataagtgggcaagccttggtgatgttacacgactgccggacaagtctcagtgacatcacatggctattgggacacaggggagatctctgacttcataggagccaaaaatctcagagttgtagaaaatgactcatcctgtgcacttatgtgcagactcctaagtccaaatgcaatgttattcactcattaagcaacttaacaaggtttctgagataaccaaaatacacaatcatcgatccttactctaggtaagcattatcctcacttatgtgaatctgataaaacctagtatgaatataaaagaaaattatattctccagagcactgacaaggctaatattaccacccataaaatatgaattatcttagtgtaatatgtgctgatttaatcaacatactagcataaatatattttattttaaatatcaaatgaaatcatgaaatgacatagttaaagtacaaaacctgagagaaaagagtatatgttttaaatatcattaagtatctggtagtaatatgtttctaaggagcatgagagatagttgaagatgaaataaaaatgtggaatactttattggacattttctgtaggccaggcaaaaataaaatttcatatccttctttcagcaaactgttagggctaggtccatcttctctggtaaatctgggttctaatctcctgtcaggtttacctttctctgcctttggctctctcctatcctatctcctatatacctctcctatcctatctcctatatacctatcgattagtagcactgacttccagacttggccaatgctgcacatcaaacctctgtcttcaaaggctatacattccttccagaaagaagcttgaaattgttcttttctatctgtagttcaatgtctgcttattgtccaaatgtcaaacatttgatgctttatgatcaaatcctcgttttcaccttatttaaaacatgtgctttagatttacttttaacaacaacaacaacaacaacaaaagtcaacaataacaacactgattctttagcacagagatgcttctaaagaatacaaagcaaatttctaaggagacctctaagggactcaagcaaaaatacctgtgagtgactagtcagataacctgtgaatagatgtatttttcagaagtttattccagttgcgtgattatatcaatccctgctgaatttgattttccaaaagtatcatagttaagaacagagttttggaagtgaataagcctggtttcatgtcctttgacatttatggactatctgaacagacaaagtaaggcattagtttacatttttgttcttaaaatctatcagatagagataataataaaagcattttaaaaggctgtagtctggataaaagtaataacatttatagagtaattggtgcaatctaaaatgtagcaagtggtcataaaaatgagaaatattttatataaatactaaaaatattgaatttttcagtatatatctcaagtattacacctagattataaatacaattgctttgaaagactcaaatataaatagagcaaaggcgagtaaggtctattggtttgggtctttggctcaaagaagaaaccagcaagaagactgttgttagccactgatttacatttattttctttctgttgttgacattttagccttcattatcaccgtattccaaaaatatttaggaaactttcatccaaaacaatgaaaaatttcattctttctaggaagtgagaatattaagataattatgtatatacctatgtacaatctacatagaactaacacctattggaagcagatattttgcatatttctttctatcttaacaaaaaatttaagttttttaaattactctgcttaacttaaatttttaggttataaataagatattttaaaaggatatatactctcatttataaatataacaatcattcaaaattacataaaaagttagagggaacacagtttgtcatgctagccccttctttctagactccttttctcttaataaaaatgttaccatgaacacttcataaaaaattctttaatgtactgattcgggtttttctgtaatatatacttataccaatagacaaatgagtgtcccactccagacattactaacagtccaaagaggccatgtttttcatattgtatagtgtaatgcagaagtgatatctagcacacatgcagcagaacagagtactgcccttagatccttcttgaacagaatgctacattaggcattccatgagttcccccttcccaggaggcctgtgcccagtctagttgccatagatggccatcagacatttgcaatgacatcaggagactatctgagcagccactgccctaaagaatctgctagcaggagactggggatatcagtgtcttcttggccgacaactgcattccaaaggtcaactggggtgaaaaggatgggcttggagcatctggtgcgttttcagccacaaggcagctaacaagcagagagcagccgccatgagggctaaaagtagcctggagaccacacacctgtgaaaaagtcaacctgacccaggaaaacagaattttaagtctagagagatttccaattcttcaaaggtaaaatttcagacctgttcccgtcctgaatcaatcctcaagtctctgatgacccacttacttttctatgacagccactgcaggagtgagtaggggcttggaagtgtggaagtgagaattgttctcacagaattactgcagtttgttttctcagccctgttccttgtcaagcagctcattcattcctcatagcaaagcatggatgatatcacactagagtccacatgtggagtatacctgaggaaaccaagtcaccgagcaagaagcttggggtgtgagtgatcagttagcctgtgttccctcagttgatgtttggctatattcacttcagagtcccatcagccttttcacttgtaggctatggagaagctgagcagctatggagaagatgagactttcattgtctgcagagcactgaggcattttcatatagcatcttagatttcaggtagtatgccaagaatcctttcaaacatgagcaaacggtaaattgacatgagacatagatattagctcaaatatggatcagtccaatgttcaaaagaatgatcattttagcattattttccatcagtgaatatgttgatgtgaacagagatcatcttcattaagggttaattaccataaatgtaccataaatgggcagaattaatatgaacattcacatgagctaacaatgaaaattgtaaagaacagatacagcaaaatgaatcccctagcaacctattgaagtcccaaagtttatgctcagtctaaaatctgatagcactggttgtttattacccatcttatgtagtattagttgtaatttcattatttacattgttaacatttcagaccaaatccctcctttgtgaagtcagtgaatgagataattttaccaaatgtgaggaggattatagttggctagcaagtctcacctcagataacacctttttcttttacttttatattgtttaccatttattttaaaagcataatgctagttctgcataagttttaagtacaagtaaacacagtattatatctcaattgttctctttgcaaaagcattatgtggctgtctgacactatcaatcgtgcaggttaggtttgggagacagtgttagtcctcatgcagcttatcctttatgaaatgcatttttctctagggtgaatgcttagaggcattctctcttaaaaaaaaaaaaaaacaaaaacaaaaaaaaaaaaactacctaaaagctatcaaggcaccttctagtacagtcagtttccctggccaagccagccaagatgtcctggtcaacagaaaagatactgaacccatcagaagacttaagcttcgttccaattttagagatgtggatcacttaggccttctgagtttgacccaccttccttatttaaaagcaacaaaaaggtacatggactgggtatttcccagtatctttctcagcaggcaagacactaaaattcagactttaaaacttttcacgttgctgccaatgtgatgtaatatacttccttagaaatgcagactatcctagaaatctgcctgttaccaacataacataatgcagttttaagcgaatattttcccttaaaagtatggcagaatgactccatgtaataaaaggcatatttttatgcctacctcagaggtcccactacccacacaggcctatttagcagttaaaatatggacaatgtgattgaaggaataatttttttttagttttgattaacttggaaggccaagtgttagtctagcatctatcctatttgtagggaacacacatctttctttgggttagaggtgtagagccctgtggtctaaaccattgatgtatcctctctactacacttgctctctttggttcagcaccctagacaagcaaagaacctcacaagattctgcatctcctgatggttatttttgcacaatatcccaacactgtttccaagtggtaacaaaagaaagttgtgcaagaggaaagaaagtcttctcattcgggtttgctgtgaattttccttagcatcctagttctctttctactttgtgatctttaatataccatgacctgcatatactcacagaggtagcttaccttctggagttagtggttggctttaaggttttaaaaatatttctgagaacctaggggcttaattagagtttaaagctaatttggggccatgattcttttcctattagtctataagatttgttacaaatccaggatgctataggacagggagtttggacctgcccaaagaccctctttttcttcctgattgcaaagtgcttatgatgcaccaggtagccagaaacgcagacctcacagacctcatgccagcactttgtgagctgtgtgggtgatgggttccttttccagaccccgcccccccccccgatgtttatggagatttctcaaagctcatctccagttcctgggaagaaatgttcttgggatcctaaaaaacagaccctcctagaaactccaccagcgccaccaccgcgcgtttccaaagcacacccactgcctttgagccctcctccattctctggagcccatcacgctccatctttatcagcacaccaccagtctctttctcccaaaccaagactctccagccgaaagcatgccggcacaccctttcctgtcccgctgttgaagacatcatgcccaacccttgtgaacccaggcccgctctggcagttctggcctcctccgcccgtcccggggctcactcacgtggcacacgcagcgcccccccttctaccctcaacacacacacacacacacacacacacacacacacacacacacacacacacacacactagcagcctgggagctctagaaactagccggggaaagagtccccaccccctcagctccgtctgccggagaaaagtgggtgggaggaagttgcgacccacggagaagagcagataggaggggagagccatgtcggaggggaggaccagcagtaattgggtgacgttgcagccgttgtgcctctccagtccgcccagccagcgggtcagctttcaacacaaatcagacagagggattgcttctgcctgcaatcaataactcagtcgagtgagctgctgaaaccagaggcgtcccttgtctgctctttatggggccctgcggactgaatcccagcccctctgcttcacaaacaaagaagtgggtaccaaatgccagaggaaaattttaaccccaaacttccatcgcatcccctggttacgatctgttaaaatgaaaagagcacggacctagtaaggtctctagaagaaagggttaaagggagaaatctacgccttaaatttcaggtctcctgtgatatgaaatggagtagaaccagtgtttcaataagcatttaacaatgggaagagaagatgtaaagtcccattaaatttagctgtccccatagatgctttcgagtcagccgcacacttataagcaaattaccaatcaagtcttatttgcacttactgatagaagggaagaagaagaaaaaatgtatcatactttgtagaggagaatttggaaggggggtgttagataatttattacagactttatttcgtgaagagtaaggttaagaggtcctaggagatatatcgtgatcccaacttaataatatacattaaagccaagcaagaactgagagaaaaggatgtgtcagaaaacttgggtctgagtaccagaccaagttgagattaaggcatggtgggcctgagcttgaaggatataagtccttcagttcccataaccctaaaacaaatactgcccagattcttcaattctctgacactgacacaatataatcaaaaataaattataaggatggcaacccagatgaggaggttttctaaatgactcctcattatgaaaagtcctgctcagacaattgggaaaactgatattggtccctgttctgctgagccatggttggtccttgaggggtagggtgggggtactagtcctacgttaaagccaaggaaatattcatgtgtgtacaaaagccatggaaacctagtctgagacagagattagaacacaggagcgcttttctatgctctacacaactaaagactgctgcttggaaagaaaaggttctgttactaagagattccatatacattgatgaagccacagcattaatcccaaagtttgcaagacagggcttctttgtatagccctggctgtcctggaactcactctgtagaacagactggctttgaactcagaaatcgacctgcctctgcctcccaagtgctgggattaaaggcatgtgccaggactgcctgacaatcccaaagcattctaagtgggtctttaagcaatgcgtaaaatgagcctgttgctgaaaaagtttagacattattacaaatcattacttagatattattccaaatatctccctgtttgacaaattttactagtgtgattaatgatgaattttactttacttttttcttgtaatttttattcggatataaaaaaattaaaggtagaaatgtaaagataaggctaggctccctatgtaggaaatgaaccctacaatgaaatcttcccttgatataacaaatcctttgtatagtacagattctttagcaattcagtctgcgtgctgtgtggtcagcttggaataacactgtacctcatgaatctgtgaaatataaaaaagtgtgcactattacttttaaagttataggcactattacaattgatcattatttgggttttaaaataataagtgttgccactttagaagttttaaatcacatctaccggaatctaatgtcagctttaaagaagataactacttttttttaatatacttgcacacttttaaggtgccaacaaaagcattgaaaactgtgaagtaacctctggagagatgaagtgaagcgtggaaggccaatggctgtggcagtgaagaagtgcagaaggtgagtgttcacatttatcgtctgccacaaacttaccacgaaaggaaagccaccagtttctttgtcttgaagtatttatttaaaatgttggcatgtgtgacagtgatacagttaaatggccatgctcttctttatgatatgtgcagtgctgtggcatggtggttgctcagagctcctaaaaccttccaagggccacctttacaagtgcctactacaattaagctgattcctaggtggccatgtacatcatcataggacaaactacaaagaggttaaaatatcttttacattgtggaatttgaatcttaccatgtttctcggatttttatttttctaaattttcatgttcaattatatttatgatgaaagtattctggctgaagaacaaatactatacacttgaataatcttgaggggtagattaatctatatcctttcttcatctcagggtaggttgctgtggcaaccgccccagctcactttaaaataattttttaaagctcacttcaagagctacacccagcgtgggccaggcttaaaagcaggcagacccagtgcatagggctttcgtagactgctgctttaatgtagggaggcagaagaaagggagctgaagtaagatggctcaaaacagaaattggaatgttagctttgagctgaaacaatcaatcaccatgctctctgtaacttcaggtgtctaaatgcattgtgaaataaatccttggatgagataactaatgtttatttatatttaaaattaagcacttataataattaatgaaaggaatatttgtaattacacacattcagagagagaaggggagagggggagaaggagagagaggaagtgagtgagtgattgagagagagagagagagagagagagagggagggagggagagggaggtaaggagaaaggtggtttaatggcaggtcaattctagccatcacttcatcttctttattaaaggaaagtttccttttattaaatccttagcttcactccccactgatataaaagatataataattatgattattttcaagcatagaacaaaattggagagctcatgcaaaccaggaaaccgaggcctagaaaggatttatctattaggaagacacttttagtgttttcaatgtaaactatcaaaccataagtaaaaaagttagtagtgctctgccacagagtcacatctacaaccacaaatcccaaactggatagagcattctaagtctctcaacatctagaacaaaatacttcctacacaagaaaaatgaataccattaggtagcaaggatcaccagtttaggtaaataaaagtaaagagataatgtgtgtctggcattacttaaagacaaatataaaacacactctggattaacaatctcatggattactactaaattatttacttatttatttacttatatatatatttatttattttccacttcagctacaaggtttgtgaggaaaactaacactaatcttaactttgctcacacatcattaagaagctaaatatacaaagggggaaaatcttatcttttcaaaggccagctgtaatacattccagacccaaagtttcaaatcatcctcacctggactggacatacttttaaatgtttacaatattgttgataaatacgggtttgttacaatacttattactaaacaattctttgacacctggtggggaaaaataaaagtttccttttgaaggaaaataaatcaaaactgaagtgtgctgtggtaagtagaaactttgtctataattaaggagaagagcatgattgaattcatgtattggctatatcaactctgtcatgtaacataggccattatagttcattatactaatttaaagcactatgagaataagttctcttggtccttcttatagtttgctctgtgaggatctttgtaaaccttaaaaataatctaaatttttatttatatcaccatatctaggtatgccttagcatgcagcatgtctaagctcagagcttgtacctctaaacatgccgttctgtttatataaactcatggtagtcacacttgctatgtgaaagaggagcaaatacaatatagcatagataccattttcaaaagcagaacaaacaaaaaacccaccatgtcacaaagcttgtgctctgtgacagcttgtcatgctttcctgtaataaaatcgcagtactaattaatagtctcagtggtaaggagccagaggtttgaagattgttcccatgtagtttaacttgcctgtaaaaacaactttctgctttcaaatgaagccttccttcggagggtgcttaaatgttgagtccactgctctgatagaagctactaacttcaaacagcacaatgaggcaggaggcttttttgatgcacaatgcccctctgcattaaaatagtactctgcaggcctactggagagcttcccgggaaattcagccagttactgggttaaacatatactttcgaaaatatttttaattagctagatatttctatgggctactattgtctactcttgtatcttctacattatagtactctgtgaactttctcttcctctaatcatagtattaaaaattaaatgttcatattttacacaagctacagtactcctggcatgcaatctttcactattttgagaatgcatagggttgacttgtatatagttgatatatttaatctttagctttttaggtgtggtcgtgatatctagtaccttttttttttttctaagtatcaattctttgttaacctatatttttactatggaaaattattcgacagcttaaaccttaacctaagagttcttatcagtgtctgctcctgcttcctgtgcagctgaaactcttcaggataagtgaagtcacccgctatctatcggtcaggggagcctaatgcatttgggaagttgtttttggtttacttgctaatgacctggataaagtccagtaaggtgtggagggaaggagggggcattctccgaggaagctgtcctctcagtaaatttgtccagattgattcgaaagttaatggcccggggataaagtcgagatttcaaaaacttgtaattaatttattactaacattggaggatcctttcggctcactttctagcctagccctcctgactctcaaggccaaaagctttatacattctgggcgggcaggaagcgcacgctgggatcgaggcttgcagacatcctggatcgtggcttttacgcgtgagtaacggaggcgcgcgcggaccggagcaaggatgaagtggctactgagaatctaaagggggcgggggggggggagtcactagagcagctcttagggtcgcgctcctattggtcagaaggaagatctcgacttcagaaggactttcctgctagctggcttgcagcctccccgggggagcgagcgcgcaggagcctagcgtcctctgtagcggcggggagagaggcagggagccgccgctccccgtgttgtcttccctttcatgcaataaagaattgtcattaggtttgcgtatggcatgtgccattaccccaccgtaaaactaaaattagcaaaatgtcaggaatggaaagattgattcaccaagatgcaattatcatttaaaagtgcttgattgaggtactgatgttcagtgatttattctgcataccatatacataattaaagtagtgtagtggagtaatttatcaatctagttgagactggaggggtgaggagggagctgcagtatgtttgttttattaaaatgttgcgaggttctagtcccgccccccttttgcaagagtgaaactgatgatttccccagctcgggaggagaggcaacggtttgggctggttgggatagagaaacggaaaggaaaaggcagcgccaggcaaaggcaagaataaaatgaattgggggacaggggtagcaccggagcgtacgtgctgcttagaaccccagccccgtgtgctccgtcttgcttgccgcccccgcgtcccctcccagtatccttacattcccccccaccccccgctcttttacacgacctatctaaggctatgagctgctctccttttcccattcgtctccagtcacttccttcctggacacagttttctggacgagtctggttacttttaatcccaccggccacagacaaccactttctcctcctcttccacctcctccttcgcttcctccaccttcctcctcctcctctttctcctcctcctctttctcctcctcctctttctcctcctcctcttccagcggcttcggtgcgcgcgcgaatgcgcaagcccgcgcgcgcctccccccttgcccccctctcgcgcgcgcacacacgcacacttcgtctccagctctctgctcgctcgcctcgcagtcacagacacttgagcacacgcgtacacccagacatcttcgggctgctattggattgactttgaaggttctgtgtgggtcgccgtgcctacagctttgaatcaagtggagaagcacttcaaggctggacaaagtaaagattattgttattttttttctttctcttcctctcttttaagaaaggaaaatattccaaggactaatttggtcgtgtcttccttcatgtaagtacctctgacatttctccaaaagaatagaaatagcttgtgtattgtctctgaaatctgcaccaatctcttccaggcactgggtctatctatccaactcctttctggaaggcttaagttaaggcttgttgtgcattcttttctttagattctacgatttccttgtgtgtgtctgaaagtaactttttagatagtagtatccgtttgccatctgctattgaattcacatctgactcttcctgtcacatcagtttgtttaaagtttcaagaagttagttcctgtcattagcatgtttgatagggtggagaacgtggatactagtgtattttaggatttcacagactgttctgtgaccttgaagtcgctgtcttaaaatttagctcttagttcactgtggaaagatgttcctatgagttaccccaaagactggttttccctgggtttggattctgagccactagtccttgggatgactttaagctaaagcagggctgtctgccagaggccaccttttgtgcatcctcttccctcatcaaagtgcaggcttgaaagagtttaattggtggggaccagaagcagttgccctggccatggtagtctgtgcattgcacagttcatgtttgcatttcagcatgtgcactgttgtttagatcaagggaaatattaagctatttaaaaacaaacaaaactaagtcacttagcctgccttctgtttggactttggatgaaagttactaaactaagtgacaaagttggccgtaaaggaagtctatagagacggagcacattgcttattgtattattgtgtattatgcaagtgtttgagtgcaatgctaatgtgacttcctttccagagcaaggctaccaattcttaaggaaattgttatgtctgagccattttgtactgttctagatgctatggttatgaaccttttccctcacatttttgaaatggatgtgatgtgttctgtataaaacattcaggatgtaaatgctgacagtgtatgtagaatcaggctgtttgccagttctttaactggtccttggtggagaattgctttaagacaaagtgcattttactattgttaatgtgatagtaactctaagggtaactgccttatgaaatgcttcgtgactatatgtgttctctaagtgctgtaaagaaaactccagtcgcatttccatgcctttccagaagagtggcccggctccctccacaggcaccttgcaatggaattgtgttgcagagtaaaaatgtttgtgtggggcatagtaatccccctcccctagagatttgctgggacttgaaatgtgaccacctgtgagccacacttaaccttgaagccataccgattttcaatttatagataaaatttctcatttaatttaaaaaataatgtcagtttggctagtcttaaaagtagttcaatatgtataagtatggcaccaatggtatgcttgtgcagctattgagtcaattacaaaaatgcaggcaataaaccacgttattatcatctagtataagcatattaattattgaatataaaagtagccctaaagcaagtgcatggcaggtaaaatgagttgtcctcaagtcccatcacaagtgggaaaaaaattcctgaaatcaatgaggttttgtactatttaaaggataatacatttaatcctgtatcggattctgatctttactctaaaagtattcattgacgcatacttaacatataattaaaaaaaaaattggtacccaagttaaagggccagtagttggcagttatctttacttcaaattgtgctgaactttattttttaaaaaatgcttttcttattactatgattcacagtttgagaatgtgttatacagttctcacactccttattagaagcagtgttttaacttcattcattcactacgctatttacatcttagttggtgtgcatgtgaatacattgaagggtaatattaaggtgtgctattaatttaatataaatgtttttggtattggtggaaataacaaatgaccatgtcataataagcaactttccaccctttcaaagttagtcatatttttaaagtatgtaatcgtgaacattaactttcccaagcagagatactaattaaccacagcaaacttcagtaaccaagagttgttataatgttctttattttttgctttataaacaagttaattttgtagaactctactcattctaataaaaaataactatctgatgattcctgaaaattgaatcctaaaaaaaaaaaacaatatactctatagttttcaaatattttttagtttttctctggccttcaccttgctcagtgactaagttgaacggcatataattatgtctttctaataaattattcattgtatttagatttctttaatagagaactatgctgaataacactttggcaaatgtaagcattatcttttaaaactttcttctaattagtgtagtatattttgtgggttttattttccaactcttggtgcaatatattttttgagtctatgaaatctcagaaagggacaaaaaatggggaaatgtctatacagtaataattgtattatataacaaaaaatagttattaaacagagagccaaggttttcagaacatgattccaagcaacatggagaaatttagtgtgtagttaaagatcagaacctcacagcatggactgaagaaggattgctgattaatttttaactttttaaaatgacagcttttagaataatgcctcccaaatgaatatctaaactgaaaaagcatgcatattccttttacacatatatagtgatggtttggaccaaatgaaaggctttatcgacgatgcttagtgagtgtaacatatgaagaagagctgactgggatttcatgctcagcactgtgccttaattcacagactcatggttgttcctgcattcagtagagcttgactgggatttgtcacctttaagaaatcaaaccagattacagaggcaagtcacaaaaccaacgcaacagcgctctacaccttacaaaaggcagattacacagttcacatgttattctgatagagcaaagataaaggctgattgctaaggaacggcaagacactctgattcgaaatgattgctagataactatgccacgaccctgttgcttcgtcattataaagagccacttaaacagcggaaaactcagttttcaaataataggcgctcagtagtgttttttcattgcttaaatttgaagttccatcaactctctttgagcagatatcaatttgtcaatttgtgtgaagtggttaccataaagcttaaaggaattaggcattttcagaagtgttgtgtagaatgcagagtagatttgccaaaattaatatatctttatggtattgaaaaattaagcagaaaatacataattgacaatatcctgtatgttgttctgttaccaggtgtattcttcaagatgagtagttacatagttatgattcaatgcattcaaaacatatcatgataggtgttattggtaaatgagacatatatatatatatatatacatatacattaatgtttattttatgaatgttacttaaacatcatttttatgaaaatataatacgtggagactttgttagagaatagttttgttttacctgtagcatttttaaaactcaaactttctaaacacccaacaccacagtaatttcttgcttcttttaaaattgaagtccttttttaccctactgatgcctcctagtgtctcccacaataaagctctaatgagtcatccataactgtaaacattgcactttcactgcctgcatcttctgtgatacataaaattcatatttatgtgtttaattttctgtgcgttactataataagatagaatactttagtgaatgagatgtttcatctgtggatttatggtatgaaggtttacttcgaccttaacaatattctgctaagtgtaataagtttataccttcggttgaaattcatatcatccttccttatagtcactattattgcaaatgaaaaatagcagatcttccattttgtagacctggaaattagatagagttcatcattgaatggccgatgagaaatggttaaaagagcttattgtttcatttaagaagaccccctcaagagttaacaacttttgttaactgcatgtcttcacacatgcaaatctctatgtgaatattgcatttcaaaggttaaaaaaataaaaggaagggaaagataagtgttacttataaaatagcaaaagaaaaacttggttagggggaaaatgtctctatgtagtggaaagaggtttactagaacataacttctcaggacccacagggcactctcatgtggtagacactagtggacatcaattttactgcaaggtttatgtccttagtctcatagcagtgagtgacatgcttgcatatctgtgacttcttgcaactctgattctacctaagacaattgccatttgattttataatttttttctttagtatagttatgaaaggggacattctcctaatagttccaaattcaagtgcaaaagattttaacatctctgggcctcctgggttgtctcagtgcatatcgcattcttgactttcactaatacagtgttctgaggatccaagtgcatatgttagacctgagcttaattagttgttacacttacatgtgggggggaggcaaaagagggtagaaggagggagggagagacagagacagagagagagacagagagaagcagagagacagagacagaggaagagacacaaagagagagacagagggagacagacagagagagacacaacgggagagacacgtggtagggtgtgaaatagccacccctgattaaaaagtacacagaatattagcaaaatttgcctattgattattttgtcctaagttattccgtgatacagtgccattacaattctcgtcttgttggacaaatttcaaagaatgtaaggggtgtgtttctttcgtttaaggaagcaaacatctaggaaggggtgggcctttcccacaggagccgcatttcttcccctggagagctgaagcaaatctgtagtatgtgagagactggcccataagaaacagaatgatttgtagtgatctgttctagttagtgagcaaagcaaaccagaaagagtttttcctctgaaaaacagctcctgtctgccgcttaatactcagtgctgaaaacggaccataaaacaaaacagagcaaagaaacaaagaaatcacatttatagtgtttgtgctcacaactatatagtacattgagataattttgacaacttcacattgtgtatagcattaagatgtagaaatcaaacgtgttatacacatacattttccaaccccattgtgaggctatggaggtagcatatgacaaagaatgctacagtaaaatataagaataccgaaaggacaatctgacatgatgttatttcgtactttcttgctctcactgcacaaagaaaaggcatattcatgctaagaaaggagtttctattacctgttatataaacccatggtctagcctcattggcaaaacaagtgacatttgctttcactacaatgtatctgctatacatttctatccaatctctgttacttgttttatttgaaagtatagctggtataaacaaaattcagagtgcacataaaaataattttctgagggcattatataggaaatcagtgtcatgacaagaaataaaggcagtaaacttattnnnnnnnnnnnnnnnnnnnnnnnnnnnnnnnnnnnnnnnnnnnnnnnnnnnnnnnnnnnnnnnnnnnnnnnnnnnnnnnnnnnnnnnnnngtgttcagcctgcttattgaatggccgtgcaagacttcaagcaatggtttaaataaagtcccttcaacttgtgtgagtgactggaggaagcgggctttgaagcagtccctagtgggaacctgattttttttcaacttatcctgagagtctcttggttttcttcctgcaacttgtaatagataagataaatatgaagatgcgtacatacgttgtttatagatgctgtgaatttctagcctgttgaattttaaaagtgttagatatggttctttgttagaggatgtaaactgcttaaaagaaaaacaaccaaaaccagcatattttttaatatatctgtaatcttttcagcaagctataatgatagcaaaagaacacaaccattccccaaaccccaaatattggcatatttggcttaaatttgctcagtttttatgaaattagacagcagatttgtcaatataaatataaggaaatttgcctagtagggtaataaagttgactttcagttcttagatcataattaattgttgaccctgcataaggtgtataacaagccattctggaaagctgatgtttttaatggaacttgaaggcttgggatctctttatagtcattttgaagatgtggttatttagctgaaatattcactggacattttatttttataaatcatggtcacacaaggaaggctttataggacagactacctaattgcagtcaaggatctctttagtgaatgaacacacacagaagaacacatattttaagaatataatggtcttgtatttttttcaaattaccacactttttatatcagaacaaaacatatgtgtcaaggcagatgttttaagttatacctttcatgtaggtgagtctgtaaatatacaattcgacttaaatggctttgtgggaaggtagtttggggaatttaaaaaggaagctctcagttactgtggtttcaactctttcttacaaaaaaaagaagaagaagaagaagaagaagaagaagaagatggtagttacactcaggataaagaaagagaaataaactcttttaattctttttaacatgcccatagttcctgcggtagagcttatttttattcttgtgtgtatgcagggcaggtactggcagcgggctacaaaatgaaaacttgctggctgccaaccagacacagtgcagagcatcacatcataaacttccctccccttctctgagtgatttcagccctaagcaatgtccttcgccttcggcgtaggctgagcagcagagggcctccttcctgagcaggctttgggaaaggaaaggctcagtgtttcccttcttcaacttgaaagtctgcctcttaaatctctaaggcacgaactgcaaactggattcactatgttccctttttcttcctatatagtggtttaaaatgaatcaaacaataggtgtgagttattaaacgggactcactacctccccaccccctacctacagagtacatgaaggcctgatcagatatctgtggcgctttttgttgtcgcacaaagaaaaaatataatggtttcttttcactgaaacttttgcattatattgcagataggccagatcattttgtgatgcaaattaacatcaaaggtgtttttttttttctgcctatcacaggaagtagatgctccatcacaatatatggttctaccgtgattttttttattgataatcattcacatttttaataattattaggtcaaattacagagtaatttgagagaaaacatgagagtgacttgattattacttcgttaagtaagctgatttctaaacatctgcatttttgtccttgcacgtggaactgtggtctgaaaggtctacttctctttggcatgtaaagtaacaaatgtttaaaagtagcttgtaattgctagttacactttgaacctttaccaatgggctttttaattttaaatcgtattaaaaataatttctggctgccagggcagtgggcacttatttgtgagaggtggggtctgattattgccagcacacctttctaaaactagccttcacctttggaaatatattaaatgggaccttcaggaaacagtgtttctacataataaatatttgttccacctttatttttaaactaaattattgctttcacaatgtccttatagaatgtaagtcttagtaacaaactaaaccaattattaatcacctaaataccatttactaaacacccccaaaagtaaatataactttatgttcctttaaaatcgataaaatggattatttttaattttatttaaatgtcaagggcaactatctatctgtcaataccagtacatacatttttataacaaaaatattaaagcagtaatataacatatctctttagaaaatgtaaaaggaatgtcatgagaatgtctgtgggccagagccatctagcaagagagaaaaaatattgaactttgatgtatatgttgtaaatatagacaggagaataatttagacattccattaaatattatgtgaacctttgatttttgctttaattttaaaacttagaatgagatttgttttcttggaatagtgcaaaatgataagagtctaaatcacacctccaataaacattgttccacccactgtcaagtttcaagtgtgggaattttaaatagaaaatacactatcttgatatttaaatattatacaaactattcttcagtttaaagcctgaatctcttggagttgcacctaataggtagtttgccccatcaagcattttagacattttaaactttattaactaacaacttcgtcaaggtgtctgacttccatctgagagacgacttaggaaaggtttctgtgctcaaggatgtagcccttttctccctgctttgttaactgttaataagtcaaaatatgtaaaaaccagtactaattccatctgaattacttttcctaagtgaaagcagcaaaattagcagtttaaaaaagcgagtgtgcatgacttcaattataggatttattgaaagctacttaaagttggtatagtttagtggttaaagaaatattgttgcctacattttccttgcacatttgcacttttctctctttacacaaactaaaagcaatctccacagtgacttgaatagagttccaatggctcgcttgagtttctcagtccccagcactaacttcttatggcttattggtccagactggcaatgctgctcaatctgtatggaaggaatgtgagagagagagaccactatgtgagctgtctccctctcttctttcatttaataactcaaatgaaacagtcttaaggattcttgacttcatctttctcccttttaaatatatttatattggacttccacctgacctttcttcttatagataggtagatagatagatagatagatagatagatagatagatagatagacagatacaaattgattgatgtattgatgcatatacatatagatgatttgatattgtaaaagcatgcacttctaattttctttgtctacacttgggtgactgtagaattgttttgtgttatttgcttacacttgagagatctgtgtggttcaacatgggatactatcatgtcacaaaagagctcctagcattgatcttgaaagtgtaaggactacagattgtgtctttgtaaggagctgctgtgacttttaagtcagtggatagatagcacagccacatcaacaagaacagcctcgtgagctctcggaagatgatacatttatgcaataacctaaacaatattacggattctgtctgactctatgaagtgtgcgcatgcatgtgtgaatgaatgtgtgtgtgtgtgtgtgtgtgtgtgtgtgtgtgtgtgtgtgtgtgtgtttacacatgagcatacatgtgtttatggagtggtgagtggagatgaaaatagcagaatacatgagagacacaaagcatgagagggtgagaatgaaatctgaaagaattagaaaatcatttcagcgaacacaaagagtataaagaacctattgccacattcatttgctgtgtcttgatcgtccatgcttatgttattatatatattgtaaacctataaaatgtggagcatgatcatggggggaaacaggtccaactgagttcaaaatctaaccgtcagtttattgacctgtggtcgaagacaggttatttaacctccagaaaacctcagaccagcatctgtaaaataggttgtgatactagccacctcttcaagtttttctgaaggttaagtataaagaaaagcattatgccggcatctaatgaatgcctagtaattattaaattgctgtaattccactcaattttaacaattttatttctgactaatgatgatcacttagtaatacttggataaataatttttctttaatatatttagaccattacaattgggtcactatcaggtcaaatctcatgtcatgatgctgttaggtcaattttaatgattactaaatactgtgtatctttctctaagcaaagcaaaacctttatagatcagatgttactttcaaaattagaaataggactacagaaataagaataatttcatccttgacttttaaaagtaatttactgtaagttttgactttaggtggattactgtttaacaataatagtttcattggggtttcagctcaggaaaagagacagatgcacagaattggaagccctttgtgacaacaggctctaagaatttttgaaatctttcatttgtttaaatttgaactgccctttgaggggtctattagttcatcttgttcattttttatttcacaatttgtttgtatgtggtgatagaattacctgtgaagaatgagtgatattgtagacatcttatgttggtgcgcaagcatgcttacctataacaaccattgtatggaacctgctgagtaagagcttgagatgtataatcataaagataaaatgtactttcctttgaagagttaataaaataagtaaatacatttttactgcccttagttgtgtgagtaattattaactctgactatagtttacctaccttgggcagtgaacaaatagactcaatttaggtattttcattcatatgagaagaataaagcatagaaaaatgcagaattttgctcatgactttagcatttgacctatataagacacattcagaaataaatttgataatacttggactgtttctggtacaagaaactagtttccttcttttggttgtttttgtattcacttaatttctcaaaaaaaatcatattttgatagtaggtaatgttgacaaagctttccagggtatacaacctggggagttatgtctgcttgaaatagttcccctgcttttgaataatgagcctctggtgtgcaccttgcatttcagctttcttttctaaccttgttttaatgcctggataaaagagtgctcagcgcaaggaatacttgccgagtggacttccctgtggtaaaacagcatggacagctcccaacactgcaatcaaggacgcttctaaaagctttaatttaaaaataataataataataataagtctgcatgaagatgatggagccctctaaggcatatgggcttagagaattattcccatctgcaaccccctccccctgcttagtagccctttccagggttatgattactggaaaatggctgttaatcaccaggatttttttttgactgcagctgcttcagtcagactcctaatctattaaacaactttgtctccagtttaaaatttgcattgtatactgtatagaataaattttcattgtaatcagagcatccaagagaacttccatatatgatttatagcaacacatttgtttgtatgtatagacctccattctgctattgagccaactgtttgaacaatactgtgggtgatcaacataaaatgaaatattacagcattattgaacacaagcgccacttacaatagtcacattaacagagtttgaattgacgcatccttggcacttggcagaataatacacaatttgaaaacttaactcagatagttaaattttcacttgaacctgaaagaattttttttttgaagtttagtgagcttgtacgaaaccactcggtgtctttgtcaacacttgtgcttattacatttgagataattttaataaatattccactgccagagtcaacattcagtgctaagagaggacacaacagcgctgacttacaaaggactcttttaaaatgcattcttacatgtaaaattgacaggctacaagaagtggttggacgatgttcatcatgctggaaagaatgtttcaattaaagttgagcagtttctcttccagctcttttttttctccattttttatttgctgtgccaaggtatccatgtgcgtttttccactgtcatctggctcgttcccagcagatgcacacaatctgttccgctgtcactaacagggtttggtttatgaaaagaatgtgtcagaacatgccagtgcagtcacttttgcaggttttaaagagtaactgagaatatatgcattgccctactttcttcgtccccatccctaagatttccaagaaacttttatactagactaaaagcttgctttcagatattcttgaccaaatatttactttttattaaaaataaaatatcagaagttcaaaactgtctttagtggttaaatttaagagcagatttttatgagagtgtttcaaataaacccaagatggttttgataaaattatcaaatttccaattatgattatttcctgcaaaattaaatacaaacttaatatcaagctagacttgagcctactattccactaagtcatagctttgtttaaattgttctctgatataataataaagagatggtcataaatagcaactgtttagtctaatagacaccattgttatgttaatcccaaagtagttaaactatcaaatacaatcccatgctttatagagacaatcacctttcaaagaacattgggatattctgttttccatatattcacattttaaattcaacaagtaattttttctgagtgaaattcttgttcaataatgtttctttattctcattaaatatcaatacaaattttaggtttatgttatcttcattggaaataatatttttgccttcatatgaattcttaatggacagtgaatacatccctaagttaataaacttaattatataacagtactttaagttttatgtataatactgcatgcatattcatatgcaaatagttactggacaatatttgtattttgatgagattttagtggtattaaatatctttcagaattaaagtatcacacattgcttgaatgctaattttaagttattgaaacaattttctgacttgggtagcaacttaaatctcaggggaactcaaactttcttagtgaaagtttaaatcagatgacctaaaaatatagattcaaaacttacaaagaaatgataatataaatgatttttgataaaatacatatttagaaaagctagctttggatttctccgacagaaaactttatgaagtacacttcaagtgtcagaagtacttatattaaaaagttgataccattccatagaaaactcttgcaggccgggcgtggtggtgcatgcctttaatcccagcactcgggaggcagaggcaggcggatttctgagttcgaggccaacctggtctacagagtgagttccaggacagccagggctacacggagaaaccctgtctcgaaaaaccaaaaactaaaaaataaaaaaaaaaaaacccttgcagtataaattatgttttaaaacagttctgaacatattaagaagaaaatatcttacagttggaactcattggcactgctattacagcatacaaattaattgctaaattatctctatagaattaaaccagacaactgttacgttttcttaattcctaaagtaaaaggaatcctacaattctatacttaaatgttgatttatgcatgcctatcataaatggattttataatgtttttgatgagcatagcacacatatttaagctgagtcataaaacctgggcaaagtaacacatgtatgctattcagaggtgaggaaaaaggatcaagttcaaggtcagtgtgggctacatagcaagccgactgatgagaggagagggaaggcgatggggggggtgaaaggggagggaaaaggagaataaagaacaattaattctaggttttattctttttatttccaacattttaatttattcataattttatatgtcatatgatctcacatcctaatttgtgggtacctgtatttcttggggtatggtggctttgatatgtgcattggcacaaagagctgagaatcatggatgaactaataagaggcatttggctgagtcctgtggaatgccctgcccctttcctttctcttttcctgctgaaagtcaggtggagaactgttgtcagtttgaggaccaaatgagactaaccactgctggtgttaaggagggggacatgtgaacacagggtaattacagtctttaatcttgtatgaaaaacaagatttcaagacaaaactccatgtgtgaatttgggcatcctgaattgttaatcctaaaatcttctatatatcacttaccgcatagaaacaatcttaaatgtcattaggaagagtttcctccttttagcttgattcacataagttgaatatccacaaataggttttgcccagtgaaacactagattcccccaaaaaagataagcctttcttttaaaaattaatgccttccttctaaagaagtaatccgattttcaatctaacttgatttgttaaaactaaagcaagtatactttccaatgtaaattactttcttgttactgagatgagctttggaaacatttcattttaaaaacagagtcctgttagttgcttcaaattccaacaaagatgggcactcagctattaaacaagagtaggaagatggtccttccaacagataggacacctttctttgtggttaagatgtgatgtgatacttcatttgcatttgcttagtcatgggtcttttttgagcaaagatagatcattttgtaaaactgtccctgtcatatgtattattcatagagtaagaaagtcttcagtctctctcactgcacaagcacaccaaagcctcttgctgcaggtaaaaggctggacagcagtgaccagaaagctttgcactaagctctctttagagaatttcaagacagttgcattctttttccatctgcactggcatatgctgcccagttggttttcagtacttgttggtttatataaaggaggactcatctataaatgtaattgatactttcaactatgacttaggaattctgattctccttttctccactcactagccaacgtatctctgatagctcctgtaacgtttagactgtgtcaaccatttacattgttctttacaggaactatgtactacagttgttgttggtagtaaatataatggccaacagttttggagaacttactcttaaggactgttctaagatcttaaaactgcaagttcattgctttatttattcttcaaaacaatatgttcttccatatttctgcccttaacatattacaggtgaagaaactggtccatgaccttttaaagtagtttacgaaggttatctagtaagggcagcatatgaatctccaatcatggagtctccagagcccattatcgtacatactgagttaagcaagatcctacatacatcatacctgctaggaaagaaagaggatctcatcggttacatctgaattttttatggctggttaggggaaactagttagtcgttccacaaaagcagaagacatatgtctgtgagctttctaagcagaagagaaacaaatatttgtctgacatacagttttatattgataaactgaatgaagagcatttttactgacagacctctttgtgcaagcaatctctggttactgtgtgtgaaatgtactttccggttacagtatgagcctcattgatgtgtgaacatgtagatgttcatcatagtctactgatttctgttttgcttttcatctcttaaactggtccctttctaaacttcacttgcaacaattattgtaatttaatactttttatttatttaaggatttgagatattagacaaagtctatgctggatattaaatgaatttcagaaattatttagctaattgaattagtatggtgcctattctgggtaattcaaattcaaacacacgttctaagtgtatctttgtagtttaaaaagaaaaaaaatcctaaaaccaatggtagatttgaaacaaatagtggcagcttaggatttcttatatataaaaattaatatatattgtttattcaccaaatgtggactttaagttttacatgaagtattgctgggttgagtaaaggagcttttaaagtggaaaaggaacattttttttggtaattttttactgttagcaaacagtatgaactttcttttctctaaggaacagtttttcacaaaaatattgccatagttagaatggaagtgaggacagagtctgatggaggtcagtggaactcagatatttctgaattacccaatgtacatgcttaggacttcagaattaatagctacaatattttttaatgtcatgggctgccttctaggtcttcacagctcacgttaataaatacatttgcttctgctttgtttctgttttgaagagaaagaagtgattgatagtcttaccaagaaaacaggggaaaaaaaccctatgttctctgtatttaaaaatgctattgttgttaatgtcttttgaagatatgggtgttgcgtattatttgggactaatattctacagaaataagtagctccctccatcactctggtgccagttgtcaggggggatttggtcttctctgtgttagtcactattaatggtcagcgctcactcattacaacaaaacaactaaggcaagtagctgcctctgtttcctaacacaactcagacacaatgctttgacttcctctcttagagccttccaattacaacacatactcttaagatgccatggatcattgactttatttttagaatttatttgattactaaatatatcgtaaaggctttaaattactgaaagcttgaggaggcagtcatagttgcaggataattctgaaaaagatagttacactaaagttattagtaatagttccagagcaagactgttatgggttaacacattttaagagcgttttcaaaaaagttaatcatcgaaggactaaaaccaacacacaatttgttataaacagactcattcaaaatttgtgtgatagagttgatcttgggtgtatggtaagaaagtagagagaacatgaagttgtctttttataattagtttagatagtaaggtctcaatcctgactagatgagaagcttttcaaaaccatgatacccagatcccacctccagatttggattaagttgcactgccatctgggcattgtggtttttaagctgcttgggtggtttttatgtaaagactggcttaagaattcctagttaaatgataaatatggattttaaaacttgggcatgcaacttaaaatggagacattctgaaagttatagaaacaaataagcatagtagtttgggctctgttcctacattgtattctccagcacttgctcatggacaccgactcttaacgtttaatgagtcagtacagtgagaagatggtggagctgttcagacctaatgacgttagtttcttttgagtttcagggaagtaatgaagctgtgaagatgggccagaagtaggacaagcgtggctaatccctttctattctctggtatgccacaaaaccctccctgttggggatctcgagataacttggaggactggctcctatcctcccactcctgccctagttcctagacacagctgaaaggaagggtgcctgagcctggtcctcctctgcaaacccctgctttgtcaaaggatatagagcaggttatgaaaaagagagaaaagcaccaacagagagatgccccaagaatcctttatacaaaggaactcaacttttatctcatacaaaaagtaatttaaaaaaaaaaaaaaaccttcggccaacattttcctttttccttcttgttctaaaaaaaaaaaaaaaaaaaaaacataaaataaaaataaataaagtactaaaaagatatcttatctttaggaaaagaatcttgtaaatgttaaaggagcccttaaaggtatgctagtagaagggaatatgtctttttgagagctgatttcttacttttagatattcttttttaacttgtttcaaaattataatataattatataattcccttccccctttttttccctataaaatctcccatatacatgctcttcctatctttcaaattcatggcttttttatatttccttattaatttatatgattaaactattatatatttcatatttccaaagatagaaatacactgtgttcactctgtgcattgtaacttctttgtgtgttctcaggtctgtccatatggtatggaataatggattgttcttccttgtggaagactctatctcatgctctcagcattcctttagttaccttcagtcctttgcctggggttaagacctcatgagctttccccctccctgttagcttgtctatttgtgtcattcttgttatgtgctgtttaggcagcgatgatggacttcgtaaaagggaataaatctttaagtgcaaattatggccttaaaagatacaaagaatagtgggaaccggacttgcttagtacacaatagcaaatataaatacaaagaatatccacatacaaacacaaacacaattatactgtgtatatagaatgaaaagatatgacaataaaagtatagacataattttacgtagaaaaaattgttttattctgctatagaaagtattatcataaaaagacatgcttagagttaaggaggtcagggctttccatgattgtaacttccaagttggttgaccctcttcagatggacactttctctcatctcatgaaaaagctgaacaacttttccaggtgaatcagttcataagtaaataagctaataactttccaagtccagtgtgacgctaaaaatcatacgtgtcatgaggtgttacctttctgaacaagtttaatacaaaacatttcagatctagcttcatgtttgaatatcttggagttcttaaaaactatcagtacctggaaaccagcaacaacaattctgattgataagtcagcgattgaaaaatcactgattgatagacactatttttaaaagtgaccaaagaaactaaaatacaaagccaaagttaagaactattcttaatgtacttccaaaaatgctaaaatgttgaagcatctttgaacggtaaaggggtaagttgggacaacagtgttatgtccctctaactgcagaatttggaagaaaataaaatgacttcttaatttataacagaattacctcttccatagaatcttcccttcccaagtttatgagaccagctgccccattctagattttaaattattggcatttctgaagatgaagtaacaggggaagtgatgaactttataaatagactgcctaaaatatttgccatgaggggtcaagatgtaggcgaagctggaaaaagactttagcttggggattagccagaggccaacagttgttaaattcccaaaacttcctttaaaaagagactaagaatccctttgagaacatttttttttctcttcattgtatagtaagtgaaacccagaaagggagaggggggctaaaaacactgtacctttttagccaaaattaggtcatgccaaccacagcaaattggaagctctacttaaattgtagccttgcagggttgttgtggatcttgttgtcacgcacatggtaaaactgatgtctccagatcgtgggctgctgctggctctgctgagcaggcctgttctgctgtctgaatctaactgtccagcctagctctccagactgtgacccgaggccgtgtctggaaggtatgcagtagaccacagcttttgaaaaatacaaacaaacatcctgtaatttggcaatttctaaaacaaaaaacaaaacaaaacaaaacaacaacaaaaaaaaaccaccacatttcattctgctttatgctgctagcataacaaaatggcaaaggaactaaggacagacagtagagcacagcagtagcaggcaatgttgctgttggacaactctggcaaagacctatttttatccccaaaggaaaaggaagtagaaacacgtacatagctcattcccttatgccctgcctatctgatgggatgggacggtagagagaagacattcaggaggcgctccattcatccaacaagtacttcaaaacatgggaatgtcggacccactgtaaaatgcaaggtttcttccgttttgtaaaaggaacccttatttcctacttacagaacccaacatttccctggtattttaaagtcatcattatagtgttgctttggccataattgaaaactatatttccattatattcaggaaattcacaatttttttttctatttgcagaagatttttaacaaaattctaagatctatatggtttataaaactgtatcatagcatcgcctcacagaatttttgttgttgttgatttttggtttggggttttttttaattttacttatttattttcggacttattgctaaaggagcaacctttgtatctgaaaacccatatctgtggtgtgtcaacaaaagaggtttcctgtctgaggaccaattaccaatttatatgattgattgtcagtgaagtttccattgctggcttttcatagaataaagtttccattgttatgtaaccttccacctgctgttcgctgagctgagggattgggcgggagattgaagaagtaagctacagcttgtcagtagagaacactgaagtcacagttatttagagtggtagtgaaatgtgtaaataacactatcctctggtctccttatatgccagttctatattcttgaaaatcagaaattaaaagccaggtttgtactgtgtgaggattctggaaannnnnnnnnnnnnnnnnnnnttacatattcaagacaggtctgagggctatttgagtatatcttgtgctgtcatttttggtgtccctagtatggctcatagcactatattgtgtcactttgtgcccagtaataccagcacagctcaaatgacaaatatatcgtatctaaaagtatattacaattaaggtaggaaatacaaaatttattttccttggggacagtttatttatttattattatctttattcactttacctcccaatcacagccacctcctccttttcctcctcctcctcctagtctcacccttacaaatcccccatcactgcccctccccttcccctcacagaagggaaatcacctggggtaccatcacaccctgggacatctagtcctagaaggactaggcatatcctatcccactgagatccaaccaggcagaccaagtagaggggataggatccaatggcagggaagagatactgagacagctctttgggtacaatttttaaatagatgatatgaactgtgtccatagaaacctatggtatacctcatataaaagttcaaagattagtaaaaggccatactcattcagtaatacaaatagctgaatgtactgattgagtttgctttcccaggtactattagccagagatctctctggaaaagtgaatggctagaaagagataattttctagatttccaaaatatatcccatggcaccccaaactcagaaggcagctccgtcttcagagaacatatttcttattatcacactcccacgggaacatcctgtctcatgttcaggtaatgggaatggccgccagaatctacgcatgactactgaggggattagttttctgacttacaatgtcatctcactgagctgttcctgtttctcagtgcaaatgtatagtgcttgtcactctaaatgtttactgcttatctctagttggcctgacagacacatgatggggaggcctttcttgagagctaactgagcagacactaaagaggagatgagaagaagactagtaatggagtgagcatgtgctagccaggatggaacagacgcatcatcaggcaacttcagattggctccattcgcttccttgcttgtaccctggagtagtccttcataatattccaggcacactttaagacccattgcctgtagttcctaaatttaaactcttccatgcacatggttaataaacacctaataaatgagtgagcaaataaattgtgatcccctctttctaagacctatgggttcttattcaccctggtctccagaaatacttaggaaggtgacttggctccatagatatgactaccggtgacttgaattgaattgaatgagagaaaaccgggcttatgggggaggtttgatttagaaactcttataagaggttagtgtgaagtgattggtgtgtgtatggagtgattcgggtatgcatagagtgatttgcatatataaaaccatagctggaaaactgagcagatcctgacttgccagggctagatatgtatatattgagttgacatgatttagttattcccatgttggattttattatcaagaaatctctccattttctgaaattaagttaataggaaaagagtattttgttggataggttatgagtctaaaaacagcactccatgtatttaaccaaaacattcttaataatgtttaattaacttgtttttaatgaatctttgagacttctttctctgcactatattgcttgaaccatctgaacatgagctcagctacttcacagggaatctgactgaaagggatggacatgcatgtgaggggcagcacattactattaactggactttaagatgcttatcacaccaatgtattttatccttttgtactgaaaacccaaccatgaaaagctagtgtaaaacccacaattataaaaacggaaatgtataattttgtaactgcgtgtacctttatcctaagaattgtgaaagtggtttttttcctgaaatataaagaaatttgtatcaaaattaaaataattttggattattaagaaaaaacttgataactggaaatattttaaattcctataaagtcttctgcattgcattttttaaacataatttttaaatgggtcagaaatctgaagaagaatttcaacggttcattttaatccgtgtggtcctcagaatttctcaacaagaacagcaccaggccaccattcttcccaggagcctcccatcaggctcagtgctcctcgagccacttggaggagtggttcatagctactctagaatgcgtcagtgtattcacataggtactaaaattagaatgaatctcggttctttacagcacaaaagtaaagccctaaagacagttgtgattcgttgcaaacccctttgcatatcaaaatagaaataatgtcaagatttgtaacttcaataaccatgatacctaagcattaatgaaatggtgtacgtacaatagcactataaaatgaaaatacagtataatgaatattgttcttaacccatattgtatttcaggctctttgagcttgggactttattgcattcatctctgagtcggttatgcataatagtttttccataattgttgaggcaaatgaatgaaggataataattgtcctatttcaaaatagagaagcttggaagagcagttgaagtcatcactccatgagcctttccctgtggagttgcccttcccacatctaacttctgcaagattttgtgtatatatggtgtttactgtgttttaactcatattaaaattagtatttaaagtgtctttctcagtatgacaaaatgtcagctctttggagtacagaattgtattcatttttctatttgggtatacaaactgccgaataagtattctctcaaataaacagttgctttttgcaccatcgctaaacacctgacaggctaaagaatttttgccgtcattgctctaggaacttataacaataaagtctacgtcatatcatagatgcatggagagtagagctttataagtaatcattgactacaacaaaatgtggttctcgtctgcctacaaaacgctgctaattagtgtattatcatgtggtgggtagataatgtttctacacgtttcttgaattattattttaatgttatcagaatttttctgctgcttaaaacatgtaaattaccataacatttgtttatgtcactagtaaaagtcatgagataattgaatgatgcatcatttgatagatacatacatacgtacgtacatacatacataggtacatagatatttagatacatagataggtacacacatagattcatttgaaggcatgtccattgctccaatgggagcttaaacttcgtcaaatctttccatgtgataatcatctaaattattcctataagaccataaaaaattccaatacatagaaaaaaacttgtatctcttgtaagccctttgtaaaatatgccttttacttattccactgttagcatcagcagatggtaagaagaaaactcaaaacgataattaaatcatgaagacttcactagaaatcttcctatcttcatgacatatttgttttaatgatattgttctctaaaattatcatcacttgatttttttattaaatttcatttattcaggcagtctctctagtcacctgctttcatttatacttacttacttctattttgaaagcattgacttacatatctggatgttatggaactaacagcgcatttcttcttagtgctcctactgggagataagttagttatcacatgtacaaaagtacctgctcagaaattgtctcttgttcactaggaacaactccagcctagaaaacctgttacccagtagatattgctgcctactgcttaagaacacaatacattctcattatcattcaagaaattaaatgattacattaaactctttgttaaatactttaatacataatttaaatgaagtgagcatgccttgaactatcttgtatagaaattgactttaaagtctgattctactttcattacctggtcattcctgctctatatttcaacttccatctcagctactgatgcatctagacctgtattttcttgtttctgttaataaaaatagctttaaaattaccaatctatgcagaaataatttaaagtttaaagaaaaaggatgtgaattcttaactgttaaccagtgttgaacatacactttagtataaagatctggagattgttttagccataattttatatcaaatatgatannnnnnnnnnnnnnnnnnnnnnnnnnnnnnnnnnnnnnnnnnnnnnnnnnnnnnnnnnnnnnnnnnnnnnnnnnnnnnnnnnnnnnnnnnnnnnnnnnnnnnnnnnnnnnnnnnnnnnnnnnnnnnnnnnnnnnnnnnnnnnnnnnnnnnnnnnnnnnnnnnnnnnnnnnnnnnnnnnnnnnnnnnnnnnnnnnnnnnnnnnnnnnnnnnnnnnnnnnnnnnnnnnnnnnnnnnnnnnnnnnnnnnnnnnnnnnnnnnnnnnnnnnnnnnnnnnnnnnnnnnnnnnnnnnnnnnnnnnnnnnnnnnnnnnnnnnnnnnnnnnnnnnnnnnnnnnnnnnnnnnnnnnnnnnnnnnnnnnnnnnnnnnnnnnnnnnnnnnnnnnnnnnnnnnnnnnnnnnnnnnnnnnnnnnnnnnnnnnnnnnnnnnnnnnnnnnnnnnnnnnnnnnnnnnnnnnnnnnnnnnnnnnnnnnnnnnnnnnnnnnnnnnnnnnnnnnnnnnnntagaaaattttcaactataatcgattagcaggtagagtttacaacagtagaaatttaatcaatcctagcaatagttgtttacaccaagtaaaatccataaaatatgtaaaaatccagcataagtttttcatacagagtgaggttatggagtttgtattgagtactgattgaggctgatgggcatcaggagaagaagacaaaataatgcagtggcgcatctcagcaacaaaatgaaaaacaatggcttcttagtgggcaaatgctttagagaagttattccttctatatacgtatctttgttttgaaaaagtgaacatcactaatattagtcgtagggtgtgcatgaggcctagagtctccatgttgaacagaaggtatgtgcctgtagaccccacataatgccatatgatgtccatgagctctagaggacccatagcaccaaaggctgctctatttactaagcctttcttaatgctttttggttttgagattacacacacacacacacacacacacacacacacacacatatatatatatatatagagagagagagagagagttttgtcagaatgcatatctatgaaccacatgcatgcagagcactctgaggccaaagaagatattagatactctgaaactgaaggtacagttgggagctcctatgggactcagccagggtcctctagaaaaataaccagtgctcttgatcattgagctatatctgcagcctctcttccaaacaattttaccttcttctgcatgtgtgttcataaatcaatagatagttgatgttggattctctttaccaaaacaaacagcacacactggaatggaccattagtttccagctctagagattcatacttctcatcgccaaaagaaaagggaaattccctttgctgaagcttcctgctctataaagtgcacatgatgatgtacaccagggtcttacggggattcagggagcctgcaagcacagtgcaactcaccatatacagcgagggttaaactaggtatccttaacaatcagaatccttcttcctatttttcttttgtgagaaagttctaataaatacatctacaattaccagaataatcaattaaagacgttaaagacaaatttacatttttattttatatttccaaagatttaaagagtgtttatagtggtttttaatggttttggttaaaatctttaaagatggtactatagaatagaagatttacttatttctggattttccaagttttgaaatgttgattaagagtaagcaatttcttttttgatatttatttttatttcctatctatggatatttgatttgcatgcatgtcttgcaccacatgcatatctcttatctgtggagaccagaagaggacactggacactctggaactgcagttatgcttggttgtgaacccccatgtgaaccttgatctatagaagaacagcaagtgactatcacggctgagctgtctgtcagtcgtttctagccacagtgataagcaacttttggaaggaaattgtaaatttatctttttggaatatcaaacaagacttggatgagaggggtcagccttgaagtttcctgccataaaattaagcattagatatatattaagtaatattaacgtatttattggtatagannnnnnnnnnnnnnnnnnnnccccgttatgtatttatttttatcaaacaagtcttacagtctttgctctacaccccaatagggatcataaatgatggacaggagtgactaatatcctgacaccgagactctctttggcaagtttttcctcacagcttttgacacagtgagcaggacttttatcacaagtaatgtcaatttttaaccagattctaatcttgtatttgtcatcagcttgttcccttcatcagtgtacgatggacacatctttcttgcctgaaagcatacaagtgttaggtctagatgaccatccaaaggtagcaattatccttactatgtggaggggtagacatgtatatattttacattaaacggagcttttcgttcacttaaaatcactctgtattccacatggtaagagctgctacaaaagtagaaagctggactcattctgctaaatttgtagagatccctttgtgttgtattgaggcagatttggttcattctggagggtgaaaaggggagactgtgaactgtggccagcctgagccatccttctctaccctgcctttaaaaacagaagtttgtctatcaacacagaccattggctttaaatcagtcagatcaagtcaaccacctctttggaaattccatattaaaggcaaattattctatctttgtaaaagtttgatgctaaaggaataaaactcttttgtggggtcttctatatggactttttagttgcaccactctgtggttcatactagctaatcattttaagtttgtaaaatgggggttatctctgagacacattcttacccatgtactttgaaagtggaatttacttgaatctatgttttgtaatttagataataattatttgtatccaaaccaaatttgaacaactgtttcctaatgcatgtgagatccaaatctttaccataaagggagcgggtgtgaatgtagataataagccgagtagaaatggtgatcttatgtgagctgcagataccatctgatcatgtcttctaactaattggatctctcagaagcttgctagcattctaactagaggtctatcctgagattatttttaaagcacatttgttatagaaatgaaatgctaaataagaaagaggaaagtggtaacagggaaagttggcatggagaactgttgctgcactcatctcgcttcatctttcttctaaatatagttataacatactgcccgggtcagctgatgtatgcagggccctttcacgactgagtcccttcccagtcaactccatcatggttttagtgaatgtatgtggaacaaagcagctgagttccaatatcaaatccagagtgaaagttgccaatcctccaaatatttttaataaattactaatctcaagaccaggcttaagttgctacttcagggctgaaactaactttttaaaagtcatatctcttactaagatgtcatattataaaatactagaatactatttattctttgatggagccatttattccactcaaggagaagccctgaaaaggagatgtgttcatctatttttactctaagaatataaacatgtctgttacactctagtcagtaaatgaattcagaagccaatatgcctacatgctcaaatttcttctgtaaatgatgaataatattgataaatgaaaattacaaatctgcaatagagcttaagtactgaatagtaaatcattctgttactaactctgtgttccaatgacattttctagatttaaaaaaaaaaagccattcccatatttaaaaatattttgtgcctttgcatcaatgtaagcaaatgtgcatttgaaggaaagttcacaatttgttcacatataattcccttttggaatcaaagtgcccttttcaaaaatagtttatatctttaaaatatagtatttaatatcctctttcccaccagactaaatagattgcaagtgtttgtaagaattaaaatagaggagtggtggatagttttaagagacacgtttgttctcctagctttgtcagtgtgcattatggagctggtcatcatgcaggacggaacgatgaggatggcagctttagctcatgtgactgacatgcacccatcatggccattaatacaagttggcagtgaccttggctgcatcacaaacagtctcctttgtgtggggggtgggggaggggcagataaactatatttgaatgatacttctcctgtgctgaaggcaaagtgggtgcttttaagaactttactgcttaattgtcttctttagttctaaagcaaatatttatagttatcctcatccttatttcctatttccttttgccctctcaaataacctcttctggtgggggaactgccatttgtattcaatagcactttcagaaagagtcaaggctaattttatttttattatagttgtgtatctgcagccatatactattatgcccatcagagtcaaaactctaacgatcaggaagcacacatgcagaggacatagactcataatttgatataataaagcaattattattaaaaatttagctttcacatgataaaacttctcaacagcaaggactgggaacatgggtcccccagtgaggcactagcctcagaatccggaggaactaagtttgagccataccacacatgtaaactcactctggcttgaaaacccaatcctgggatacaaatgcagacagacagatcttgggtctgctggacagtcagggttggctccaggccagcagaactcctttttttcaaaactgatggaaatttttctgaggataatacatgtgtacacattctacctgtatccagataggtaggcacacatgcatatacatcatgacaacataaatagtcactacagggtttaaatgatacaaatgtatattccccacaacttctgagataattgaaataaaatatataaattcatcattgcatagtttctgtatcagatggatttatcgcgttgcagagaactgtgatgcataaaatattaagcaatgacattgtcatcattttaaataacctgtaatatacagcttagtaaaaggttactactgaaagacctacattttaaggttgatttaagtaaacagactttgagcaggttatggtttcttgcatataattgtttgtgaatcatatttctgtcaggaaataatcagtgactatgaagggagaatatttcccgctagtgaggttccatttaaaaatgacttcttcctgagttatggtggtcttctggtactttgaaccagctgtttacaataacacttacaggtgtgactgcactggagaataattgttcattccaaactttggcatgacttccaaattaatcaattggcacaattaaagcagagttactagtcatggatgtattttagtatttcatgtatcagagtgatgcttccaattagtgggtcatttcaagtgcaccacacaatttattttcatacagagttccctcgagcattatttatgacgaaggaagaagtgtatgaatggatgtagctcttggttatcatcctctgtgaaactggtctgtatatgcagtttcttgttatgcttaaattgctatgaaatacactgaaagttgaaggtattttatacctggattttactgcaagtgagtaatgattaagagtctataacactagctagaatgaaggtgcatggctgtaatcctagcactcagaaggcaaaagcaggaggaggccagcttggtttgcacaatgatgttaaggctagcctgaactacaaagcatgaccctgccctaaaaacaaaagcctgggagatgactccatacctataacacttaaaatcataaccccaggaaagaagaatctcagaagagctcgtattgtgttaaggtattccatttaaaccataaaaaaagctgcatttccttttttttgggggggtggttctatttaagatacaaataagacaggagttgaatccaatttcaaaaatacatcagaaagaaactatatagaaatccctcataaactgcaagtcaaacttctagctttcctttcaggtagaagcgcagattgtagatttacttgaatttcatacccttcacttttacctgacaaggacctttgacacaaaacttttacctgacaagtaccacattgtgtaaatttctcttcagaacaatgcacatctttataaattgcggcagcacagcagacaagaactgagagccttggggtcagcctctgccacctcgagaggcagactttagtgttcctcatgaaaagttggacaggttgcatatgtttttctttgcttctatttcctccacaaaaatatgctaagtaacatgcaatgacagtatgaatttacccagatatcatagcatatagaaataatagaaagagtttccaaaggacatgctcagacagtgtgactactacaaccatgatgaggaacaactatttcacagaaataaactatcaagcacagattaggggcagagcgatgccaaattttattattctttcttcaccctgtttttaatctgaacttggatttcttaacataatgctaaaagatgcagctttttggtggcaggtcataaatcacgatggcatctttacttacattacctagttaatatctcataactggtaatagagaaacagagtcttagaaaaacattagatttccaaactgaatttcagaattatgaaaatcacagctgtattgtaattgcataacataaatttctgcctgataattgatttttttgttgcagcatgtcaacagaattcatgaaatagactttactttcttgattagcttaattctaaaatacaggatttttcttgggaaagagggggttgttatagaagttagattgtatatacatatgttgtatttgaaaagggagtgaacctgtttgtgtttggctgtgtgagcacagannnnnnnnnnnnnnnnnnnnnnnntttcacaaaatattgcatacaaattttaatgagttgagctcagagctacgtgaggtgaacagtatcccaacccctgtaggttgggagctcaggaaattctggtatgctctgtctccatcgcccttcccaaggcaggacaggcgaacgacattatgctgtacgtaagcatcgtcagtgtgcactcgggtctagacacttcactgtaagaagtccacacaccaataatgtcaagaaattttctggaaaaggaaaagaatatttaataatgcaagaaattttttgacttaactccataccattcccttaaggagactaaaaatgttgtcactttgacatttcaaacatgtatgtagccacaagaaatgagggcatttcacagatttaaaggggttaaaagtaagtcaactacttattacttacttattggattcaattgatatcctaacttggaatatcacctcttctgaaatgattgctattatttagacttccatacataacatggaaattttgctagatatctgacattctgacaagcacctagctacacagctgttttctgttttatctcactgttttatcctcctgagaatttttccaacatatttaatgaaaactgaaattgtgagaaagaaatcatcactgtttcccacttctttatttactgtaattttactgcttattctgtattcacaaattctcaagaaaggattttctcattgtgtatctttactttatttcttatatgattgatgtctgaaattgccctcctttgcaatccactgtcttttattctatgatagtcattgatcactagttctcatctgaatgtaatagaaatatctaaatactactgtcacagatcactcagctactcagcatcaagaaacatgatatcacatcacatttcttgaggaatcagtttttctctctttcagtgaatttgagacaaaagttttcaatagtacggttttttttgttttgttttgttatgttttgttttgtttttatcaaacctggtgattggccaaggattcatagtattttgggctccaagtacaagcaccaactaaagatctgaagaatttagctacataaaggtgtattttaccagaagagacttcatacaattcaggaatattacaagaaccccttagaaaagttagtgtgggacataaaggatggcacaagagagcagaggacacctccatttctatgagaagcattgcagagaagcaagctgttgggctaacagcgatgaatctggatggagagtggaagtaaaaggaactgcaagaaaggcaagaattaaagtggagggaaaatgaatgttttaagaaatggtaaaggattgaactcaggtaaagagaagggaaatggagatacatacatatagacatacgcactttgcatgtgtgtgtatgctgtgtgcacatgcatgtgtgtgtgcctactttcaccccaagtactgacaatacatagtgtgccctcctttaacagggacgggaagacgagcattggcagcacaaagactatgtgaattaattatatgagagcagaaacctttgctgagtcggttgtcacatatcacactgaacaatccctggaacagctattattttttaaattataactgaattaaggaatgagtaaatgttgctttggtttgatttcttacctttattgatcagtgatatgaacttgtctgtggtcacatgaaatctcacataagtgtgagaagtgttcagaagcaagtgacattaagaaatgaagatctcacggaactccttcacacacacacaccccctggacatgtttccttaaggttattttatcactggaatttttgctatcaggcctactacaagtccacaagctacaggcttaagaatttttaaaataaaacctattatgcaactaacatagcatagtatatcttagttttcgtcaagaggttgagagatgacactgggaactacattcactaactctcttctttcccgttctaaatccagtctgtgtaatatccatcctatagcagtcactgcatgaacacaaatgaattcggcattgtttagtaataataactgaccagtgggaaaattttctccttattaataataaagtatagagaaaagataataatataatctcagttccccaagattcttaattttgtccgggatggcaaactcatccatcagtgaggaagataccctcccaaacacacaaattttaatgggagctacagaaatagtgaaatcagaactttcgggggtaacattaaatggttaaagaatcctgtgcaatttgagtgtttggaaaggtaggatgaaagaagctgtgtggcagaagaaaagatgcaaacttaaaagaggtgagacaataaattggtgctttgagtttgtgtacatgtgagtttggggagtgttgagactgttgctgtgtagcctcagctggcctcagacttcatgcctccaccccctgaaacgctggaattacaagcatgcaccaccacacccaggttagacttttattctttatgactatgtatatttttggattctagagctaaaagcaagaatataatttgaaacgaagagctttgacaatgaggggaaaacctcaagtaaggaacaattagcagaatacatgaaattcaatccagacttcaagtttagggaaggaggacctgtctgctgagtgttgtggggcagggagcaggaaagaagagccaaggcgaggtattctgtgagggattagccgaggggaagaatgtcctgggtcagagctgtgaaatatcaaaatagtttactggggaagctgtggtgctccttttccggaagcccttaaaataggagaggcaaaatccttgtgaaataatttctctatggtattatctaaaggtgggaatgatgatatgagtgagcccagccactgccaatattgacccagaatgacaatgctcacctgagcttaatagaaatacagatctatgcatttccactatgaagaaagaacagcccttcttattttaaaatcttttacttgcttggtaaattattnnnnnnnnnnnnnnnnnnnnnnnnnnnnnnnnnnnnnnnnnnnnnnnnnnnnnnnnnnnnnnnnnnnnnnnnnnnnnnnnnnnnnnnnnnnnnnnnnnnnnnnnnnnnnnnnnnnnnnnnnnnnnnnnnnnnnnccaattaactactatgtcaactagttttttaagtacaatatccatttccttgtgtctaggggtaattaatttgtcactgtttccccttctgaaacaccattttctctaaatacacccataggccaaggatactgatacaaatattatttttttaggatcctaggaattttttattaggtaatttcttcatttacatttccaatgctatcccaaaagtcccccataccctccccccactcccctacccacccactcccacttcttggccctggcattcccctgtactgaggcatataaagtttgcaagaccaatgggcctctctttccactgatggcctcgtaggccatcttctgatacatatgcagctagagacacgagctctggggatactggttagttcataatgttgttccacctatagggttgcagatctctttagttccttgaatactttctctagctcctccattgggggccctgtgatccatccaatagctgactgtgagcatccacttctgtgtttgctaggccccggcatagtctcacaaaagacagctatatcagggtcctttcagcaaaatcttgctagtgtatgcaatggtgtcagcgtttggaagctgattatgggatggatccctggatatggcagtctttagatggtccatcctttcgtctcagctccaaactttgtctctgtaactccttccatggatgttttgtttccaattctaagaaggggcaaaagtgtctatannnnnnnnnnnnnnnnnnnnnnnnnnnnnnnnnnnnnnnnnnnnnnnnnnnnnnnnnnnnnnnnnnnnnnnnnnnnnnnnnnnnnnnnnnnnnnnnnnnnnnnnnnnnnnnnnnnnnnnnnnnnnnnnnnnnnnnnnnnnnnnnnnnnnnnnnnnnnnnnnnnnnnnnnnnnnnnnnnnnnnnnnnnnnnnnnnnnnnnnnnnnnnnnnnnnnnnnnnnnnnnnnnnnnnnnnnnnnnnnnnnnnnnnnnnnnnnnnnnnnnnnnnnnnnnnnnnnnnnnnnnnnnnnnnnnnnnnnnnnnnnnnnnnnnnnnnnnnnnnnnnnnnnnnnnnnnnnnnnnnnnnnnnnnnnnnnnnnnnnnnnnnnnnnnnnnnnnnnnnnnnnnnnnnnnnnnnnnnnnnnnnnnnnnnnnnnnnnnnnnnnnnnnnnnnnnnnnnnnnnnnnnnnnnnnnnnnnnnnnnnnnnnnnnnnnnnnnnnnnnnnnnnnnnnnnnnnnnnnnnnnnnnnnnnnnnnnnnnnnnnnnnnnnnnnnnnnnnnnnnnnnnnnnnnnnnnnnnnnnnnnnnnnnntatatatatatatatatatatatatattctgtatgctaactgttttcagctaatatttctattaggtatatgtattataaagccataaaattacctctaaaaataatgttagtgtaaaagtgctagaaaataataagactctgagcactgaaaccacatagaatcccaaagaaattgataaatgtataaactctgaggtaacaacttgcaaataggagagtattatagcttgtatccaacagcgactgggagagatgtaggtaagaaagcagagatttgtccagaaattaaaacttactgtcagccttcttcaaaccaacctcagaggttacacggcttttgactttgtaccacttaggaacttgaaaggcaccttagaaacagaacttagcttggcttgtgtgcctgtatatgatacttgatgttgctacctggctgacaggcctgcaccaagtgggaagcataaggcacgtgaactctgatagttctgtcttcctgcacttctactgctttgcctgcaggtctttgggcttcagggacaaattacattctttgattgctaagtatctattcatatttctgacttaaataagcagctatttcctatgcctatctcaaacatgtgctttttgtaaaattagaagagtccgcagctctttctgcatgtcttcactgtgataaatactactatgctatccttgagctgtgagtatcaatttgtgagctttcagaggcttgcctctttctgtagagatactgttatcagatgatcacccaaatacattagaaaaatgccctgtactctgagattcaggacatagaaattagataggccatctttggaatccacttcgggaagtgtatgtaaagagatctccagggactgccatcaatttgcctatacttctgaagattttcttttaaattccagattagaaaaaaaatcaggctgaagtaccagctccatttagtaatttctgatctctacaaacagaattttatctatagggggaagtactgtaatactttccatttagtattatctgccaaggatgacttgatctatccttgaaaacagcccaggacagaatgtgtagacatgcagagataaggaggctcctgccaggccttgggctccaggagtctcagctcagctctggcccaggcgtctttcctctgcagtgcacttaccttaccccgcctggatattatagaggaagcattctgcttttctgaggacacctctattcctagttctttgacagcttaacttgccatatcccctcagttttatgtgcaaaagaatataaaggaaggtgatgaaatgagaaaacctggagtggagttgccacagtggagaagaaacgctttttgcagaaacgccttgtttagtccgcagtcatgacgaggttttggaggaccatgtaggtacagcataaagggcgtcttagtacatagggaagagaggagaacatgcaatgtaaaatatcggttagcagtaaggataaagatgggcgggagaaaaaacacagttctgtctcttaaataattctaagcttgtggttcttctttagaacccttaactttataaagaagtattaatttaggccacatggcaaatcgtataacttactttgaaactcattgtgttaatgagataaaaaaaaaaaaagaagaaagtggcttattataaaggatcaagtttgtacaactatttctaaaaattgagaaaaagggaacagtaaaaaatgtatactttactttctttgacactacactgtaaaggaaaattttatctccatcgcttaaaattatatagttctttttgggtcatctctgtgtcacaattttttaaattaaactgaatcatatgtcttttactctaacttcatacttatagacataatttttcaatttgtttttttctataaaaatgcatcaatttaaaaaatagtggataattcaatttgtcttttcattttcagttggaaattaatctgtttggctttaggctatgtaacacctctcattagacggactacacgtagatacatgagcgtttcaaatacagaaagcactgagattttcacataatactgagatcacaatcagagctgctgattgtatcatgttaggtcttttgagagagagaatgaaccaactgagcaaatgactgagttacaccagtgatgtaccccagcactcgagaggcagagacaggcggatttctgagttcgaggccagcctggtctacaaagtgagtcccaggacagccagggctgtacagagagccctgtctcgaaaccccacccccacacaccaaaaaaaaaaaaaagagtatttatacacaaagagaaacaggtctttatacaatactggaatttgaatttgttgtaatcttgagtatattgtcaggcagtcatggtgctatccacaactgaaaaatgaacgatgcgcccaggtacaatttcaaccaatcgacagtattttcacaaaataactgtatattgaagaaagatgtatcgttaaattcaattggtgccaatttagaggcctttgacttcacattgttttgtgaaagcttcaaagattatataccattatgataaaaaagaagtttaaacaacaaatttattaaattgaattttattcaagtgaatttttacaaatgagcatcgctgtattttacgtaatagaacaactgcattattatttccacttttcgggtgagaatatcagaggttagggtactgtcatttaactgagtttgccaaactcaggactgtgacaggagaggataggagtgttcgttgtcctaacacgtctctacaggtggtttacatcttcctggtgtcttctaaagtcacactaccctattaggctgttaagtaaatgcccacctccttgcttctgtaacaactcacccctggcctgctgttctatagcattttctccatagaggttcactacctaaatcatcagtgtttgtttgagctcctgtattgacacttgttgctggagtgtataagcttctctgttacattcccagtgatgtctctggcattgagctatcatgattcatctctctctctctctctctatctctctctctctctctctctctgactaacaaacagacatttttctatatttttaagagccatgagtttggcccatgcaagatgacaatgaagctagaatttgattttgtttttaaatataatccaagctcaagcctcgtttaaaatttgctatcagagtgtactaaatgtgtgacagcgatgagccttccccaaatcgatggctgagagctggaactccatcctcctggaagaggcctgttgcaccttaatctcatttctgaagtttgctgccacccttgcctgatccccctatccctgacaagcgttctctagtgctaaatctgtgtgctacacagccctggcatgttttgcagtgtggagagtctggttgtcctggagtcttgcacagataaaggaaggatacagttgggagaggaatgcactgactacaaagtgcatcctgaaggccatttagctcacaatgaaggtctgtgttttaaaatagctctataacaaagtaactacagagtgctggcaagggctccaactatttatagaactgagtaaggcgtggtaaataccgccacggtacccagttctcccttgccacaaccccaaacttataagaagcactgtaattatatttttctacttgggaaaaaaaaatcatagtagccattatcagtttaaccatacggaagcttgggctgagatttcttttttaaatgcatagttttgagtttcaacagctgtgctgggtctttaatcatatattatctttatgaagcctttttctaacatatgttaattggctgttttctgtgacaaattatgagctcttactttgatgaggttcaattgcaatcatgttggagtcgagtacgtcaagtttccacccctgctggctcctcaaaccactacaaacatccgcacgtcactgcagtgctgagtaatggcaggattggagctggttgattttgctacagattttttttccacaggatattttcagcttctttgtactaaatctgttgcagggtttgccctttttagcagacacatgctctaaaattaacatcaaatcttattggagattactataatacagtgaggaatatttcataatacaacatcccagcgtctgctttgctttactgagatttcagaacatttcttccacattttaagtcagtcacttgtaaatctgactagtactttctacatgaacagcatgttgcagcagacattttgaatgttcctctttgagggaagcgagttatctgagaggatgatgaggtagaaaggccaatgttataaagacattggaagtaagtgtttctctaggtgttgacaaatacgttggaatgttagaaattttgttgttcattatattctttttcctcttcaatattacattatcagtcaggtaatgaaaacaagacgtgttcatcgaggttaacatcctagaagatgtataacagccttttcagctttctgtcctactgtcaatgtttaatgtatgattcagatgaacagaaatgttctactccatctgctctgatagctgtgacagatagcttgtatcaaataccaacagatgatcagtgagagctataattagaacagatacaaaaacgcagtgtgtttgtgtataatcatgggaaattagtcaaggtaattgattaaggtcttcagtgcctgcgtcaaacatcagtagtattgggattcatttaagtgttttctgcctcaacatgtcatgtaaggggctctagataaactgcagttcttcaaaccaaagccagaggtcgatttccatataggcatcaggagtttagataagatgagccagatgttaacagagccaaatgtgactaggcactgctctcctcgggaggctgtttttaatcagctatttccctggggtaatacacagccaatgagctctaattcctgaggctacctgctactgcctgggaacgtcagtacgaggcttacactgagcatttgtgaaaaaaattagagaagaaattaagggtaggggaggttaacttcagaagtgattgctattgcttaaaaaaaaaaaacagtaaaatttgctacttttaaatgcttttaaatgattaaaaatagagtcagtcccaacttgcaaatacagatgcaagtgaaaagctataattggttaatattagttagacttgtataaagatggatattattttgagaatgtgaatggagagccatcttcagcacaagtaagtaatctcaaaatgtctttgtcattagcgctatcacaccaagggaggttgggtttgcaagccctgtgtggtcctgcaacagtgggactgcaaagtcaatccacacactccatcttgagccaacttacacacagaaatttagttccacttgataagacacatacttaattggctttaagaaaataaaccatggtaaagaacaatgtgtaaatgaaacagagcttggctgttaggaagcccgtgagccatgtggcttaattggggccagttgggatcatttaatgattgctgtcagaagatcagatttaatagaagaccacagtggggtacagttaaacaaattgtcatcgggcacttcagatgagccagaccttaattaagttgattagaatgctgtaaaggagatgaagagacagagaaaaattgatgaatcactaaattccacattgagcgatatataatattaccacaaatatcatctatattttacaggacctttatggaagtttgaaaaccatacatattagcctgtaaactttaacaattgtctaaggtttaattacaaattaaaattaggtgacattcagtttaaataccagatgatttaccaagtacttaacaacaagaacatgcactaaaaaatagtgtgacttccctttgtaaggtcatctttaagtgctgaacaatttgagaaagtaagtaacaggaatagcaaattattttaaggacataattttgattatttaacgtaagggaatatgatcttcacttagaatatcttgttaaccactcatgtctattatttactggttatttactgacgaggttactcaggtgttttaaaatgcactcactgttttatctgcatcttctaaaagacaaacttgtgttcttccacatgctacacggacacacacacacacacacacacgaataccaataaatctgaaaagtgtgcctaacatacaagctcacaagaagaaaacatttatagggtatttccatcttaagcattaaatatactaggctaaagactgagaaaaataattttttaaaagaacataatacgctttggaattttatttttaccctaataagacaaaactgtacgttagcaatgtgtgtcacttcgagctgaccttacttgggaagctgacaattcaggcttgctgctgggaaagcatagtgctccacttgctttgttcagtaacagcagcaaacactccaactgcatgtgcttatcagtggttacagctggaacacagaacctcatgtgtgatgatccatagtagctctccctttgtgctaaatacaaaccagctttaccttcatgggaaaccttacactgccctaactggtcccagcaaacgtgtggcggcaagggctgggtgcgtttataagaacaaagacgtgatagaagcctgcatcatctatatagcctgatatagaaatcctgaaatctgtcgtgccgttgaggagtatgaggcttttgacacatttagaccatttggagtttattttggcttggagaatgcaggatgccgttttaactacagtggggggaaaatgtccaaggcagactatggcatgggtaactgtgacagggaatctgtgattccttatgtttgtcaaattgtttgtaatgctgtgcagttgtctggaggtatgttgctcctaaattctcgagttgtgtaaatacagtgatttatttaaaagacagtggcaggttaagcccacttattaaattaattgcaagggttttcaaaatgagctccattttagccttattatatttctgacatacatttcatctccttttgtccttggggaaagatactaaagtaggactagaaacactcacatagagtttccagcagctgtggtcactgggaaattgatgtatttccctagtcatttcttctcttgcagcctgaagctcttctctagctggtacttatgagaaagtccttaatttgtatgacatgttccttcatctaatgcttattgttaacaatgtaagtgaggtctccatgttgtctatatagggatgacatcgttactaactttactccataacgtatacatgaaagccaacatacaagtgtaggcaatccacattcctggcaccaccatacacggtaccattcctgtagtatcatatgtaatgaggctataaccatctgtctttcaaatgcaaacatgtttccagtttcaggtaggaaaccaaaagtctaagtgagaggtttgatcatcaggctacagttacctgaagtacccatttcttaatgcatagactcattcagctttcacttctgtgtggattatttttattctaccaacaagatactgtataccatggtaaaggattaacctaggttaccaagttgtttctgtataagcaaaatgtgagaaaaaaaagtccttagtactaattattaaaaatagctaataaatacctaagatgagatattcaagccttgacaaaaagtgttcagttaaccaactggtaattattagtcccactgtttacctgattgatgccaggatagatcctggcactagaggcatttgattccccccaccccatggtgagtgctataaaggagagggacttagagctttgagaattgtctaggggaagtgcttctgagacagaaggaagaagttgagcacacagaagggagaaaacattccagacagaaggaattgcatatgcaaatgccctgtggtaggaagaaggacaatggagtaagaattttttaagcaattctatttgctttttgcctgtataacactagggtactgagacttgaaggttattcaggatctatcatattgatactaaactcaatcaattgggaaatgctcttcacagcggtatttatctagagaaagggactagcccttttatgttctcaggatgagcctcagctatgtgacttagaagccgaatgcactctattctgtaaaaatatatgataaacttagagaaaaatgaaaatgtgattttttaagaccaggaaactatttctcatcacacaggcaagcactgctaagaataataattgggttatttcatttgaagctcttaagggaaaataggtatgttctgctagttctttttaaccaaagtataattgcacgcctcatatgtctttcaaacaaaccataaagtagaaagtttaatgcatctaaatgcaagtaatgagcaaagctttcccttgaaaggtagtgaatagctgaatcacttgactcggtgacaaacacaggcattcagagacagggcacatatcactttggcctttggctgtacatgggactttcatttatttaataatactatttcttgggtgatacagtatacctaatttgcaggcttgagtttaacaaaacaaggttttctgaggatgctcatgatgatgcaaatgtgagccagaggaaacattatttgccaatccagataaaagaaataattctctccttgcagattggcattatacattctaatgcttaaacctctttgggctgtttttatttaagtgactgtcctgtgctcattgaaacaaaatacatgccttacaaaggtaattttagcagcagagaattaatttcttcccacatcttttaatgtggcatgggagtctcaatctacgatcaaaacatgtaactggaggttatgtttaatttctaaatcaaagtgttgtgggaagacgattgaaatttgtggaggactcagacctcgttgctatgtggttttcttccagaaactttagggtagacttccattaccatgtgagaggagccaagcgtcggtgacgagatgaaaatagtttcaccatcgactgaaagttttcattagttactttgatttataattgaaattttaaggagccccaagggccccgataacaagaattatttcctcactactcgatcttttctttgcaatgtgagatgaaatatgtaatcgatgtatatgactaacaaatatttgtttactgctgtcatgattaagttctctcccagaagttataattcacttgttttctttgtacagaaatcttcatttgcttcagaaagtaaattcagtatatatggtgccattttctggataatgtaatttttggtaaggcatggtagatgatgagggagcggtttctgctgtttcacccaagtccatttcggatctgtttaatttctcatatttacaccttaaggtgatcataacaaaccattaacccagaaccagaatggccttttctcaggtgtttggaagacagaaatgagaaaatgtgtgcctcccatctgccttttcctcgctgccctttatctgaaccagcactccagggcctgtgtgtggggtgtgctgccgagcacactcagcctgctctactcagagaaggaagtggagagttttggttcccattttacacttgtggagcagtttagggaaggaagcacctttacaccttttattgttcgcggttgctgacatcatatccttccctggccagtctgtgcgtgtttcctgccattctgtcaagattcttctgttactaggagggatttgctgaagggaaggagggccagaaagagtgggaggaggaagggaggggaggtgtgtgtcaatcaaactcgcttgtttgtaaatgagggatccctcaggagaatggtctttagctgtccccaagacattcttctctgagcaggtctcagaacactttgccttcgtctgtctgtcggcttatgccaaactcaaagtgaacagaagcctgccatactgaagttccccttttagtcagcagactgactttagttttttatttaagttggcaaaggaagaaaaagtgcagacgactctaactccgtacagtgttctttttcttcccttcgtgttcaaagttttgattgtttacatgtagctgtcattttccaagaatggttccttcatgtgagaactgtagtatccagacgaagcctgtggttgattgtacataatgaaagttctcagtctgactgagcactactatatgtagtttaattactaataatcttttctttcacatgcctgcaaaaccaccgaataggttactacagtaataataatctctttctctagccctcctgaaaataatacttgaaacaaaccatagagtatagtttatgtataaaaattaggttaataaatatttatactaaaaagcagaaattaagcaaaagttatgcaccggtggtgaccttcctaattctttgcatttttcctgatggccttgaaatgtgaggacaccattgatctgttgctattctatttgtgtggactttatacaagtctacattttatgaatttcaggaggcaacacttcagttactgaattgagcattgtccttgtgcggaaaacaaaataaaagtcgaattaggtttaaatttccatctctctccactacctggccatatttcaaagcggagactattttcaatgatatttccagggatcatttcatgtgtgtgttcatatttgcacatacatgcatgctaatatatttgcatatgtagttctaaattttttttcctcattgtgttttaagaattaaaaaaacaaacactttccttggcttcttctaagcacagtgtctggtttcaaagttcaaaaatgccagatggtgattgaaggggctcctttgctttcagaggccaggagctcttgttctctaacgatactcttcttcaggggtgtctccctacttgctttgttacaagtattttgaatcaaggtctgtagacagtgacctcctccctgctgagccactatgctctaatctgttcaccctgaccttccacccaaagtgagtaagcgcttaggcaggcatagtccggtaagccgatagtgccacaggtctcagctaagagaaaggaagggaagatgctcccatatactttgacttgagattcatggattgtttttgtttgtttgtttgtttgttttttgtggtggagaaagccttcttgtctcattggggtattacaaatgcatgggaaatacaagtctgggctgctgcttgcttcttgggtaagactatagtaaatgcagaaaagattcccacttgtatgctgtttaagaccatttctaagactaaatgggtagactatttaacaatgttggatacatcatgtgtgtgctttgcaaattctttatctatatgatcttggtgtctttatagtagtgtctttgccttgtgagtgtcttagtgtgtgttgttcatataacttaaaaactttgagactgctgctaacattgaaaactgtggctggagtcgtaatctttgacaagcacgtcgtaatcatggtgaaactcacacgtggatgccgtgaggccaaactgagctgcagtttaggagaaggacattgggtaaaggagagtggatagtcttagtgattaagcagtgcttaatccaccagaactaattatatcataataacctctgcaattagacaattacctaaacttatatttttaaaaatttactcaaggtaacaaagaataaagaaattgaaagtcagctgaaggtcagaccaagtatctaacagctttttctgttccaagaaccttgaactagagccaaataatctattaagtagtcaggacagtggcttagcgttacataatacatgtgggaatttttcaggtccactgtcagagactaacccgagtcaagagggaaattctgagcagtgtgtgaagtagttatatcctctgacataagagagacaaaataattgaagccgctgcttgcaaatgaaacaagcctgtggaaggcttcctacctagttaagttccaattcatagcaattcactttcattatgtgcaaatatttttagatataattttaaacagagtaaaatatagacttttaatattctgtgctctatgggtttgccatgtaattgataatcattattttaattttaattcatgacctagagctctctggtatataatatcaaggttctgtaattttgtgtctgactccctaaggagatatgatatgtctcttttaaacatttaaatttagagggctgtggtctattattaaaaagcatatagttacaaatgagataataaccttagcttttttgcaccacgtatttcttaccagtgaccgtcattcgcgaggattgttctaatgaagagtttaagagcttcaggaggaagtgctctcactgctaagcgatgcttaaacataagaggaaacaccccatattacttttcctgtgctccctggcagtgatcttcgtaaaataagattaaaggatttagttttaaattagttgacatttacatatatcaaagagcacttccataatcgtccatcttatttgcataactaggggcgttatcacctctgctgtcaaaacacgagattgttttccattcagaaatgaattagatgccctacttagcatacacaggtatataaaggttcattaactctctgatttgggtaatttttcataacagaagggtgaaaattgtcacctaatttcattaaaacatattaagaagctctttacaaaaatacagttcatttcaagtgttgggttttaaaacacagttttcatcatttaaatgacttcttaaattacttataagttattttaattataaaagcaaagtgccctgtgcagtaagctccagtgtgcgatgtgccatgtgctctgagaaagagttatttttactcattttattgttttgtgaagtttatttccctgatgaacctaggaaactggcttgctgcggaagaattgtttaatgtttcgtttttgttcagcaggaacgaatgcagggatttgggaactgagctgtgcgcgtgctgaagaaggaaacgtgtttgaaggaaacaggaaagagaaagaaaaggaaggaaaaaatacataatttcagggacgagagagagaagaaacacggggactatggggagaaaaaagattcagattacgaggataatggatgagcgtaacagacaggtgagtgtggcacatcccttcatatctgttccacacatacgttcaaggcactaaaatcatgctggactctgtgagctcaatgtatccagtttaactgttgattttcatctctttgggacacagcagggaagagaactttaactgttagaaatatgttttaaagattcctgattcctcactttccactgcctcgagacctttaagtggaagctgtatttgtatgacatgaatagcttaataattaggagttaataagcgtagaattgctacactgcacgcatcatcaaacaaagataggcttacatgcatgggaactgggccttttgtggtcatccacttaaaagtttataatatagcttaaatatcctctctctgagaaggggccagctttcttctcatcacaaaggagagtttgaagtaaagccaaacatttccagactctcctgacaacagcagaacttttacatgagctagcagttgtgtaaaacatagagagaagaacttcctgttaacatgtgttttctcttattcctgaattttataaacctggtactatcttttcttttctacacctccagtgataatgtctgtaagacagaaccagttttgaagacttcaaatatcaaatgttccatcctgtgctatgaacctccattatgcattatgagttcctacagtctgagtcactgtctttattctggaaagagtagtctggctatgtgagggtgactagcaggtttagacacatctttctgttgaatatcaggtgtcgatccttaaaaggaatcagtctacctgggtacacacagtggcatgcagacaatggaacctgttccttggccctaagagaggacagactcccactctaacctatttatggtccagaatattaaatatagctttggaaatagttccccacactctaagtctccaaaataaagacactcaccttctatttagtccctgcttacccttgtgtgacatgagaatagattccatttaaaacacaaatgctttcacactcataaattagaatgaataggaattgttgtttgtttcattatgtttactgatggctctttacaaaaagccagtgagcttttaagaactaagatttgcctggttttgttttttaagattatacgttttcagaaatgagtgtatttcacaggacttgaattgctttgagcttaattttgagttaaaggatgaaaaatataagattcatgagggattccactattttcattcatgtatagctgggatcttaaattaagactgaaatattgaacatcacttacattgcctatgggggcattgctgttggaaacaatctttttgggttggggtataaaaatagatgaattatcatttctaatttaatattaatctattttttagcttcgtgagattcattatatctttttttttacttataaagacagaagaaaaactatgggggttgaattgtgtggactttgctgtgctttttaaggaaacaaagcatctatagagatacaagatttgtcacatcatactcttgagagagcaagtttaaaagtttgcatgtagttgtcttgatctatgcttgtagatactcttacctgtattaaaaggtcacaataattttaagaagtggagaaagtatttaaattcagcttatgttgaccttttaaaaagtactaaggatcatttcctttattatataggatgtagagccaatttattatttttctcagtctgtgtgtacagtaggctttttaattcaataccattgaagaaaattagtaacaataatattactgtggttgaagctatgcttcagtggttgtccaagatgactattgactattttaaagagctgtcatttatgataatgtttgtcttgcttacctctcattttctgtgcaaatggtccaaagaaccacttggataagagaatgaagtatataggtcacttctgataatcaaaaccagcgagtgtgtgggggagctcctaacctgggcatcctttaaattatgtgttcacatgttgaaaagaggaatgtcagcagcttagctctttctgaagctgcctgactggggtggcctagtaggacctcacacagaggctagctgccgtttcttcttggaagcagtgaacacagttttttttttttctgcctttgcatttgtgtatttgaccacatacagaataatgtgggcctatgaagaaaaagaaatgctaacccaaagtaagccccgaaatagcatagaacttattaacacattgtgtttcagaaagataactcatctgaagacagaatagtcatttatacacagttctaccttcattgtctcgtttataacaaggaaacaatggctaaagctccattagaaacataaagtagtgtaatacagataaaatttcacatatttttactttacattttttcagtttctacttttataaagccaatttcttagtcttcattaagtttaagttaatatgtacaacaaactcaggaattgtcattttatcttacagatacactcagacagcttgttgaaagtcattaccaactattttccaatgatggcatgtaaattattccatttaatccttaaaataggattctattttatagttagaggttatttatttattaaatcaacaagtattatttgactgtaccctgcccaaaagaaaatccttcctagtgaatagcagtctcattcatggatgagcgaagtgttctgtaaaccaccaggtagcaaatactgtttgcattgtggtgtctgactcagctgtggagctcttcataggtgctctggatgcagccagagacagtagatatgtatctatattcagtaagaaagctttactgacaaaacaaatatgcattacaattgtctagtggaccacaatttatagacttctggtggactgaaatagacaagaactatggaaatacagaacaaaaatgtcatttatggcctgagaatgaaactatcaaagcactatgaaagaacagccagggggtgctgtatttaccactcaagcttggagaatgacctcgccaagcaggtaaaaatatgggaaccacagcattctagaggaaacagagtttccaaggcttgagatagaaaaaagcttggctgaagattcagaacacacttaagatttgagcctggtgtgtggctttagagttataaaagactccacatcgtgttgaacaacatcctaaaacgcttagagagtctgcttcacttaagagtaactggtcaagatcttacagcaaagggtaaaaaaatgccaaagatctagtctagtctcaaattactccttttcaaaacaaaaacatgcttctttcaatgatgctatgctgcacctagcataatttaatggctaaaagacctagaatttacttcatctccttttccagtcgtttcctattggaacccataagagatagataagagttcactttttagagatatataaacctatttatagttccagctctatatgttaccttggcttaatacatactgtagtacattacactacactaaaacagtataactcttcagcaacttatttaacctctctgaacctcattggtagagtgaagattaaaaatagtcacacacacacacacacacacannnnnnnnnnnnnnnnnnnnaggaaacagagtttcccaaggcttgagatagaaaaaagcttggctgaagattcagaacacacttaagatttgagcctggtgtgtggctttagagttataaaagactccacatcgtgttgaacaacatcctaaaacgcttagagagtctgcttcacttaagagtaactggtcaagatcttacagcaaagggtaaaaaaatgccaaagatctagtctagtctcaaattactccttttcaaaacaaaaacatgcttctttcaatgatgctatgctgcacctagcataatttaatggctaaaagacctagaatttacttcatctccttttccagtcgtttcctattggaacccataagagatagataagagttcactttttagagatatataaacctatttatagttccagctctatatgttaccttggcttaatacatactgtagtacattacactacactaaaacagtataactcttcagcaacttatttaacctctctgaacctcattggtagagtgaagattaaaaatagtcacacacacacacacacacacacatgcccattacagtgctaagatatgaagccatgtatatgaagtgcccaggatgtaagtgctcagtgaatgcccagatcagcttctccagttgcaaaccacactcttggagccattgtatcttatagtcactgtgatttctagcaaaagttgttggcctttcactttgaggagttctaccataaaagaatgtcaggagggggtggcacagagtagagcaggaacacaaagaagctcccttgctgagaatcatcatccagaacagtgctgctgcagaaagggtggcctgtgggcagggaaggaagagcacacacgagacatgagcaatgcacgccttgcgacagggaggttggaaagagagtcctaggtcctgtgcatgtgggattgttttcaaatgtatgttactgaccaaattatttttaaaatacttttcatcattttatcacttctacctccaagcttatggtaactaatatttcaatctccagtctctccatcttcttgtttccttgtttatccttgacccttaaggattaggcaatcatagagtcttggcctttttcatgttttacacattctttagttagtgcttgaaacaattggacttttaattggtttattatatgtttcaattttataaacaagatataattagaagcctgttcgatcaggaagatatatatatatgtatatatattcagaatgctaagtaatcctaaacctattcgctcagatgtttgtactgaatttttcatcttccctactttgaaacagctaagataattaaattccaatatattcatcaacttgatacaaaacaacatctaaataaatgaataactacaagaaggacgtatttgcaggtagtacacttaggatctaggacctaaaacagcacatacactttctatacctacacctacacctgcatctacacctacacttgtacctacacctaagcctacacctagacctacacctgcacctatacatatatatgcctgtagcattcctttgttccttcagatctggctatttgttttttgcccacaaagaaaattctacataattatcaatgtgataacttgaacacaaattaaagacaatcagtaacattccccttttagtcaagagaatcctcttacaaattaaaataattcagagttcatagcaattaaattttctagcattccttcctcttgggtttctagatgtttcttcgcatgtaacaactaaggggaggtctgcagaagtgtgttcactatagatgtcatctctaatagtttgtataccctgaggctttatcagctaaatctgattattttgtgctgaactaaagaataaaaaaaattacaattccctcagatgactcaaaaaaagcttccttttacctatattcagttctttacattttagctcaagttacacaggtattttcagtgcaacttcccttcaagatagtatccagaatttgaacacataaaaaagggccggtcacaattctaaatttggagataatatctaattacttaaataaagtttgatgaagttgtgaccaattcagtcttcaaatgtagaagactagatatttgagaaatgcaaattagttgctttgacaaaataagctcttggtgagttctgtcacctgccatggagagcagagttctgcaggcccattgtcaaaggcacttccttccgcgtcgccagaatcagaatgttcctacacgccagttttagctgagacagtaccactgagctaccttttttgatggaggaatcttgaccctgctacagatctggagaataagagattcaatggaaaaaaaaaatgagttttctgtcttagtcgaaataagtttgtatataacctcataatgttggtcattttatttttttccttaataacatattttaacagattataattttccctgaacttgtacaaaaatcatgttcaggtcattctatataaatgaaatatgggagtatcctagtgttgttaagacacatattgctcagagttgattcaatgctgggaatatctaatggacagctcccctctgcatcttcattcttttactaactagtcttaaagtcctgatggaaagtctttgattagatttgaaattatttattattgaagagattagcaaggaaaaccagaagtagagaaaatggtgtttgttatactttcgaaattatattagtaaaaagaaaatgtaacgtggagttgtcagggtgcttgtgtgtgattaaaaggatgccagttcattttgttttagcaattagaaaaattattgacaaatggtctctgaatcatggagttaacacacagcacacacatatccatcccataggggtgttcttttttctatttatgttagctaaatctgctccctgtgccagaaaagaattgccccaactgttaaacacattcattaggtttcctctgataggaaatccaagagaggttaaaacttgtagaaagggctaactgttcttcattaaagaaataagtgctttctctacatgctcaggttatgttattggctctgttttaatttatgattctgacataatttctattcaaagataaacaacctaaaattggtaaggatattttcctgtatctcaaaacttccaacattgtttgtagaaaacagacagaaaatgccctgtttggctctgtgaacatgtgctcacaacattttccccttcaaatgcacaagcacacatcacatgtgaagtagctttactgaggaccaacagtagggatatgaacattacaagtagaccacataaagtaagaaagttttccatacactgaattaaaagaaacactggtaaatgttttcaaaccttgccctttgcagtcaaaactcccttttgcattatgttattcatttaaaatggaatactttcaaacttatggtgaaagcattattctaaagtttataacccattatactttttgaaaaacatttggaaactatatatttttttccaaacataatagcaagtataaaaaataaaataaataacataattaaatggaggattaaaaattccccatttgcagtgtgtacttgtgtttctcttgaaatatgttagaccattaatgggaataagagaaaccaatttagatgtttggaaattcgacttttaattttaaattggaacagtttagcttaagaaatcactaacatttaaataacatttcaacaaatgtaactgtttggaaactacagctgaggcagcctcctgccttctgtcttgcaaggattgatttggaaggccctgagggagaaaatattggagttgggagctaaaactgaagccactgtgggaaggaagaagttactctcttcctgttatgacaggaaagcgtagacaaatgtgcttcctgagttagctcagcagggaatgtaggattctttgacctttaacttaggtatattttgaccatgttgaactagtaaacatgctttggacttccagatactaatttgttttatcttctccacatgaaattagtatatttagtagatgaaggtgcagaggagcagcctgtaaccacggtagagactgtacttacaagagaagtgagctattttcttctacttctatcatgtttaatatcccaaatagatttttaaaattggttgagtgcatattacttttagtttcagaaggtatcacgtacatttaagaggcatttaactattataagttattttgttgacttgaaaaatgtcaataatgaattgtatattttaaaataaattgtattagtgtgataaaaaagaaagaaagaagaaaagaaagagagaaagaaaggaagaaaggaagaaagggagaaagagagaaagaaagaaagaaagaaagaaaggaaagaaaggaagaaagaaagaaagaaagaaggaaagcagccaatcagacctgaagagcccatacaagtgtgtttaaaatgtcacaggatagaattctcttaaaatgtaaagcattaccaggttttgcaaaggccactcttaaaccttgacaaactaaatgatggacactggcttcccctgtccttacgtaatccaattatcagaaattcacagaaacaacttttaaagcccaaactcttcaatggacactcccttgtctgtgatacaatctcctatttattatccaccctcaaaataccatgcaaagcacacggtttaaatttttgtttagaaattgtgtatgttgacttagggtaagaggctgatagagttctattctctgaggccctcattttaacaagtgtattgtgttgagaaagttagggagcactgcttgcacatcctgtggaaatgctcctgtatttcactgaaacatggctcaatttgctggaggctaaggaggacaatggtttcctttgcagcagaacacactgctgtctcttggtcgcaagttgtgctggagggttacaagcacatggtagcagtctgcttaaaagagcccctcactgctctttaaagagcctttcatttaggatggcaagccccttcattgtataaaggagcgcttgtctagaacaccactctgtagtggcacggcctcctcccactgagagtaatcatcaggcctagcgctcatagcctttctaatgacagactgaattatacaaaagaaaactgaagaggaatactcagaacagttgtgccattgcttactgacaggaacaagggaggcatcctggagcatttagaaggccatttccctttttacaattagagattgttgttacagactcttgactctatccctaaccctttaaacacatgggaagacctagtggctcatggattattacagagcacattgtctccaggagctgctcctcctgtcactccttactccctcatctgcctcaacttagaaaactggagatcatcttggtgaccgaggggtaataacgagactgaggttttaaatactttcaaataaagaagttatgtttgtaattctaggtgtgacagaatggaagaacattgaaaacagagttagttgggtgtattagttccaacatattttaaaacaaatgacaattactttatggattaaaattatggctttaggatccagtcactcaggggtagattgcttaaccatctacagaaacctggttttatgccagttctgggaaaatagaagacaagaataaagagacagaaaaagaaagacacagagatgggtaagggagagggagagagagagagggagagggaggcagggagaaagaaaaagaataggaaagagggagggagagaaagagtggtagagagggagatagagggaggggaagggagagaaggagagaaaagggaggaagagaggggagggaggaagagagaaaaggagaggaagagagaaaatgaggagaaggcaggaggagggaaaatagaatgggagagggtggatgggttaagaatcacaccccttgaaatcaaccaagtggaaacaagaagaactattcaaagaattaaccaaacgaggagttggttctttgagaaaatcaacaagatagataaacccttagctagactcactaaagggcacagggacaaaatcctaattaacaaaatcagaaatgaaaagggagacataacaacagatcctgaagaaatccaaaacaccatcagatccttctacaaaaggctatactcaacaaaactggaaaacctggacgaaatggacaaatttctggacagataccaggtaccaaagttgaatcaggatcaagttgaccttctaaacagtcccatatcccctaaagaaatagaagcagttattaatagtctcccagccaaaaaaagcccaggaccagacgggtttagtgcagagttctatcagaccttcaaagaagatctaactccagttctgcacaaactttttcacaagatagaagtagaaggtattctacccaactcattttatgaagccactattactctgatacctaaaccacagaaagatccaacaaagatagagaacttcagaccaatttctcttatgaacatcgatgcaaaaatccttaataaaattctcgctaaccgaatccaagaacacattaaagcaatcatccatcctgaccaagtaggttttattccagggatgcagggatggtttaatatacgaaaatccatcaatgtaatccattatataaacaaactcaaagacaaaaaccacatgatcatcctcgttagatgcagaaaaagcatttgacaagatccaacacccattcatgataaaagtnnnnnnnnnnnnnnnnnnnnnnnnnnnnnnnnnnnnnnnnnnnnnnnnnnnnnnnnnnnnnnnactaccaccaccaccaccactacaaccaccaccaccaccacaacaacagatgctaaggcagtgatagctgctttgaagcaaagttgcccagactaaaatgtagataacatctgaatagagattatctgggttaatgtgggctgcagtaaaagtactatgtgcactgaaggatagtcagtgagttgagatagctgatccttctcctcacaccaggaaaagcagcattctcaaacagtttggagactctttctgacaccgagacgcgcattttattcgttctcacgtgtagggatgctgagcttttgacaagatgagcaatatggaagaaggagatcttagagtgaacactggagctagggtttggagcttttgatagtcactggagatcattcaatggttttctggaatcaaaggggggaaaaagagaaaagaatggagatctagatttaagagttacaattaagtggcagtaagaagttaactaccctgtgtaagatccattgtgtttaaagaaaataaatgctaaataaaccagtcagacttccaaagtatgagcctcaaaaaatgtatatatttcttaaaataaataaataaataataaataattaagcacatgatactgtcagccattagttggggaagccggttgtaatttaaaaggtttctgagcctttgatacaagagtctgccttactactaaatctgtgagacgctaggacaggtcttggaagtcttttcttggaatgatacagtacataatgcttgcttgcaaacaccagaccatatatgggtttgtagttaatgttgttcatgctgttgggtggattgaccaggacaagctaacatttaaagaacactgaaattgcaagtgtggaatatgttcatttactgcgactggcgagtgaagggcatgcagaactggaaacaggagcttaagggggcagttcctgttggaaaagcgtgtgcacagaataagatgaatagaagagacaatgattccaggcagggagagcatccaggccaggaagctgctgggctgcccggggtgacttgataaggatatgaatggttgggctgcctgggaagtagacaagtgggaacctgacaaatgtgggacttgtaggaaagggattatgggacttggtcatagattagactagaagaaaaatgctcaaaaatagcagttactgaccttagaaaatcagaaacagggagaatgaaaccaaaatcctaacagtaagttccccagtagttcccagtagtccccagtagttccccagtgcccagccaagtttctagagagagagagtaaactggctgagagttgtacccacaagctgcaagggttgtcaaataagtggcacaagagtaaccagttttgtgtgtgtgttgttttaacacagatctaaaatattaggtttataatgccatggctagtcttcaagtaattaaaagacaaatcaaactctagttttataattgggagaactgttaaacatgttgaagttgaagaagctgaaagtttcgaagaaacaagattgtttcttctgtcaccttcatttgaatgccctgaattaaatcttacatctccagtttccctgtctaccactatctagcaaatcacgcattttcaaattgtaggcagaaatcagttcagatcatttgctttgtctttgaatgtgttagcacccaagactctggcagctctacaccattgttttgcaaaggaaaaaatagtagtgtgaatacatacgccacatacgagtacgttttttgtctttaaaaaggtgttcttcttccaggtgacttttacgaagaggaaatttggattgatgaagaaggcttatgagctgagcgtgctgtgcgactgtgagattgcactgatcatcttcaacagcaccaacaagctgttccagtacgccagcactgacatggataaggtgttgctcaagtacaccgagtacaacgagccgcacgagagccggacaaactcagacattgtggaggtgagcaagcacactatgagctttctgctgtgggcccaatacatgcttttcctgcgctcctagtcctgtgcctgtgcttggggcgtttaccccatctatggctgcaacatgctggttactcctcccaaaagaagagtcaaaagtggcaaagtgatgacccatatgggatctagaaatcaaggtccagggtcagatcgatggctgcctcttggacgagtcagcaccatcctcccttgtgtatcaggacctgtgagttgggaattgtgaccaggtgctgtgtcatccatacttacaattcattttaagtgtataaaacagcttctccagcagaatcaaaacattttttcaggtgacctcatttgaaccttattatgtatgtcacctctttctaactcattctctctctctgtctctctgtctctctgtctctctctctctctgtctctctctctctctctctctctctctctctctctgtctctctctctctggaaaagacagctagttataaaaatactgcttttcctcaaaatgatatcattatagcattgaaaactgttaatacacgtgaagtcagatggataaagggccatagaatctcagtgaaccttctaatgtattttcaacatgtgtcctatttaaatggtgctttcttatgagcaatggctcccccactaaaaggaaaagagaaattttctctctgcctcatttttgcatttcctgtcctttcttgggacaagtagtagatttgcactgactttcccagagctggaagagaataaatggttcagaatcatgaagtccacagttggatttccagagcccagaccattctcacagatagacctctgtccaaagggtccaaccctaattccaagcaaatacacaaactcctacaaacccttctttttattacaccctctctcataattaattatttaagacaaattctgatttctttccttttatttgaagtttttgaaggcatcgcaattattggttttaaattttcattctgtcactttgcctaataagaacaaacaaacaatttcagttaaaagtcacagcatgtcatgtttgcttatgttggctagtagtctgtgccatgcacttgatgggatcctcaaacttaagactggtaatacaatttacctgccctttaggaaaggtcttttcatgaccacatattgaaaatgctaaaccaaacatgaaggaactagttagttgtgacgcttcaagggcttttgtgtgtgggtactgtatgcttcaaaccttatctcataccacagctataacaacaaatatgccagataacaaactaaattaaaatctgattgcacttgatgtccttggactatatagtccttcatatgctctgaaacaatagagctatattagaggaattagaaaattatgtttacttttaagttttgctttcaaggtttaaaatcttgaagatttatatatggagttctgcagaggagggtgctttatgtacttaaggtgacttcaaatttcaccgtctatatgatatttttannnnnnnnnnnnnnnnnnnnatccagtcctcaggggtagattgcttaaccatctacagaaacctggttttatgccagttctgggaaaatagaagacaagtaataaagagacagaaaaagaaagacacagagatgggtaagggagagggagagagagagagggagagggaggcagggagaaagaaaaagaataggaaagagggagggagagaaagagtggtagagagggagatagagggaggggaagggagagaaggagagaaaagggaggaagagaggggagggaggaagagagaaaaggagaggaagagagaaaatgaggagaaggcaggaggagggaaaatagaatgggagagggtggatgggttaagaatcacacccctctattcattgaatacaaaaccatttctttagaattaggcctcaaatactgtggtttcagactctaaacaaaattaacgaggcttctcttaaaggtagtctgaaatcttcaagggtttggtcttcgtgttcttagtggtgtagtagctactgtttggaaggctcgtcaccttaatttctttagatttttttccagtagggtacagggattcccattgttaatacagaggtaggttcttcaggggtggctaggaatgtaaagaatatggagcaagggtattgaggaaaacggattccaaaatacccttttgtgacccagtaagccaaactaatttcccttcctccaaagcaactacacagaaaatcctgtgctggggttttaaaatgtgctgttggaactgcctgtgtagcaatgtctgtgtggaaatcggagttccattctttttattctcgctgtgagcagacctgtgtctgctgccagccaaagtacttcccattttgggaaactgaaacatctataaatacagaaataatccgtgactactcatgcctgtgtgtggttctcaccagctttcgtgggaatggcttgagtgtctgtctaagggtagccggggctacagaaccacacaaaagcatccctggtttgttggtggaaatagaaaccactggctctcaaatgaatcttggtagcattattttattttctttaaccctaaaagctacctttacctaaattaatgctctcccttagggtgctgttctcgggaaaagggtcaggtggctacaaaagcaaacaaaaaaagtcaatgtacacctcagctaacactggcctgtacctgagccatggaagcgtctgctcagggcttagtaac

SEQ ID NO: 1379 - DNA, 2432 bp, Mus musculus
aaaagcttcggtgttcatagaaaaggagaggaggcgagcgcagcccaaactggggggtttctcttcaaagccagctggtctggctttattctacaggaatttttttacctgtcagagtttggacaacaaagccctcagcaggtgctgacgggaacaacttcctggagaagcagaaaggcactggtgccaacaaaagcattgaaaactgtgaagtaacctctggagagatgaagtgaagcgtggaaggccaatggctgtggcagtgaagaagtgcagagggaacgaatgcagggatttgggaactgagctgtgcgcgtgctgaagaaggaaacgtgtttgaaggaaacaggaaagagaaagaaaaggaaggaaaaaatacataatttcagggacgagagagagaagaaacacggggactatggggagaaaaaagattcagattacgaggataatggatgagcgtaacagacaggtgacttttacgaagaggaaatttggattgatgaagaaggcttatgagctgagcgtgctgtgcgactgtgagattgcactgatcatcttcaacagcaccaacaagctgttccagtacgccagcactgacatggataaggtgttgctcaagtacaccgagtacaacgagccgcacgagagccggacaaactcagacattgtggaggcattgaacaagaaagaaaacaaaggctctgaaagccccgatcctgactcctcttatgcactcaccccacgcactgaagaaaaatacaaaaaaattaatgaagaatttgataatatgatcaagagtcataaaattcctgctgttccacctcccagctttgagatgccagttaccatcccagtgtccagccataacagtttggtgtacagcaatcctgtcagcacactgggaaaccccaatcttctgccactggcccacccgtctctgcagaggaatagtatgtctcctggtgtaacacatagacctccaagtgcaggtaacacaggcggtctgatgggcggagatctgacatccggtgcaggcaccagcgcagggaatggatacggcaacccccggaactcaccaggcctgctggtctcacctggtaacctgaacaagaatatacaagccaaatctcctccccctatgaatctaggaatgaataatcgtaagccagatctccgcgttcttatcccacctggcagcaagaacacgatgccatcagtgaatcaaaggataaataactcccagtcggctcagtcattggctaccccggtggtttccgtagcaactcctactttaccaggacaaggaatgggaggatatccatcagccatttcaacaacatatggtactgagtactctctgagtagcgcagatctgtcatctctgtctggcttcaacactgccagtgcgctccacctcggctctgtaactggctggcagcagcagcacctacataacatgccgccatctgccctcagtcagttgggagaccgtaccaccaccccttcgagatacccacaacacaccacgcgccacgaggcggggaggtctcctgttgacagcttgagcagctgtagcagttcctacgatgggagcgaccgagaggatcaccggaacgaattccactcccccattggactcaccagaccttcgccggacgaaagggaaagtccttcagtcaagcgcatgcgactctctgaaggatgggcaacatgatcacattattacttaatagtttttttttttcttgcagtgtgtgtgtgtgctataccttaatggggaagggggggtcgatatgcattatatgtgccgtgtgtggaaaaaaaaaaaaaaaagtcaggtactctgttttgtaaaagtacttttaaattgcctcagtgatacagtataaagataaacagaaatgctgagatacgcttagcacttgagttgtacaacagaacacttgtacaaaatagattttaaggctaacttcttttcactgttgtgaccctttgcaaaatgtatgttacaatagatagtgtcatgttgcaggttcaacgttatttacatgtaaatagacaaaaggaaacatttgccaaaagcggcagatctttactgaaagagagagcagctgttatgcaacatatagaaaaatgtatagaggtttggacagacccggcaagtggtgactaccggtaattgtaggaacacgcctgtcacctaacatccaagcacgctcacaaacctgcaggcatatcattggcgtatggcactcattcaaaaggatcagaaaccattcagagaggaccatacctaccttaaaagaaaagagaagaaaggaaaggaaaggaaagggaaaaaaaagtgtggcgtttgagagctaacatatttaattaaataaataaatctgggtctgcatctcttattaaataaaaatataaaaatatgg

SEQ ID NO: 1380 - DNA, 1299 bp, Mus musculus
atggggagaaaaaagattcagattacgaggataatggatgagcgtaacagacaggtgacttttacgaagaggaaatttggattgatgaagaaggcttatgagctgagcgtgctgtgcgactgtgagattgcactgatcatcttcaacagcaccaacaagctgttccagtacgccagcactgacatggataaggtgttgctcaagtacaccgagtacaacgagccgcacgagagccggacaaactcagacattgtggaggcattgaacaagaaagaaaacaaaggctctgaaagccccgatcctgactcctcttatgcactcaccccacgcactgaagaaaaatacaaaaaaattaatgaagaatttgataatatgatcaagagtcataaaattcctgctgttccacctcccagctttgagatgccagttaccatcccagtgtccagccataacagtttggtgtacagcaatcctgtcagcacactgggaaaccccaatcttctgccactggcccacccgtctctgcagaggaatagtatgtctcctggtgtaacacatagacctccaagtgcaggtaacacaggcggtctgatgggcggagatctgacatccggtgcaggcaccagcgcagggaatggatacggcaacccccggaactcaccaggcctgctggtctcacctggtaacctgaacaagaatatacaagccaaatctcctccccctatgaatctaggaatgaataatcgtaagccagatctccgcgttcttatcccacctggcagcaagaacacgatgccatcagtgaatcaaaggataaataactcccagtcggctcagtcattggctaccccggtggtttccgtagcaactcctactttaccaggacaaggaatgggaggatatccatcagccatttcaacaacatatggtactgagtactctctgagtagcgcagatctgtcatctctgtctggcttcaacactgccagtgcgctccacctcggctctgtaactggctggcagcagcagcacctacataacatgccgccatctgccctcagtcagttgggagaccgtaccaccaccccttcgagatacccacaacacaccacgcgccacgaggcggggaggtctcctgttgacagcttgagcagctgtagcagttcctacgatgggagcgaccgagaggatcaccggaacgaattccactcccccattggactcaccagaccttcgccggacgaaagggaaagtccttcagtcaagcgcatgcgactctctgaaggatgggcaacatga

SEQ ID NO: 1381 - DNA, 96596 bp, Homo sapiens
gccacagtacccagttctcccttgccataaccccaaacttataagaagcactataattatatttttctacttaaaaaaaatcgtagtagccattatcagtttaaccatacggaagctcaggctgagatttcttttttaaatgcatagttttgattttcagcagctgcactgggtctttaatcatatattatctttatgaagcctttttctaacatatgttaattggctgttttctgtgacaaattatgagctcttactttgatgaggttcaattgcaatcatgttggagtcgagtacgtagagtttccacccctgctggctcctcaaaccactacaaacatccgcacgtcactacagtgctgagtaatggcaggatttgggctggctgatttctctacagatttttttttccacaggatattttcagcttctttgtactaaatctgttgcagggtttgccctttttagcagaagcatgctctaaaattaacatcaaatcttattggagattactataatacatgagaaatatttcataattcaacatccagtgtctgtactgctttgctaaaattttagtacatttattacacatttttaaaagtcagtcagttgtaaggctggtaagtattttctatatcatcagcattttgtaacaaatattttgaattttcctcttgagagggatacagttattaagtgaatagatgatcaggtatatatttaattatcataaagaaaatgcacataatgtttttcctggcattaccaaatttatcactatgttaaaaattccattgtattttcatttttctttgcagttaacatctgttggttgagtcataagaacaattacatgtcccatcaaggctaatgtcctataagatgcatagcatgtatttcaattctctaacagtttttaatgtatgattaggatgaacagatatgttctaatccatctgctctgagaactgtgacagcctgcatcaagtaccagcagatgatcagtgatagccataattagaatatatataaaaatacagtgtatttgtttatattcacaagaaagtagggtaattgattaaagccttcagaacctgtgtcagacaccagtcatagtgggattaatttaactgtttctgctttgacatcaaaatattctaggtaaactgctgcagttgttcaaaatctaaatctatggatcaaatcttcatacaggtattagactttagaatcagatgagccagatgtgaataggagctactcctcctcatgaggctgtttttaatcagtcatttccctggagtagcacacaatcaatgagctctaaatcctgaggctacctgcgcttgtaggaaggcctgggaacatcattacagaacttacaattgggcatatgtgaaaaaattagagcagaaattaagggtaagaaaggttaacttcagaagtcttactttggtactgcttttttagagggaggtaaagagataatttcaaatgttaaaaaaaaaatagaatattaagcccaacttctaaatgcagagaatttctattaaaagatcattataagcaagccaaataaaagttattattgatttatgttagccagaactgtttaaacacgtgtattatttcgagaatgtacatgtgggtccatttcaggatgagtaaataaatgtaaagattctttttcgctagtacctctgcagctgtatagaatggcttcagaagtcctatgtgatactttggtgtgcagtcaattgacacactgtgtctggagctaatgtacataaggaaatttagttccacttgataagacacatgcttaactggctttaagaaaataaaccaagaacaatgtgtgaatgaaacagagaacttggcacttgactgtatggaagcccatgagccatgtggtttaattggggccagttgggatcatttaatgattgctgtcagaagatcagatttaattctccttataagaagaccacagtgggatagagttaaacaaattgtcatcagaggtttcagatgaacaaagccttaattaggttgattaggatgctgtaaaagagatgaagagaaatagaaaaattgatgaatcactgagttccatgttgagccacatataatagcaatatcatatatattttgagagatagtattatagcattttgaacatcacatatttgagcatgtaaagtttctgtgtaaaccttctaaatgtgaaggtttagagataaaaataaatgacattccacttaaataacagatgatttatctagcattttctctttaatgtacaacaaaaacattggcagggggacaatggtatttcttcccatttcaaggtcatctttaaatgttaagtaaattggaaaataaataatgaaagaagcaaattattttcaaggacataattttcaatcatttaacataatatttgaatgcagagtaaaataaagcttttactgagaacgtccttttaggcattcacaccacgatcttaataatattgtgattatttactggtgataatactcaagacaactcaggtgtcttaaaatgtactcttattgttttatttacacatttcgacagactaaaatgtgtttttccatgtgctgtgcacacatgtgcacacatgcacaaatgtatcagtaagactgaaatatgtgttcaacacttataggcatatgagaaaaatatttttagagtatttccattttaatcgtgaaatatgatatattaaagatgaagaatataacgaacataatttttttctaacagggtcatgagatgcctgggaatttagatgtttttatcataatagcatgaaaatctataatagcaacatctccaacttctagcctagcttgctttacagactattttgtttgactgaggttgatgttgtatagtgcttaacttgctttgttcaataacagcaacaaaaatccagctgcatgtgcttactgagaggttagagctggggaacagaacacaatctgatgttaaattgtagctcttgctttgtcataagacagtgcaggctttacctttgtggtgagccctaccacatcactcagaggcctttgaaagaaaacatggtggctgcactgttgtgaaaaattagaaaaacaaagacatgatagaaccctgaattaattacctaatatgatgtggaaagactaaaagctgtggtagggttggatagcacaaggttcttcacatatttagaccatttggagtttattttggcatgggaatagagaatgctattttagctgcagtgtgaaaaaagtgtccaagacaaaatagaccatggataactatgacagggagactgtgcttccctcacagttattaaattgtttataatgcaatacaattgtataaaggtatgtgtctcctaaattctggaactgtgtaaataaaatgatgtatgtcagggataatggcaggttaggcccacttattaaattaattgcaggggttaagaaaacgagttcctttttagccttattatatttctgacatacatttcatctctttttgtccttggggaaagatattaaagtaggactagaagcattaatgtagagttttcagcagccgtggtcatggggaaaattgatgtatttccctagttatttccacttttgcagcctgaagctcttccgtagctgatatgtaagagaaacttcttaatttttttaacactgtaaatttattcttcatttggtgattattgttacaggataaatgaggcattatctgtcagaattgctaatcattagctttggaaagtgagatcttcctggtaaatgtaaggactacactattcacttgatagcattactatatgataggactttcactttatgccttcaaacggaagcaatcatacgagcagcaggccatgttcccagtactactgtgtacccaggattcacatatagtaccacatgttatgatcataaccatcctacaaatgaagatttttttcccagttatgggtagggcaaggaaacaacagttccaagggattaaataatcagtctggagtcacacagcgtccaagtaccaagctagaattctaaccctgttttttctgaccccaaaatccatttaacttccaattctcagtatcaattattctaattccacataggagatgctatgtaaatatggcgaagtattaagtgaggttatcaatctgcttctgtgtaagcaaaaatagtaaaatatttttagtagtagtcagtaaaagtagaagctgaagaaaagaaaatacgtcagttgagagatacacatcttaactgattgtcagtcaacgaatagtcattagctctttctatatgtttgacactagggtatatattgtggataaaacggtgaaacaaacaaataaaacagatgttgaggaagacaagcaaacatacagtttcaattgctgcgagtgctgcaaaggagaaggactcagtgcttagatcttatgagagggaaattcgatgtcatcaggagggcgtggagtacttcctgaggaggtgaaactgaagctgagacagaagggaggagaagtcaaggaggtacaaaaggaaaggaggaacatccaggcagaaagaattgcctagtacacaaaggcctagtggcaggaaggagcatggcagatgtgaggaaatggaaaagatggtcaacattatttgtatatgtggtactatgttactgagacttgaagatggtttgaaattcatattgatactaaattggaataaattaggaaaataaattggcatatggcatgatggtatttatctagtggaaaagaatagctgttcttttattacccttagaagagtgagtcttgggtatgtgatttggaaataaactcagaatgcactcatagctaaggtaatggtatatttataaaatacatggtaagcttagagagaaatggagcaactttcaaggccaaagaaatcctcctcaactcaagacatcacgcagtcgagcatcaataggagtagtaatttggttataccttttgaagttcagaatagctcctaatggaaaaaaagtaaaagttctgcctgttccttttaaccaaaatataattgcatgcttcatacattttatcaaacaaatcacaaaatagaaacctaaatgtaactagatgtaacatattgagcaaagttttccacttaaaaagataatgaatcatttaattatttgatttagcaatactaggtttgcagcaactgggcttatgatcatttttgccccttacgatgtatccagcttgtatttatttaacagtattatttagtgttgtgtgatagagtgtgctcagttttcagctttgagtttttacaaaacattatttgaggatactagtgttagtgaaaatgtaagtcaatcaaaaagatctgctaatatgaatcaaagaaaaccggaatttttttttgaaaattgacatcacatatttcaatgttttaccattattcataggctgtttttatttaagtgactgcattgtacttattgcagcaaaatacatgctttgcaaagataagtttagcagaagagaattaatttcttcccacatcttttaatgtggcatggcagtttcactctaagatcaaaacacataactgaaggttatgtttaacttctaaatcaaagtgttgtgggaagatgattgaaatctgatgatgactcagatacgcttgatatgtggttttcttcctacagaaaccttatgtagaatgccatttccatgttagaaagaacctaatagtgaggagattaaatagtttcactatagatgcagagtttgtgttattcactttggttcctagtttgaatttttttaaagaacctcgagaaactcaataaccataagaatcttttccccctcagtatatctttttttttttttttaatgtgggagcaaacaaatgattagcatattttaccagcatgcattgattttttttttgccggttttcataattcttttttttaaccaaaagttttaatgtatctattttggttctttgcttgcatatttttcatttgcctcaaagggtaaattccaattatatgactgcattaactgtgtacgatgacttttgtaaggcctggtaaacaataactgagatatatctgctatttcaatgaagtcaatgtgtttgttttcttattttcatttcttaaagcaatcataataaaacactaacctagagctgacatgaatttttctcaggtgttttaaagatggaaattaaaaatcacgctcccggtctgaattgtcctcattgtcccttatctgaacctctccaaggcctctgtgtgtggggtgtgcagcacagcacactcagacggttctgctcagagaaggaagtggagagttttggttcccattttacacttctggaacagtttagggaaggaagcacctttacaccttttattgttcgtggttgctgacatcatatccttccctgaccagtctgtgtgcgtgtttcctgccattctgtcaaaattcttctgtgctactgggagagatttgtaggagggaaggagggaggaagagggcaagaaagagtgagggagggaggagggaaatggaggggggaggtatgtgtcactcaagggaacttgtttgtaaatgagatagcccagtgggagaatgatctttagcatctgtccagaagaaattcttctcgacttgggtctcaaaccactttgccttcatctgcctgcttatgccaaactcaaaatgagcagaagcctgccataatgaagttcccctttttagtaagcagcctcattttagttttcttttatctgggttggcattttttctttagaaaaaaaaaatgcagaagactgtaattctatagagtgtaactatagtagagcagttcttcatctttttttttttaaattagtgattatttatatgtagctctgtcattttctaagaatgcttctttcctgtggaaaaaaagtagtggcaaggctgttggaattattttaagcttatggttgattgtacgtaatgaaagttctcagcataacttgaaattttactacatgtaggctagctgttatattcctttttcatatacacacaaaacagttttacagattactaaagttaaataatctctttcttcgcctctctaggcctcctacaaattgatacttgaaactgaccttttaatatagtttttgcataaaaattaggttagagaaaatgttgtgctaagaaaacaatgcgtgagctattgttgaccttcctaattctttaaatttttagtgacagccttgaaatgtggtgacccataatcaaatgttctaaaccacgtttcatgatagactttacttcatgaccagttacttagtgtcatcatcaccacatattactctgcacgtgtacttcatactaaattttggattttagaaatgttctgaaggcaatacctcaagaaatatttatacagaaaacaaaagtttagttctattgaaatttaaacttgcttctctctacattgctttgcatatttcaaaaaagaaaatatattcaatggcatttttatcaaccacttatatatacatagatacatacacacattctctttggcaaaatttttttccagcatgttttaagaaatttttttttaagtccttgctctgctctttttaaaaatggtctcattcaaagttgtgaaatatggggtgatgatatggaggaactctcctaagtttggttcatcaggaactctctctgtctttctgagacttttctccaaggatgttttgctgcttgtttggttatttgtattttgaaatcaggatctgtagatgttcttgtctcttctgccttatcaccacactctaatctgctcaccctgaccttccaccttgaagtgaataagcgcttaggcaggcatagtcctgtaagccgatagtgccaccggcctcagctaaatgaaaggaaaggaaattgtcctatatgcatttgctgtggattcatggattggctttctgtgatagagaaagcttgtttgtatctttggggtcttaaacgtgcatgggaaataccattctaacacactgcttgcttctaaggtaagactataggaaacacaggaaagttgccccattgagtgacatttaagacgttttctaaaaatagatggacagtgtctagcaacatcaaatatatgatgcaattatgctttgtgggtttttcatattttaatgtgatttcaatatgttataactatttttatatgtatttgtcaaatgtgtgttatttctataactctttagaattttgaaccacctccaacatttaaaattacagctggagcaatagtttttgatgagcactgtgtggtcataatgttactcaacatacatattatgagaggcagaactgagctgcagtttagtagagaggcgtgaggcaaaagtgaatggatagtcttagtatttaagcagcacttaatccaccagaagtaattatatcataatagcttctgcaattaaataatcaccaaaaactaaaaaaaaaaaaaatacccaaggtgataaagaatttggaaattaaattaaagaaatcagaagacagctaatggtcagaccgaatgtgtaacagccttcctgttccaagaactttgaattggagccaaacaatctattaaatagccaggacattggcttagcattacataatacatgtgggaatttatcaggtccgttgtcagacaccagctaaaataaacagggaaattctgagcagtgtgtaaagttgttgcattcattgacctaaaacgaagtagaataattggagctgttgcttgaaaaacccattgtggaatgctttcttgttaactttcacatttcagagcaattaacttccgttgtgttcaaatattttcagatgtaatttaaaaccaagtaaagtatgtacttttaatattctgggtttcttgggcttatctcatgttattgatgatcatttctctaattttaattcctgacccagagatctccagtatgtaatgtgaagcttctgcaattttgtatcttactccacaaagacatgatatgtctgtttctaaatatttaaatttaaaggaaggatggcttgttataaaaaatatggttataaattgaagaataatcttaattttgcaccatttattttgtgtcaatgcttatcttttttgattcttgttatctgagatgtagtttaagggctttcaaaaagaaaagatctcactgctgatagatgcttgtaatctaagattaaatattccatattatttttaaggtgttctcacagcaataatttttttaaagtaagattaaaggatttagatttaaattagttgacatttacatatatcaaatagcactttcataatcgtccatcctatttgcataacgagggacgttatcacctctgctgtcaaaacaggagattgttttcccttcagaaatgaattagctgccctacttagcatacacaggtacataaaggttcattaactctctgatttaggtaatttttcataacgggtgaaattgtcacctaatttcattaaaaagattaggaaactttttacaaaaaaaaatacatttcaagtgttagtctttaaaaaagcatagtttgcatcatttaaatgacttgttaaattacttatgagatcattttaattgttaaaaaataaaactacttgatctgctcctgtctgtgatataccatatatttttaacaaaaaagttatttttattcattttattgctttagctccatatagtttatttccttgataaaattagaatatgatagttcttatgaaactgacttgctgttagagtggtatttaatttttcttttttgttcagcaggaacgaatgcaggaatttgggaactgagctgtgcaagtgctgaagaaggagatttgtttggaggaaacaggaaagagaaagaaaaggaaggaaaaaatacataatttcagggacgagagagagaagaaaaacggggactatggggagaaaaaagattcagattacgaggattatggatgaacgtaacagacaggtgagtggagtaaactttttttgtatcattatttattaattatattttctccacatatgttaagggtacagaaaatatcttgaatctgtaaatatctattaagagaagtttgggttaattaaatgtgaccagttaaagtgctgatagtctcttatatataaaggagaaaaaaatcactttatctgtcagaaacatagtttacacatttgtcattattcactttttacttcaacacaaatttgaaatgggaagtgtagttgtgtgacatgaatagcttgataattaagagttaatcagcataacattgctacattgcacgcatcatcaaacaaagatattcttatattcatgggaactagaccttttgtggtcattcacttaaaggtttataatataggataaatatcctgtatgaaaatggctttcattttattcatagtaaatgagattttgaaacacatccaaacattttaacattgtgctgacaacaacaacaaagaaaacacccacacaagatattaataacttaaaacatataggcaaggactatcggttaattcataccattttaaatctgaatttgataaacatagaggcagatggtgttataatttttttctagaatgccaatgataatgtctgtgtgatacaattaatctgttgtgaagactttacacattcaaatgctcagtttggcattaaagacttgtatatcatgaatgcctgcaatttgactctatttttcttcacactaggggagagtggatttagttaggctatgtaaggacagctgggtagtttgtataacgttaaatatcaaataatggtcctgggagaaattatagtactgctgggtcccaaccatctcatatggatcatggaacctgcagagaagacgtttctggactgtggaagagaagagtgttttgcctacttttcggttacactgaagaaggctacacagtagccctggggacaaccaccagactgtaatttccccacaaatgtagacactcatgtcctctattgtcctgttttgtcttcttggacatacaaataggactagaactgattgattcatttttttaaatgtaatgttgtttcatgtgtaaactataatgaataggaattaattatttcttgcatcaaagtcagtacgccattaaaaagtagagaaacttttaggttttcaagtttatactcctctaaattattatatattttcaggtacacacaacttgaactatttttggctgcatgtttagctagagggtgaataatactaagatttatggtggattcctttagtgttttcatgcacatcgtttcttgctgtggatcaagccaaagagcaatcattgtgtcaatagaaaaccgctattttttaattggcctatagcttgaaattgaaattaagactgaaatattgaatgtcatgtaacactgtttggaccttgttatttggaccagaacctattttgagtatagtcaaaaacatatgaattagcatttgcactttattaccaataccagataatttttaggtttatgatattcattatatcttcttttgcttgcaaagttagaagaaaatttttgcaggttgaattcatgagcttttattatgctttattagaaaaaacagggatacaagattttttaatttctatttttaattatgggtacataatagttgtatataatatggaatacatgtgatgttttgatacaggtatacaatgtgcagtgatcaaaatcagggtaattgaggtatacctacctcaagcatttatcatttctttgtattaggaacattccaattctactcttttaattactttcaaatatatgataaattcttgttaactgtagtcaccctatgtactaccaaattctagatcttattcattttacctatttttgtatccattaaacatccccactttatcccctccccactccatgcccagctacccttcccagcctatagtaaccatcagtctactctctatctcagtgagttcaatttttaaaaaaaaaaagtttagctcccacacgagtgagaacatgcaaaatgtgtccttctgtgcctggcttatttcacttaacataatgtcctccagttagtttcactcatgttgtaacaaatgacaggatttctagggatacaataattttaaagccgggagtggtagttcatgcttgtaatcccaacactttgagatgcagatcactggagcccaggagttcaagaccagcctgggcaacataaggagatgcaatctcttattttaaaaagttaaaaaaaaattaactgggtgtggtagtggcatgcacctgtgttcccaaccacttggggaccactaggacccgagatgtcaaaactgcagtgagccgtgatcatgttactactacacttcaacctgggcaacagagtgagaccctgtctcaaaaaaacaaaaaacaaacaaacaaagaatcttaatgtcgcacttttgagctaataattgaatatcttttctttttttatatatagttgcagctacagtggctgttaccctcatccaggttagaagtcataataactttagaagaagaaaacttatttaaattcagcttagtttgacttatcatttttttaaattctgaagacagatttcttgattttattctttagaatttagggtatatttattcttttctccagtctttagatacagtaggcctgtaagttcaatacttttaaacagaattagtaaacttgaaatccaccatgttttaatatatatttcagtgattattttagaggctgttgacaatttcaaacatcttacatataaatgcttgtcttgtgcacctctcacctactatgagagcagttgtaagagtcatttgggaaagagcctaaattatgtaggtcacttctaataaacaaaaccagcaaatccgaaacagcatatcatactgtgtagaggcacccgtaacctgggctttctttcaactgtgtattcacatgttgcaaagaaaaatgctttgccctctttgaagctgccccactgtagactgtccagtagaacctcatgcaatggctcactgtcatcttttcttaaaagttgtcaaagactgctctgccattgcacttgtttatttagctatacacagaataagttatgttttttccagaaaaagaaatactgacttcaagtgtgaaatgaaatattacagcactgatgttataagttgtatatcattaagaaataaaactgttgtgaaatagaatggctgtttaaattgaattttacctttactttagctgtctttcataatggaagtagggaacagctcaaattcagaaacatcaatacatgaaatagtttaggtgagaataaaaattgacagctcaaattcagaaacatcaatacgtaaaatagtttaggtgagaataaaaattgacagcttttttatttaaaaaaattttttggcatttccaagtttacaaaaactatttctttcttagtttcaagcttagacaacatggatttcttaagcaagtatgtaaaaataacattatgaattgttaatttatcttacagaaattttcagacaacctaataaaagtagttaccaattatgtgccaagaactatatatatatatataattacaaataatttttattaataagtcccattttatggctgaataattcatttatctgtgaaatcaacaaatattactagactgcagtgtacctaacaccaagtattcagtggtgaacaagaatctcatccagcttatcctctgctttaggggttcagcgagctttcctgtaaaggaccacatagcaaatatttttagccttgtgagccatatagtttttgtctcaactactcagctctgccctagtagtctgaaagccgtatgcagtatgtaaatgaacctgtgtggctgtgctccaataaagctttactgacaaaaacagggcgtttggatttcacttgtaggctacagtttatggacccctgattgagttaaacagacatgaaatataaaaatatataacaaaaatttcacttatatgtgctatgaaagaataataggaggtactttatttacatcagggttggagaaaggcctgaggaagtgctaaaagatgagctaaaagatgattcagagttaggcaggtgacagcattccagaagcagtatttgcaaagttccttaagagaggaaagagcttgactgaggagctgaaggaagatcagtgggacttaagcctggtgtatgactgtagagaaatgagagaaaagattggatgttagacaggacccagatatcgcaaagctttgaaggtcctgttaagttctaaataactggctcaagattgtacagttaaaactgggaagtgaccaagatctgagcccggatctctcatattcaacacgaaacaaattatgctttttaaaattatgtcatgatgcatctagtgtaatataataactaagagcatggttttgtgtcattacttttcccaattatactgcatccagtataatcaaatggctaagaggcatagtttttagagacacacaaacttcgttcttgtcccagttctgccacttactagctatgtgaccctctagcaagttacttagaccctctgagcttcagcagtaccctcatcactagagtgaggatgaaaaaaagttagtacctttctcattaggtctttaagacaattaaatgaagcaataaatgtaaagcacccaccaaataataagtgctcaataaatttacctattagctattcctattaagactcaggctctttgaaccattagctattatagttaatgtgatttctatcaaaacaactcttgtactgtgtagcacaataaagaatgttacctaaaccttcatttcatgagggttttattttaaaagggtattgaggagatggatggaaaagtggaacaggtagagcaggagcacaaaggagccttcagaagccaacaaggggctagagaatgataccagagcaggagtgagctgatgcagagaggatagtttgtggacaggaaggaaagatcacacaggacgtttgcagaggatttatgacaaggatggggagaagtcgtttcctaaatgttatgcttgtgggacctgttttcaaatatatgttactgaccaaattatttttaactactcctcaccatttttatcactaccagcttctagcttatgctaacactacagtttcagtctctccgtcggcattttttttttacccttgaaatacctccatcagttaggcagtcttaccctctttcacatggtaccaatttttaatcatgctcctgaaacagatttttttctgtgacacttttattgtattttacagtaacatatatatgcaaaggtttaaaaagttcaacaacaaactggtttttatgaacagatggttttgggggtgcttgtttcatttcttttgtgtttaaaattttttaaattaacaaataattgtacgtattcatagggtgcacagtgatgttttaatatgtataatgtatagtgatcaaatcagggtagttagcatatccatcatctcaaacatttatcatttctttgtcttggaaacctccaatatcctccttctagctatttcaaactgtaagatatattaactgtagtcatcctttggtgggatagaacacttgaatgcatttgtcttatttagctgtaattttgggtcctttaacagtttttaaatgaatattgtccttatatgactctttctacaaacaatatatttagaaatctgttatattaggaagaaagatatataaaaattaggcatgcttagcctaaacctatttacttgtatgtttgtatttgaaaatttcagctttcctactttgaaaggataggagaggtaagcccaaatttatttgtgcaacttgttataaaaagacatttaaatatttgtcagataacacagttagggcttaaaatagtaagttaagaaagaaatatatttaaatgccttaagttttcttttctttcatcagatctggcacactaatagtttttgccagcaaacaaaacttcatgtaattatcagtgcaataactggagcacaaactaaagacaatttgcaacattctgttaatagaacaggagaatccccttatgactaaaagaattcagagttcatagctgttacattttctaactttccctcttcttatgtccccatctcagtctcttcatatgaattataaattatataagatgaactaggaaaaaagctggaaaaatgtgttcagtgtagatgcagcttctgacagtttctacatactgatgtgttttcaaactaaatctggtctattcgacactaaactgaaaaataaaaagagatgtatagattccctcaagtgactctttaaaaagaaaaaattttactccttactttttcctggttttcatcaagttaattacagttctaaatttgggagttacatcttaataacctaatagaaaatttgttgaaagagagatacattcactctttaaatgtgagtaactggataattgagaaatacaaattaattgcttcaaaaaaataatttttcggtgaattccaaaccataagttggagaatagatggaagatgcagtctccactgctaaatgcactttttttggccacctccacaaacagaatttccagacttgtgagtttttctttaaatactgtagaagaattatacttgttaatcaagaagtatctggaatctctttcagacctagtgaaaaaaagctcaatcagtgaaaaattattgattttcctatcttttaatccaaaataagcctgcaaatacctcataataatgatgatgatgattgttttttcttagtatcatttcttaacagatgcctgcctccccaacacttgtattaaaaattatactaaacttatttcatataaataaaataagggtgtgtcatagtaatattttaggacatcatacccatcagaattgaattatagggtctattgccacatattggggatgccttcttaaaagctcctcatgcatataagttaaatcattcttttattaatcttaaaattaccaagggaaaagtttttattcaaagatttggaattgctggtgattgaagagttgaaaaagaaaaccagaagggaaaatgacctaaataatacttgtaagagtttccaaattaaaaaaaaaaaaaaaaaaaaaaaaagcagtaggcagaatgctcagatgtatgtttaacagctgtggcctcaggccattcatttccattttatcccttagcaatttgaaaagaattcacaaataatctccccaccatgtagtaggatcacagcaacagtgtgccacacatattactatttatcctgttcggtgcatgatattttatatttatgtcagctagatctactcctttactgccagaaagatattgctccaactcccgtcaatctcattcattcactttcctttggtaggaaatctgagagaggccaacattttcataaggaaaagaataattgtcacttctagaattctgtcactcttctttgaacttgagggcctcaagggtttttattgtttccagttctaatttgtatatctcatataatttctacttaaaactgtaatttaaaaagaatctgatgcttttatttattgtatctcattttgtgaagaaagttgatactgaatggcccctttcacctctgggaatgcatgcacacaccactctgtctgctacaagtcacctttagctttgcaaatgcacaaactgtgtgacattgtattactgagaaaccaacactaaaaatattaacattataaatagactacatacaccgagaagtttcttccaaactgtagattaaaagacatgatgctaattgtttcaaaagccatgtcctctgcagtctgcacttctttaacatttagttcaaaatgaaactacttcaaaaattattagggtatttttaaagtttgcatcccaatgtattcttgttgaaggtagtttggaaacttattttttctgaggataatggctttggcaaaaattttaaaaaattaagtaaatgacatcattaaggaaaaaaattaaaaattgataatatgtaatgtgtatttgtgtttcttttgaaatatgttggaccattaataagaattagagaaccagtctaaatgtttggaaatttgacttttaattttaaattggaacagtttaactaaagaaatcactaacatttaaataacatttcaacaaatgtaactgtttggaaactataacggagacagccttctgtcttgcaaggattgatttggaaggccctgggggagaaaatattggagttaggaggtaaaacctaggctattgtggaaaggaagaagttacactcttcctgttatgacaggaaaatgtagacaaatgtgcttcctgagcatttgctcagcagggaatgaagtatcctttgacctttcccttaggtacatttggctttgttgaactagtaaacatgtttttgcccccaaaatattaatctggtttatttgattcttctcagattcaaattatatctcttatgtagatgagatacagagaaacaaaggtatttattttatgactgcatctacagattggatttagaatgaaaattagccctttaacaaaccaggcagacttgagcagcccatataaaaaatgtgaagcctgctgtgttagtcttctcttttcaaaaggcaaaacattcctaggccttaaaatgggccacagtaaaatctcttatatcctgatcaagttaacaattttcggtcatccttcttccttttcctcatgcagacaaatgcatcagaattcagctgtcacaaattttaaaactcaaacttttatgagtttgttaataaacactcgtttcattaatgtgcattcgattatttaatttagatctaactgtgatttattattttccctccaatgcataagatttggagttttattttgggatttgggatgttgacttagggtgaggggttggtagagttctaaattccacactctaagccccttattttaatccttttatcatgttcagaattttaggaactactgcttgaaaatcctttggaaatactactgtatttcagcgaaacggaggctcaatttgcttgaggctaacgaggacaatagtcccctttgcggcagaacacactgctgtctcatcctcgcaagttatgctggagggttacaagcacgtggtagcagtctgcttaaaagagtccctcgctgctctttaaagagcctttcatttacgatggcaggccccgtcattgtataaaggaacgcttgtctagaacacaagtctgcagaggcactgcttcctcccaccgagagtaatcatcgggcctaaagctcgcgagcctttctaatgacagactgaattaaacaaaataaaactgaagaagaatactttagaacatttgtgccattacttactgtcaggaacaagggaggtggagaaagagcatttaggagggcatttccctttttcccaattaaagattgtcgttgcagactcttgactccagccctaaccctttaaacacataggaagacctgtggctcctggattacagagtgtattgtatctgtgaactgtccatctgtcactcattagtcattctgtttcctcaactgggaggaaactgagagattatctaggtggggggatgaggtggagtagccgacctgaaatattttcacataatgagggttatatttatcatgactcttatttggagggaaaaaaaatgatcaaacctcaaacctttgaaaatagaattagctgggtatacgaatcccaaacacatcctaaaacaaagaaactactatttatgagttaaagaatggtgaaaataaaaaaataaaaaattatccattcattgagcactgtaaggttcaattaagattaggctaaaaatattgtgtttggtggaaagaagtatttgggacccatagatcagatttttgttgcttcccttagtgatatgtctgaggcaatttgcagttgggcctcaattattattatagatgtgagtagctgctgtttctaaaggtccttttctttcagaactctttcctgcaaggtgcaagaacagttaccacagttaaaatggcaggaaagttcttctgaggtgactttatgaatggggctgggcctgggagggtgagggagggggcaggcgtgtggagtggagaaagattatgaaatgccctttccatttcacagtagtcaaactaatttccctaccctgtaggaaatgatacaggactccttctctgtttttagaacttgttatttacattgcctgtgtaaatcagagggccacctttttttattctagctgtaagcagacctgtatttactaccaaccaaaattcttcccattttctgaaattaaaataaacatccataaatatagaactagtttgtgcccactagtgcatgcatgtggttctcagtggctgtagtgggaatggccggagcgtctgagggcagagttggctgcagagtctatacaaaagtagctttgatttactgtcagaacctagaaaccaactggctctcaatttagtgttcttagtattattttttgactttaacctagaaagcagtccttacgttaattaaaatgttatgcattactgtgcttgcacttatcagaatttctgatggttcttaatgtaacattacaaatgacagtgcctgcatactgctcaataaacagttgactgggtccatattgagctgaacttcagcccctaaaatccatagttatctaaaagagggaaggaacactaactaacagaaagaaagatgcactttgtgtgaagagggttggttttctagtccatccaggaacaagtctggggaccttggataaggctattcatgtctttgtttacggtattcatctgaaaaatagggatgataaactgtgctaaagaataagttcaaagagatactgtcgaatgtagggagataattaattataaaatcgttgaacttcttagaaaaaattatcaaataagcaacactgttatctaaaaaataatataagaaatctgatatgcttcacttgcaccaaccaacccacacacaaaatttgaccaagtccagttttttctcctgattaattttaccaaatgtaagtttctactgtaagttaaaatgacaaaaaaataaaataaaacaagtatgtgaaatttccctctctcagtagcaaacttcttgttaacatagtctgagcatccatagaaatttattttcagctattcattttggattacaaaaaacactataattcctctgtccatatatctattcattctatcaacatttatttatttagccaagtattattattggttgtcaggttacaagaatgagcaaaagatggcccaggtactcgagaaaaactaggatatagctgagagagacactctaatctagacctaagtaaataatggtaacacaagctgacaggtcctaggagaccagtcttttacagtatgtttcaaggagcgactaagcctggtgcatcagagaagatactacttgctttgtaaagtgtttcacagttaacaagttatttacactggtattatatcccttacttgacctctcacaaaactctatatgatgcctgttattatctccactttccaggtgaggaaactggggttccggtaagttaagcaattttacgcaagggcacacagctcataaaaggcagagctgggacttggttttcaatttttatgtttttctttctacattgtactgccccagtcatgatgcatgtatcctgtttctttaaaatgtctttaataatgtgaatttgctgttttatcaatctggataattatttttctgtgcattttcagtacatcatttaatgttgtctactcaaattctttacagtcttttgtgtctcgtctagctacaaaaaaagttattttatttcttgaaatatggaaattagaggcgataatgtatgggtgggattgagtaactaaaacataggagattctgtagggtgcatgcttggtgaaccatattgccatttgctcttaactcaaagccctatgatacttaggcatagattaagaacatctaaaaattagaataaatattttaaaggtctctagtccaacttcctgcttaattcaggagccccttctacaccttccttgatatgcagctctatgtgaacatattcagaaatgagctgcttcctgcttggtgggaagttctcatcactagattttcccttgttttgaatctctttctaattttcaacaatgcttactaattttgcctcttcgcatggacatatgcttcagaccttagaaaatgtttagcatttcacttttaattctatttttttctgagttatacattccagattctttcaatggttcctcatgccagattgttctcagaccctacatcagtctgtttaccatcctgtagatgctctaattttgtcagtgctttcttaaaatgtcaccctcagaactgaatatgctaccaaagatggttctgacaaacaaaaagatcagtaggataattaattaccactatagaacgctaaaactttagatcctttcccaaaattccttaattatccccaacctgaacttttgtaattgttttttaaaaatatgaatgtggactttaaaattaccttcatttgattcatcttgattgtgacccagctttctaaaggctgtagaaggcgctatggatatagactcttatcacctactgggtttgctcaagcacccagatttacgttgcatgcagatctgataagcctgccttcctatatacccatctaaaccaatgacaaaaatgtctcctgggatgggaaaagtactgaattctatggcactttactagagactttttgataaacttaacattgatcaattaagtcggcctcattaattatagttcatcagccatatttaaatcagctaaattactaccatccagtctcaaattgtgcatgaggatttcatcacttttccaaatgcttattctttgaaaatctgaactcatcagaaagttcagtacatttttgcgaacaaactcagtcatcctgaacccatggatcctccccattctttctgtatcctgtgattgtaaaattaaatttttatcttcagacttttttgtctttcatcttttttatccaggcaagggataaaaaagaaaaaaacttttctctgaattttttgaagtatatttttcttgaagtctacagcatatttacatatatatttttctccagacatcatttaccttctttattataaattccaagatagtgtaattactttatcttaagatttgtgtcactaataagctaaacattgtagtaaaataaaggtatatgtgtccaaaatctctatttttgagagattaaattatttaaaaggcaagtaaaaaagcatctactctaacataaaattataccgaaacattcagacttcaaaatggagtatttccattccataatccattcgttcagcaaaggttcattgagtggccactggtcagagtctgtgagaggcctgagggatggtctttggggaattcaaatctggcagaagggaaaactcatatacaaccaactttgtaatactggagtaagtctcataataaagatttgtaaaaagtgctggaggactacaatgagaaaggaatgagttttatctgaatgtgacaaggaaagcatcaaagaaagaagttggcatttaaactaacccttacagcgtgatgggtgcatccagtggccaggtggaaaaggagagatggaagtaataccacaatcagctttcaccaagtcaagattagaaataaccagtaaggtagatttcatttcgtactcatcttgactgaatttacatctactattatttttctagctcagtccagagaaaaagttagtctgaaaaaaaaactgaattcacccaactctaaataaaaatacgaattcagattattagatatgactgaaaatataactctgttggccaagtcatgcattttgttccaaataaagaaaattccttttaaacgttatggaattaaatgacttttttttgtccagccacaaggaactgatatgaacaagggagatattattttatgtaatggaagccacagtacctagcacaaatgcctgacatagagaatattcaataaatattgcttagcataatgtttgacatgcggaaaatgctccataaaacttggccaaattatttttatattttttgtgaatagactttcttaaatttttagtaactgatttgtatggtgctatatttaatgaatgtttcttttctcaatttcaacttctaatttctgtttttccttcgcacctaataggttctagagccattatcaacataagatgtatggtatctgtccttactctaggatttaaaagtcagggccactataaaacttaacataccatcatcacatttggggctatttaaagattcaaaaatataaaggaaaaacataaaataaaaaacatacagagtagttctgctttctatgctatatcacacattaagtctctttaatttgataacatgttgacttatgtaaatactggaaaagagagactctttgcctaactactgtaaaaacctctttctgcctcacctaaggttccaaacatgttatttaaaaagaaatatggacttgtccccattacaaactattatcaagttaagaaaaatgtaaccatcacaaggcattatttaagtataaaagcgcagaattgaaatctttgttattgagtggcatattttaaatgaagagttatattccagatctctttagaaagcctaatgcttaaaaataattttatctaactatgaacaatgagaaaaagcattataaaatacattttgagaatgctatgaagaatatgaacataatgcagaattaaatttagagcaattaagagtagattttgaagatattttcttacgtgctttaatacagtcatcatttcagtttgcagttttaaattgcagaagaagctatatgcactgacttctttgatgggtattattaaataagtattcattatccagcagcctatttggttacacaaaaattgaggagcactaaaagtaaacacaaatagtgacattaatgatatttctgtactgaaatgtactttgattatgagtgttgtaacgtgcaaaattctgaggtctgagtacaacagaaaccatactgtattgagacattccacatatagcttgtggtcatgaagtctgattaaaagtggttttagatatatgaaagtagtctaggtcagtgccttctgtattgaacgtattctgtagcctatttcactaagtaaaatgccaatatgcaggtacattttcatatcaaaattggatctaaaagaaatattaaaagacatttagtgcagctctgtgtaattaatgattatgtttctttattcattccaaaaagatggttttcagcccatccttaatatcaattatgactcatctgcataaaacagaataaaagtttctaaagtagtatgataatcagatatgaaaataaaacactagctatattttttcagaagtactttagaaagacaatcaataaagatgaaatagaaggtgaaaaacactgacaattacaagaaagaagaattatccaagttgaaatgtaaataacgtaactgagtaaatattgactagttgatatgggctagtaaatatctaaatgccttattttccaaacgatggtcactacagctttatctttctatcagtcataataacatcttcaaatagccataactggtagactcttcaagtcaccaagacaagtatattttgctagttcttcttttttggttaagtcaactaagaaatttgggggaactaatatttattgagcacctactctaagcattatactcaatactatacacacattattggatacaatcctcacaacagccttaagagtaggtataaatctctgttttacaaatgtgaaaaatcaaactcaaagaactttatttaaagtgaggcgaggcacggtggcttatgcctgtaatcctagcactttgaaaggcttaagcgggaggatcgcttgagctcagaagtttgagaacagcctgggtaacatagggaaacctcgtttctagtaaaaataaatacaaacaaagataaagccagaacatgttggtgcacgcctgtagtaccagctactccggaggttgaggcgggaggatggtttgaccctggaaagtggaggctgcagttagctattctagtaccgctacactccagcctaggagacggggagaccctgtctcaaaaaacaaacaaacaaaagagaagttgttaagtgaatttcgcatgactagcaaattcggcattcaaattcagagttctctaaatacaaaccctatgttctttgctttctaccatactaccttcaatgtcatatgataaaatagtgtaattattattaagtaaggaatatatgtattgttaaaacattttgcatatgagttgttaaaaaaatttcatgggaaaatttatcacatatatacatacatcaattgtatctttctgaagatttcacatagtagcttcccctatcaatttttataccatggatttttaccatgtgcccacacatgtctactggtctaagcactggggataaagtagtgagcaaaataaaaacggcatatacccttgtggagcatgcgctgtagtggaagagaggttaaacagatcacacaggaaaatataaacagttttgtattttttattttgcatattttatatacaaaatatattttgcatatttttgtatatatttggtatatttttgtgtatattttgtatatttgaaaatataaaatgtgattgtaacatgaaggaaaaataaaaggtgataagtaaaacaataattaacaaaatgtggaggaatgaggagactgggaggtcaggctttctgtctgctagtccacagtccttgtcaacataaatctatttagttgtgggggagggtggggagtgggagaaggtggcaggccaggattcagagttctctctgaggtttctagtttggatgactgagtttatggtgagatggggattccaaaaggggctgcagattctagactgaagataatgaggttgaactttggaaggtttgagaatccaggatgtttagacaggtgtggaactggaggacatgcattgggtgtctggagacaaagagaaagatgaagggtaggaatatgcaattaggaattacacacaaatctgtgataaaatgagctggcctctctgcaaggtgggttggatttgaaggtatgaaaaaagtttaaatgattcattctgaaaacagtagcttaattaagtaaattagcttttcccagaatatgtgcctcaaaaacctagttctgaagagtgatagtaagtgctcctcaaaataaataaatatgcaaagaaacaaacgatatgtcagcaataggttcgaaaagcaagttaaacaaagtttaaaaggtttcatagcctttcatataccaatgtgcctctttttccaaacatattaggccactgaacttttttcttaaggagtattttataggaacagtactctacagaatgaatacctgttgggaaacaggtattcattctgtagatgggaaacactggaccatataaaggtttataagagactccgtctccaaaaaaaaaaaaaaaaaaaaaaaaaaagaatgttcacgccttttcagtagccagactggagcaacaagctgaagttcaattaaaagagagttgaaattgggaagagtgaaatgtatttttgcatttggtaggattggcaggtaggaagttttcaaagccagggagagggagctgttgtaggcagctcatcaggaaaaagacagtaggaagagtgaggctttgcagtttgagttaaattgaggaaggaatgattccaggcagggagatcatcgaggacaggaagctgctaggctgtccaaaattgaagtgataaggacatcagtgatagagttgcctgggaaatagtgtgaacctgagaaatattttgaggaaaggaattatgggtcttggtaatagattagattaaaagaagaaaatggtggcattaacaatacagtttctgacctgagagaagaagaaagatacacagaagaatgaaaccaaaaccctaagcatatgatggctaacggacttcccagtgccctgttgggtttctagaaaacagaatacaacatcgtctgagatcacagtcatatcccttcaagtgttttcaattaaatgacatgagactagacaattttaagacttgtttgaacacagatctaaaatgctaagttcctaatgtcatgtccactcttcaaatagtcaaaaacaagctccaaactaattattaattgggaaatatgctaaccatgctgaaattaatttttttttaaatcttaacttgctcaaagaaacatgaccagttccctggtcaccttcattaaaataccctacattaaatcttgcatttagagtctcacattcagcagcaagctagaaatcacacattttcaaatgataagcagaaattaatattagatttatttgctttctttctgaatgtgttagtgcccagggctctgacaactacacaccattgttttgtgaaggaaaagaaaaaagaaaagaaaaaaaccacacatgcatgaatattttttaaaaaatcttggctgctttcttttttctaggtgacatttacaaagaggaaatttgggttgatgaagaaggcttatgagctgagcgtgctgtgtgactgtgagattgcgctgatcatcttcaacagcaccaacaagctgttccagtatgccagcaccgacatggacaaagtgcttctcaagtacacggagtacaacgagccgcatgagagccggacaaactcagacatcgtggaggtgagagagcatgcgtggtgagccccaagcctccgcaagcaggggagtttggacctccccctgccacacacacatacacacatcatgttctttttcttaagatgttcatagtcccatagatagacccaggattattatctatcgcaactcttactccaccttttctctccccttcaaaagttagagtgatgtgatgatagagaccatgtaagatctggtctttgctagaaatcaagtaccagtgtcaaactatttgcttcatctttggcaagtggtcattgtccacagctgtgtatcaggacaccatggttgggaactcttgccagggaatagctcatccatattttagacacttctgatcatttattttaggtatataatagtttcccggcatcatcaaagaaaaaacgtatttaaaaatgaactcaccccaaccttacactttcagtttttcgatttatgtctcttctttgtaactcattattctgaatgctttcttgctggaagagtaaaggcaattattctcctagaaatgttttttcctaaaaattatatcattatatatatcaatgaaaactgttaatatacatggaatcagaaatcagatgaaaatgaatttctaaatgttagctcagtgtttaatcaatgtcagatttaaaaaattgttttattgtgcccaaaataaataagcatgatgctgaaagtcaaaaatgttttagatgtgttagcataagtaacataccatacagttttggctggaacattttttttcccattttattttattttattttatttttattatacattaagttttagggtacatgtgcacattgtgcaggttagttacattggctggaacattttaaaccttttcagcatcgatcctatttaaatactttgtagtacccttcatgagcaatgattaagactacaaaacaaaggaagaggtataataaggatggttcccatctgcctattttcttaatctatttgtctactctggcttccctagattgtgcctgctttctcagaatgaaaagaaaattaataagtgtttcaaaagtatgtactcaagagccagtttgccagagtacacgtcattcttgccattgcttagactggttccacattgtaaaaaaatgtagtgctaatcctgatcaaatgaatatgcctcccacatccatctcccttttacctgttacaattgtctaagactaattctcatttctttgtttttatttgaaagtttttcaaaagtattgagctgattattatattttatttttgccttaacgaggccaaggaaataatttcagagaaacaaaagtgaatgataaatagacctagggtgatatgtgcttaaaatactatgcattattttagtttttcattgataatttgaattgtgtgcttgccttgatcttgaaatttaggatcactgataaaatttacctatgcatttcagatagttttttatttgcatataaatatgaaagtacaaaaatatgaaggtgaacactgcttgtgtgtgtgcactaatacttatgtaaaataaattcagaaaacaaaacaactatttactaaaaactccatctcattactaaaaccattataacaaaagtcagggtaacaaaagaatttgagttggaatttatcattacactggaactgctagtccttaatgtcatgtgaaatgctgtagatccataatgagccaattggaaaatatgttgacttctaaaatttgctttcttaaaggagtttaaaacctagaacattcatcttctgagggtttttcttaggaatatattatatgacttgaaggcaacttaaaacttcatatattggccaggtgtggtggctcacacctataatgccaacactttgggaggcctaggtgggcagattgcctgagctcaggagtttgagagcagcctgggtaacatggcaaaactccgtctctgcaaaaaaaatacaaaaattagccaggcatggtggcacacatgtgtggtcccagctacctggggggctgaagggggaagatggcttgagcctgagaggtcaaggcctcagtgagcctagattgtgcctctgcactccagcctgagtgacagagcaagaccctgtctgtttaacaacaacaacaacaaaaaaacccacttcatatattgtatgaaaacttcatattttttgataggtggatatttgaaagtcagacttctttaaatgccacaaaaacagcactgggttaagagtcattgtttttcatttgaatccttgtcttgcacttttgtgcagtgtggtgagttgggtacctctctgggctgacgttttctcatctcaaaaatgaaggcattggatttgaaagtgcttttgcaagattataatttttaaaaaagcaatacttgtaaaacaggagtaaagaaccagttccattttcttgttaacatcaatagattaaatctctgaatctctcaaaaagacacttcgaggcttttgggccaaatctagagattggatggctcaattatttggatgaacataacatgtaagtctaacacattgtgggtccgtcctgttcaactccctgaattatgcattcttcacatatttggcttttccacattttagtaataacagagatcatggaaaaagaagtaagatgggaccgctaagcttgataaaatttacatcatcttcacatggaatatttttcaaagtgctgcatcactgaaattaggatacttgagacacttggtgaagagggaatctggattggaagttgcatttataaaaagttccccaagtaggccaggcacggtgactcacacctgtaatcccagtactttgggaggccaaggcaggcgcatcatgaggtcaggagatcaagatcatcggggctaacatggtgaaaccccgtctctactaaaaatccaaaaaattagccgagcgtggtggagggggcctgtagtcccagttactcgagaggcaggagaatggcctgaacacgggagggagagcttgcagcaagccgagatcgcgccactgcactctggcgcaggcgacagggtgagactccgtctcaaaaaaaaaaaaaaaagttcccaagtaattcttagacacactaaatttgaaaacctctgcagcactagtacataaattgtgctggaggcaaagacctatgatacatcagggatttgaattcgttcttagaatggatctaccataaagtcaaaagttaagattgtttactgctcctgggtaaaattttaaatcctatttattttaatttaatggaatacatttaactgaataagtttaatgaggagcataatatgtttcatgaagggtcattagttttatatttcccatttggaccattacccctcttccttaaccctctaaaaacagtttactcacaagaagaaaaggtatcgggagagatagaaataatataatttccagcctttacacagaaatacaaatttctgggccataccagagtagtgctacagggtcataggaaattgtgcagtgcgtgggtgttgaaaaagattccttcttttagcaaaaaagctctgcgtaattatcatgtctttgcttgataattagcactactccaacaatggcacaaagactcacaaaggcttaacagacagactgagatcagtttttttatgattatattataatgcagcttgaatatctgtttagatacaatatataaatatgccagatttagtaaatgtgttaaatttttaatccattggttaaaaaaacaaaaacagttattgtattaaaagcacttcctttgaaggaagtccattttacttaactctgtgacaagtatactgggatatttacccaaaacgctagcttgtcagactgttgaaattcagttcggatggcattaaggaactgcccccttcactgcttgttcactagctccactcctcgttctcttagctgtctaagacagcaaaccctaccagtttatgttgggctctgttcctggaagaagatgtggttgttgagtacttcaggatgatctgaagatgcagatcccacaggacatgcttacagcccattgcttcatttagcaatgatttagcaagctccactcatgctcagcactgtggaagagactctgaaacagcaggagacaggcattcttgttaaggatgtaaaacatatatgcaaaaaatcagcttgggaacaattggacggcaaaggaacaataacctcattaatgcagtataagctgctgaaatgaaggtgtaggctaaacaattcaacagaactcattcagccaggtcatgtgtttttccagagcattccaagtgatccttggagtgacaggactcccagacaggttacctccatatccagcacgttttgtaaccacaaaatccttatgggagtatcacttagcacccagccaggaaggaatctctcatcccctcagtgaactcagtgattctaatgagctactcattcagtctgggcccacagtccagtgattaagtgtggaaggggaataaaacacaaggccctttgctgctctctaggaaattcagagatggatgtaactcctgcagaagaaacctttgattcacaactgtctcagtagaggattattggtttttctttttagaggaagaacatgtgtgtctctctctctgtgtgtgtgtgtgtgtgtgtgtgtgtgtgtgtgtgtgtgtgagagagagagagagagagagaaggaaagggacatagggagatggagagaagatgagagatgagagattatatttacctgatattttattattttggaaattttatttgctgtcacctgaatcctgacttctgttttgatttagagacatctaagaacagttgctgcagcaaaatgttttctgcacagtaataattaaggcctaaattgggatgggaaaagccttaaaatagtttataacttgtatagcttcacaatggtgatgaaagttatcaacgagctaagtgctcttacatagtttagtgaaaatactaaatacaatttttgttgaaaagcaaatgcagcaaatagcgaaattggacttctttacaaactcagtatcacaaaatttggaaatggatgtaaatgtgaaaatatgtctactttacttgaccattcattatatctaattagcttctaattttatacttataaaaatatagatgtaaagccactgtagccagactgcctctctagattcctcctctctgggcagagcatctctgaaagaaaggaagcagccccagtcaggggcttatagataaaactcccatctccctgggacagagcacctaggggaaggggcagctgtgggcgcagcttcagcagacttaaatgttctggcctgctggctctaaagagagcagcggatctcccagcacagtacttgagctctgctgagggacagactgcttcctcaagtgggtccctgaccccccgtgcctcctgactaggagacacttcccagcaggggtcgacagacacctcatacgagagagctccggctggcaactggtgggtgccactctgggacgaagcttccagaggaaggaacaggcagcaatctttgctgttctccagcctctgctggtgttaacccaggcaaatggtctgaagtagacctccagcaaactccagcagacctgcagcagaggtgcctgactgttaaaaggaaaactaacaaacagaaaggaatagcatcaacatcaacaaaaaggatgtctgcaccaaaaccccatccaaaggtcaccagcatcaaagaccaaaggtagataaatccatgaagatgaggaaaaaccagtgcaaaaaggctgaaaattccaaaaaccagaatgcctcttctcctccaaaggatcacaactcctctccagcaagggaacataactggatggagaatgagtttgacaaattgacagaaataggcttcagaaggtgggtaataacaaactcctccgagctaaaggagcatgttctaactcaatgcaaggaagctaagaaacttgaaaaaaggttaagggaattgctaactagaataaccagtttagagaagaacataaatgacctgatagaactgaaaaacacagcacaagaactttgttaagcatacacgagtatcaatacccaaatcgatcaagcggaagaaaggatataagagattgaaaatcaaatttaatgaaataaagcatgaagacaagattagagaaaaaagaatgaaaaggaatgaacaaagcctccaagaaatatggggctatgtggaaagacaaaacctacatttgattggtgtacctaaaagtgatggggagaatggaaccaagttggaaaacacttcaggatattatccaggagaacttccccaacctagcaagacaggccaacattcaaattcagtaaatacagagaacaccacaagatactcctcaaaaagagcaaccccaagacacaatcagattcaccaaggttggaatgaaggaaaaaatattaagggcagccagagagaaaggtcgagctacccacaaagggaagcccatcagtctaacagcagatctctctacagaaaccctacaagccagaagagaatgggggccaatattcaacattcttaaagaaaagaattttcaacccagaatttcatatccagccaaactaagcttcataagtgaaggagaaataaaatcctttacagacaagcgaatactgagagattttgtcaccactaggcctgccttacaagggctcctaaaggaagcactaaatatggaaaggaaaaactggtaacagccactgcaaaaacatatcaaattgtaaagaccattgacactatgaagaaactgcatcaactaacgggcaaaataaccagctggcatgataatgacaggatcaacttcacacataacaatattaaccttaaatgtaaatgggctaaatgccccaattaaaagacacagactggcaaattggatagagtcaagacccatctgtgtgctgtattcaggagacccatgtcgcgtacaaagacacacataggctcaaaataaagggatggatgaatatttaccaagcaaatggaaagcaaaaaaaaaaaaaaaaaaaaaaaaaaaggcaagggttgcaatcctagtctgtgataaaacagactttaaaccaacaaagataaaaaaagactcaagaagggcattacataatggtaaagggatcaatgcaacaagaagagctaactatcttaaatatataggcacccaatacaggagcacccagattcataaagcaagtccttaaagacctaaaaagagacttagattcccacacaataatagtcggagactttaacaccccactgtcaatattagacagaacagcgagacagaaaattaacaaggatattcagggcttgaactcagctctggaccaagctgacttaatagacatctacagaactctctaccccagatcaacgttggacttcagcattcttctcagcaccatatcacacttatcctaaaactgacataattggaagtaaaacactcttcagcaaatgcaaaagaatgcaaatcataacaaacagtctctcagaccacaatgcaatcaaattagaactcaggattaaaaaactcactcaaaaccacacaactacagggaacctgaagaacctgctcctgaatgactactgggtaaataatgaaattaaggcagaaataagtaagttctttgaaaccaatgagaacaaagacatagtgtaccagaatctcagagacacaactaaagcagtgtttagaggaggtgaatttatagcactgaatgcctacaggacaaagtgagaaagatctaaaattgacaccctaacatcacaattaaaagaactagagaagcaagaacaaacaaaagctggcagaagacaagaaataactaagagccgaactgaaggagatagagacacgaaaaacccttcaaaaaatcagtgaatctaggagctgattttttgaaaagattagcaaaatagactgctagccagacttaataaaaaagaagagagagaagaatcagatgcagtaaaaaatgataaagaagatattaccactgatcacacagaaatacaaactaccattaaagaatactataaacacctctatgcaaataaactagaaaatctaaaagaaatgaataaattcctggacacacacaccctcccaagacaaaaccaggaagaagtcaaatactgaatagaccaataacaagtgctgaaattgaggcagtaattaataggctaccaaccaaaagaagtccaggaccagatggattcatagctgaattctaccagaggtacaaagaggagctggtaccattccttctgaaactattccaaataataaaaaaagagggactcctccctaacccattttatgaggccagcatcatcctgatgccaaaaccaggcagagacacaacaaaaaaagaaaatttcagaccaatatccctgatgaacatcgatgcaaaaatcctcaataaaatactggcaaaccgaatccagcagcacatcaaaagcttatccaccatgatcaagtcagcttcatccctgggatgcaaggctggatcaacatgcaccaatcaaaaaatgtaatccatcacataaacagaaacaatgacaaaaaccacaccattatctcaatagatgcagaaaagggcgtcgataaaattcaacactccttcctgctaaaaactcgcaataaactaggtattgatggaatgtatctcaaaataataagagctatttatgacaaacccacagccaatatcatactgagtgggcaaaagctggaagcattccctttgaaaactgcacaagacagggaggccctctctcaccactcctattcaacatagtattggaagttctggccagggcaatcaggcaagagaaagaaataaagggtatttaaataggaaaagaagaagtcaacttgcctctgtttgcaggtgacatgattgcatatttagaaaaccccattgtctcaccccaaaatctccttaagctgataagcaaattcagcaaagtctcaggatacaaaatgaatgtgcaaaaatcacaagcattcctatacaccaataacagataaacagagaaatcatgagtgaactcccattcataattgctacaaagataataaaatacctaggattacaacttacaagagatgggaaggacctcttcaaggagaactgcacaccactgcccaaagaaataagagaggacacaaacaaacggaaaaacactccatgctcacggataggaagaatctatatcgtgaaaatggccatactgcccaaagtaatttatagattcagtgctatccccatcaagctaccattgactttcttcatagaattagaaaaaaactactttaaatttcatatggaaccaaaaaagagcccgtatagccaagacaatgctaagcaaaaagaccaaagctgaaggcatcacgctacctgacttcaaactataccacaaggctaaagcaaccaaaacagcataatactggtaccaaaacagttatacagaccaatggaacagaacagaggcctcagaaataatgccacacatctacaactatcttatctttgacaaacctgacaaaaacaagtaatggagaaacgattctctatttaataaatggtgttgggaaaactggctagccatatgtaaaaagctgaaactggaccccttccttacaccttatacaaaaaaataactgtagatggattaaagacttaaacgtaaggcctaaaaccataaaaaccctggaagaaaacctaggcaataccattcaggccataggcatgggcaaagacttcatgactaaaacaccaaaagcaatggcaacaaaagccaaaattgacaaatgggacctaattaaactaaagagcttctgcacagcagaagaaacgatcatcagagtgaacaggcaacccaaagaatggaagaaaatttgtgcaatctatccctctgacaaagggctaatatccagaatctataaggagcttaaacagatttacaggaaaaaaacaaccccatcaaaaagtgggcaaaggatatgaacagacacctctcaaaagaagacgttcatgcaaccaacaagcatatgaaaaaaagctaatcatcactggtcattagagaaatgcaaatcaaaagcacaatgagataacatctcacaccagttagaatggtgatcattaaaaagtcaggaaacaacagatgctggaaagggtgtggagaaataggaacacttttacactgttggtgggactgtaaactagttcaaccattgtggaagacagtgtggcgattcctcagggatctagaaccagaaataccatttgacccagccataccatttctgggtatatacccaaaggagtataaatcatgatgctataaagacacatgcacatgtatgtttattgcggcactattcacaatagcaaagacttggaaccaacccaaatgtccatcaatgatagactggataaagaaaatgtggcacatatacgccatggaatactatgcagccataaaaaaggatgagttcatgtcctttgcagggacctgggtgaagctggaaaccatcattctcagcaaactaacacaggaacagaaaaccaaacaccacatgtgctcactcataagtgggagttgaacaatgagaacacatggactcagggaggggaatatcacacagcagggcctgtcgtggggtggggggctaggggagggatagcattaggagaaatacctaatgtagatgacggttttatgggcgcagcaaaccaccatggcacgtgtatacttatgtaacaagtctgcatgttctgcacacgtatcccagaacttaaagtaaataaatatatatgtacaaaattatttttatgtgctatatagatacatattatacaaggatacttttcttaagagaaaaaaacagattcacttacctaatcatttgcagattttccttctttcagtcattgattgaacaaaaatttgttgaattcctgctctgtgttatatgctatgaaatgcctggagatacagatataaccaaggtccctcaaggactctcagtccttaagttggctcacaaggccatgcatgatctgatccatgtatttctcttactcttcagcctcactttttgcaatttccctgccattaacctgcccttacaacccccatcctatactcaagccacatcgtacatacgtacattcctcaacctctccaagctctgttttgtcttaaaattccttactggatctctacttggctgttacttatccttcactcaagtcaggtcccaattacactttggaaagtcatccttgaagcccccataacttaggttaggtgcttcccctgtattacagtcatcatgtgttctatctttcccatcagagcactgttgaagttgttatccaattgcctgtcccacactagattctaaactcccaaagggcaagggactgtacacgttttgctcaccatcatattcccagtgcttaacatgaggtctagagaaagttacctcctcagaatatatttatagaataaacaaacaggaaagacagacatataatcaagtgattatcatgtggcataacgttgcacatttaaagtatgaaaaaatgtttttacagttccaatgaaacaattcattaaattttgatagagtttatcaaagcacaatttaaaaacactcaagtaatctaggtccatactctccaatatagtagccaataggctcatgagactatttacatttaaatgaattaaaattaaataaaatgtccaattcagttcctcagttgcattagtcatgtttcaagcattcagtagtcatgtgtggctagtggctactgaattaaacagggaagatatagaacagaatgcattgatcatcacagaaagctctatgagacagcactggtctagactgaaatatgaagagggagatatttaaacaaattgtgttttcaaattaataccaaaattaattcttcaatataaaatttgaggagtcacttcggaagtgagtaactgtgtaccttgtgattttggaattcagagcataaatgttcacttcgagagactctgatctggaactaaacactcaccataaaactaaaagcacactttacccctaacctataaccacagagtcaatcagtaaacttatgatctggtcagaaagcacttgcaagttgtccaggctgacagggaacattaactgtgtgagctgggtgaagtatactgtatttttttttaacttgaagcttgtgaatggaaagatgatagttctgtcttattactatttttaatttacttgaagcaacattggaccagtatttacctatataattagtaaattaatttctccagaaaagtatttttcattataaaaaaatttagagaaatagtattcttgagatacattacaaatccttcttagatttactataaaacataattgatatagatcttactgctagtgactaagtaagtctaccctcccctctgttaagccaagcatataattgcttttcaatacatggtattgaaaaattaacaaagtattagtattttccataaagatttaaaccttctatgttgtggcttctgagggaaaaggggaaaaagattttgttatttaaaaagttttttattttcctgaattttaatataattttgtttatatatctttaaaagacttttattagtacctgtaaataatatttttacttgttccccaaagtcttaaagaagaaatgagtctaaaattttttaaatgtattcatatttctcataactataccacaatgatttgtatagatcaaatttgaagagccatttcttttttaaaaataatcttcttgcttaatttacatgttttataaacacgaagagctgcttcacatctcatttattaagaaaataatcattgttgaacaaatagtaatgtgaggcaataaaactgagcttcctctagtctctgttattacacagctctaatagtttgcaagcattagtatgaacacagtgagcagataattacttaataatagtagaagcagaaaagacagggttcaaaatatagacttttatcagtaatataatttctttatcaatattaatcattaccattttgtcatcattattattttacatgaaccttcctgaactagagcaaaacaaagatctcatgtgatctctcttcacctgactcccaccatacctggaaatgaaaagagaaaaatatatagcctggatgataattgtcaatttttaatgatatttacaaatttcatggcatatggaacttggtggtaagcagcatatttgaaccaaatgttacattctagccattgatatcatctaagtaaaactaacattggctctaaaaggtgccgaataagaatcaaagtgtagaatattcttacttcctcaggaaaagttactgaatatatagtcatgaaatattcaaaagtaaagttctaagaatgattctgaggcttgcctagaagcagaattctaagatgatggctcttttcattaaggagtgtttattttaatttcttcaccccactgttggttttggggggtttgtttttgttttgtctaattacaaatccctctcctttccctgaagggcatgacgaagctttgttcatctctgtacctccagctgccagctcaatgcctagcatattgtggacattcaatatatatcaacttactgatgatcattagcataaataaaatttttaaatatacaattttttctttggtgagatccgatgtgttctaataataaaagtgagaatctttcaagtcagctagagtgagtaaatgttgttttgcatcaaaaataaataaataattaaattacaaggcacaggaaaccaagtaaaagtattgcttgtggtgctggtggaaaggaaaggacttccagaccaaggtacagtattttgattactggagaagagagaagaaacctgttagtgctttggccagtattgggtcaaatgaaatgcctgtggcccagtgtgaatcaccagagtatcttgctaaaatgctgattctaactcagtgggtatagggcagggcccaggatccctttatttctgaccaggtgatgctgatgctgctggagtagaaaggatctagatttccttttccaaacatgtatttccttcttcatggaatttggaagtgtgtctgtagactatttcctctttgtaattttatggagggttagaatcatgctataaaacaggttcttacaactgaaattctgtgaaactaattcttgaaaggaagtgtcttaggtttttctggaagtgtgatacattcataaaaggcacatcactacccagtgaggtgggactctggcacatttcactccttagtgtgtgcccatcactttgtactggctgcctggagcacacagttaaggaagatgctgagtccaagtccagacattcaggaagtgtgatgtgattggttaggggcatgtgccttgggtgcagagagatagtagtacccataactttttcattattttcttggtcaaaataatcaataggacattctgggaaaagacttaatcaaagtcagtcattaaaaggactgtaattaggtaaatgctgcatatgtgtacaacagattaagtaaatagattatattattggaaatataccccattttatagctatttggcatattatccagtcatgtctcaatggtgtttagtgtattctgcactactctgaaatttaaccacctggaagaagttatgaataagaaaaaaaattctctgtcaattatttctaaaggtcatagagttaatgactagctggaaggttaattagattctgaaaacctcttcatatcaattaaatctcttatctttatgttttagtaaataaactgaataactatttagagctactgttctagggtaagaaacgttgtaaacagtaaaactacacaatgggtgtttgggttttttcctcacattaaaaaaaaaaatagttatagcaggcatggtggctcacacctgtaatcccagcactttgggaggctgagacaggaggattacttgagcctaggagttcaagaccagcctgggcaacatacagagactccaactctacaaaaataaaaataaattagctggatgtggtggtgcatacctgtactcctagctacgcaggagactgaggtcagagaatcacctgagcatgagaggttgaggctccagtgagctgtgatcatgccactgtaccccagcctgagtgacagagcaagactctatctcaaaaaaaaaaaaagtattacaaaaaagtagatatatgaattaataatagtaacttattttaataatagtaacttattttataatttctgaattactttatttttcaaaaataaaagtgtgcatattactatttaatcataaacaagttccatcactatgatgtcaaggaggaaaccatttcatagaaaaatagaccaaagttaccctatgcatgagctactactaatctaaagccaacttcactctcagttatttcaataggacataagtttattgattgactctgtggttagttccagaaacccaacccctttgaaagttactgtacacatttgtaaataaatggtatatttagcacctatactatgacaattataaactcatttgtgtcatgtaaattttctttggataatataaccagacttcagatgaaaagacatagatctgcattaatctgtaaggtagcctagccacatgtggctatacaaatataaatataatttaaattacataaaattaaaagttcagcttttcagtctcactatccacatttcaagcaagatgtgactagtggctcccaaatataattgtccattatgaaagaaaccctctgttggacagtaaatgacgaaactggtgcatctagtgttctctttcattcaaataactggcatgggctggccgaggtggctcatgcctgtaatcccagcactttgggaggccgaggcaggcggatcatttgaagtcaggagttcaagaccagcctggcctacatggtgaaacctcatctctactaaaaatacaaaaaaaaaaaaaattagccaggcgtgatggcacacgcttgtaatcccagctactcgggaggatgaagcaggagaattgcttgagcccgggaggcggaggttgcagtaaactgagattgtgccactgcactccagcactccagcctgggtgacagagcgagacacagtctctaaataaataaataaataaataaataaataaataaataaacaaacaaacaaactggcatgatggttaatagatacagcccaataaaggatatgtaaactggagaggttgcacctggctacttcaccttccattcctgcagcaggcatttatgacatgcccactgtgcgtcagtcaggacctgagccagggcagagaaatccaaccaggaaagttgaatcactcagttggcatttactccaaggaacagaatatttgttaaagtctatgtgattttgtggagaaagacgagaaaatggagggatcactgaagctggaattgccctgaggaagaagagaaaatggaaaaggcacaggaaaaatgagtagtaagaacgtagaaataagctaggtcccttgtgaacttttccaacaggaaagaaaagatcatgcgtgcacacggtttcttctgatttttcttaattagtatgtgcggaattttatcttcatccagactccatgattggttttccttaactgtagttgttctgaattaatttcatgtgggggaaaaataaagctacaaagtgatttttctaaagaatattgttgaagcattgttatgagagttcatctttcaaattttacttctaggatataggactttaaaagctccacaaatttgaaggaaagatggagattaaaaattcagttccagttacagcaacatcacacactctcattctctaacggagggcgagttatgtaaccttgctgggctttaggttcctcatgagttaatgctgtctaccctgagctccttacggggctgtcatgaggattgcaggttataacagctgtcagagcccattgtcaacccttaagttttaaaaaattagttttattttcaaagtcaagagaaaaagttcagagaagaaaaaatgctaaccaaaagaaagacaaaaattcttaatttacgactgcatagtttatgctaataagtgtattatttataagtaaatattgaatgattatataaataactgtagcattttacataaattaagaagatctaacaaaggtcaacgaattgattttttttttcttttccacaagtatttattaagtgtatgtgcaaagtatggtgttcacggccctccagggccagtagcagtccatggtggacagaatatacacagtatttgttctctcattcagtagatattgatggacatgaagatcatttgctaagcattctgccagttactggtgatgcatctgtgattatgatacccaattatctgaaccataataagatatagacaaagtacagtgggctaacagaggagaaggaaagcagttacaactgtgagcacctgaaaaatcttactgtagatttcagatgaaggcatggccttgaataagtagaataatttgatatgctaagccaatctgagaaccatttttcccatttaaactaaaagtgagactaataaatgtagtgatatatggacattaaatgcatatatgtatatatatacacacatatatgtagtatgtatatgtagcagcctttattttttgttttctgttagcactggattttttaatgtatggtttttctataaacagatggttataatttctagagaaattccatagaacacaaatgttagaaaaatgcagtgaatttcattgcctttaagcttaataaaaggttcaaccttaaagttgcatcccacatcgttagtttaactttacagatgagatttttttttcccctctctaaattctaaaacatgatacatctggctgagaggctggaaaattgttacatgcctgtgcaacattcttacaacctaatcagttcttcaacttttctcgcagtttaatcattggagaatgttctttgtttttgtagtcactgtttcacatagtaacagcttgttgtattttggtctgtttgccagagggtaggtttatttttaaaaccctgaactctgaatttttctttatttttccaagattgaaagcagctgaaatgcctggagttacaggttgaaggctgcttcacaatatgtggaggaagcttctttccctcctccctttgtgtgtgtgtgctttttttttaatttttccctaacaaatgtcttctaactggtagttgtctaaaaatagaaaactgcttaactaaaaatagcctggctctcagtcgtgccaaggaaaatggagaggaataggcgtggaatagaaggctgagtaatccagttctattcattcagagaaacctttgagaatgcgggcgatgataaagtgccctcaaaaaaccacaggcccgactctctcttcagacttctaggtgccaataaacattttagccccaggatacttttttttttttcctcataggttgtaaacattttctgaaagacaaggctttgtttcagggaacctgacaaactgccataaataactaactttcctaaggtcttaaaaattcatatttgtaagatgtattttaaaagagaatcttaaatgaaagtattgtaaaataatgtacgtcgtgtaataattaacagaggaaactctgttataataaaaaccacttactgcttgcaattaaactcaaaactttaaggagtttcacagcaagaaaattattcctgtgactcattgtaccttaagagagcagctgactcattttagtttagctccctgagacatgaaattctcttgttcagtctgtatccccttaacatgccaacatttagtctctttcttaaaattattattttcactcaagcagatttttacttttaatctttaaaatgatgtagaaactactttgaaaaatagcatttctggagtaggatggcttttagtttcaacaaatggaattctgagtaagtcataaaaaaatacgtgtgtgtgtgtgtgtgtgtgtgtgtgtgtgtgtgtgtgtatgccagttttgcaatgggaatgctttttttttctattttgttttgcttaagtaatctgtaaaccaggtcaaacatagcaacagggtgtggaaatgtcagcacagttcatagggttatacgagtctgagcattgttatgttcagttcctgtaatgctgctggtgataagactcttgagacaaaagacgataattgatggaaagaggcttaaatcattgctagaagaatcaaggtccttgtatctgtgtacatcgactcttctggtctccttccgtcttgtaaagcattttgtcgtcttgcatgttggccccctactgctctttgtaatggatgcagaccacaagtgattcctttatgcagcatacagggtgtaattgtgtctgtgtggtgtattagtaattaccaagctgaattcccatattgtatctttactgcaggcatggaaaaataggacatacaaccctgcgaaaccattttcaacctagatagtgagccacttagagctgtattccagggacaaagccttttacatgaatactttttaaacaaaattttcattgttgagtcatttgtaccatgcaggataaattcagtttgggaaattattacctttgatattatattattcatttctgactcttcagcaaagtctgtaatatggaaaatattggttctttttaactgctgaaataaaaaatatttttagatgtaatagtgatatgagctatggtaactatgctaggctatcatacagaaagagtactacgtgaattactacatataatagattctgtaacatttataaacatgaaataatatagttattttagtagcattttatcttaaacagttatatgttatacataatttatcaatattggctcaagcattgttaaacttcagaaaaagctgacaaaaaattttgttacagtaaacagatataaattattaatttctttgctataaaatttgcatccatcctttatgtattatgtagctgatattgatttgactacctccaaatcattgtggatttgaaatgtctacagtattatctgtaatagaaagccaaaataatgcaagcagcttggcttaaacaaaagaaagtatgcttattctatgcatcaaatgcttataatgacagttaagaaatattaaatagaagtgcaaagaaattaatacagcaatttcattatcgattttcaatgcagttagacttatattgcaaattattcattaaagcattcaagatttttgttatatttttaccttcatttctgaaagtggccttccagtatgtatatcttaaaaatttgcttccacttttatatgtagattttgttttattcaagcaataattattaaattcttaggatatacagaactttatattgatgccaggagaaatacaagtttggaagacattgtctgtgacctcacaaaacttacagtccaattaaggtagaaaatacatgtgggaatcaactggacaaaacaacgtaatgagaactatggggtatttagagggaggcaacatagcacagtgttgaggagcatcagttctggagatagactgcctgagttctatatgtccttgggcaaattacttagactgtctgttttattttttattttattttattttttttgagatggagtttcactcttgttgcccaggctggagtgcaatggcgtgatctcagctcaccgcaacctccacctcccgggttcaagcaattcttcctcagcctcccgagtagctaggattacaggcatgtgccaccacgcccagctaaattttttttgtatttttagtagagacagggtttctccatgttggtcaggctggtcttgaactctcgacttcaggtgatccgccagcctcggcctcccaaagtgctgggattacaggcgtgaaccactgcacccggccaactctctgtttcttaatcccatcgtctgtaaatagaggttaataatactatcttctgcttagctgttatgagaattaaatggataaacatttataaaatgcttagaacagggtctgacacttggtaaggtttacaataatgataacgacgacaatgatggcagtgccgctcctgataccatgtcatcaagcaataagtggtagaaagaagtttaaaaggtcaggacaggcagccatgattggtagtcctttttaggctcaaacaagtcaaattcagaaagatggatatcaattgatgaaaaacgtgggcaaactttcaaaaaaccaagtatgcaaagagtcacaagaaaaaagaaacaagggcatgaaaagtattagcttgatatgaagagaatattcacataaataaaaagatataagaaagatggcaatgaaaatgggaagaagagacagggaaatcaagcactctaaatatttgatgtggaattaaatgtgatacaattggcatcagaaagacactccgtggtctcgagcagtaaattagcataatgacaattcttgagagaggttccgctggaaaagacagaaacagttgtgaaaagtggaagtgccaaaatattttacgttttgtaagtatgtatatgtgtgtgtgctaaaaagcctgaaagctttcaccaaacttatatttttatttcataggacaagttgcttcagaaatattcatataattttagtttgcactaataaggtgcacatgcatttctgtgactgaggactatttatcacatacagtgtattaaaaaagcaaattatagaggcctcaggaggttttttgttgtgtttgttgttttcgttttgcttgtttttatttttttttttttgagatgatttcatgcccattgcccaggcttcaatgcagtggcacagccttggcttactgcaacctccaactcctgggctcaagtgattctcctgcctcagcctcccaagtggctgggaccacaggcacataccaccacacccaacgaatttttgtattttttgtagagacaggattttgccatgttgcccaggctgttcgaattcctgggctcaagtgatcctcccacctcagcctctcaagtgcttggattacaggagtgagccactgtgcctggcctaggaggtttattttaaactatataagcttctttacagtaaattgaaacataaatcaaaatcttataaatttagaagttcctaatgaagtagtgcactttttaatttttagacagagtctcgctaggttgcctgggctcttctcaaactcctgggatcaaaagatcctccttcctcagaacatgtgcagttttttgttttgttttgttttgtttttgacagagtctcactctgttgcccaggctggagtacaatggcacgatctcggctcactgcaacctccacctcctgggctcaagcaattctcctgcctcagtctcccgagtagctgggactacaggcatgtgccaccacacctggctaatttttgtatttttagtagatacggggtttcaccatgttggccaggctgggtcttgaactcctgacctcaagtggtccgcttgcctcggcttcccaaagtgctgagattacaggtgtgagccaccacacccagccaggacatgtgcacttttaatgatcacctaaacaggtcaggattctgaatacaatactgtcaaatatgaaaactctccccttacactttcacatccatataataaaagccctgccctttcataaaaaagacagtgtggtgctggaggagggacagacacacattttagcgtcagacaaacctggtttctgccactttcataaactctgtgatcttgggcaacattctgaatttccaccaagcttcagcttctgaagcagtaaaaaagggataataaaactcacttttggtcttcctgtaagaattaacttatgtacatatatagccattagcacatgatgctcatacaactggtatttattttcctgctgttcctttttgcatatgtaaatttaggcaaaaattttaaactttcacttgtatatacacacgcatactttggacactgaaatcttcagtgtatttggtgcttacatttaaataaaatgtcacattttataaattatcatataatgtatgtatatttcttgtgtaataacgtgatgaaattcttcagaaataaggtcctcactacacagatttttaaactagggaaagggtagaaaaaggaaaaaaactaggagtcaaaagtaattctattaagtccagtcaaaatagagttaaaagaaaaaaaaagtggaactctgccaaatagaggggcttgcccaagttctcttagtgaactctggtagatagcattaggatataatttatttcctggtgtcccctttgaactactttgtatccaagaagaggagttagacaatgagagagaaagtgaaagaacgagagagatgtagggagaaagagaagggggtaggttgattgagatttcaagacaatggaagtaattagcaaggataacacaagtgtccctatgctgccagtttctcttctgacacaaaaataaataattgatttcattgaagtattagtcagtcaacaatgcttagtgtgatgatattgttaacagtgaaatatatatgttgtgcattgcttctagggtgaaacttaagtatctttgccctggctcccgcagtattttcatggcagtgaggatacatactcttggaaatgagccaggaacactctaatgtattacacatgtggcttaataccaggtgaacaggtattttaaatattctaatcacatacccacaatgtatatcgctactgggaaaaggatatcatttttaaccactggtgtttgttctgagccatacctttttcacactctgaagattttcaagacgaactgtgatttggggagggatggccatctcagtcaactttaactgataggaggtacaacaaatttatagttctgaactctgcacctggagtctggctaccgaaatcaaaccacttgctgaccagcataaaaataaataggaaaatatttcagtgttttccacaattgcgtttgtacaaatacaagagattttatttatattaaagaaaactgtagtttttcgttttttcttttttctttttcttttttttttcgagatggattctcactctatcatccaggctagagtgcaatgatgcaatgtcagctcactgcaacctccacctcttaagttcaaacgattctcctgcctcagcctcccaagtagctgggattacaggctcctgccaccatgcccagctaatttttttgtatttttagtagagagggggtttcaccatcttggccaggctggtctcaaactcctgacctcaagtgacccacccgccttggcctcccaaagtgctgggattataggcgtgagacatgagacactgtgcctggcctgcaaattcttatattatgattaggggaagaaatttgttttccattagaaaccaccattaagtttgcaagcattgtaacataaaaaaaaaaaaaaacctcactttgctgaggcctaaatttctatattgaaatattactttctgggggaaaaagataaaatctacccaaaagtacatctaacgagaaataattctgaagattctttcagatgttctgcttcatgctgtacacacacacacacacacacacacacaaacctacacaaacctacatatattcacatatacatgcagttaatgtgagactggcagtttccagcacaaaatacatagcttccatttcactgtgcacaagttcctgtgtcagatcaacaaaactttcattgatttctatctatctgcttggcttcgacaataatgtaatgcaatcggggagggagagtttctaacttctcccagccacctgccttaacctcatgcttcattcatctcggtatagactggattcctttgacaattagtcgatagtgtacattacctcatggaagcagactttgaactatgttttgcttccttttaatggtactgtttcccctcatcttttaacagtgatcttttaaaaagaagtgtgattctgttcagaatgatggtgatggctgtttgagacattttaaaactattaggtggttaatatgtggttaatattatttattcaacagaaaatggactttaagcgcatgtgaaaagcaaagcatcataattgtaaacttcttttaaaagttatacaactttatttagtttcaattttccaaaagtccagtttcccatctgagagacatgggtattggcccggctgtgggaaacctccagagaaaacaggggagctccgctactgcggaagcagagtcagtgactgtgggtggcattttctccgctgagtcaggtcctgccagccctaccccaggcttctaccaacagtgcagattttctggcaagatgcaaaacccaagtgtttgtggttcttgaagctcttctgcagtttctccttttccttggtactttgggaaattttcactttagaagatcacatcttactgtgtcttccttgtaactgttgaaaaaattgggaagtttaagtcatttattttatttttcctctcatctggcctataaagtaacttggtgttatgtgcatgtttttcaacaaacaggaaagggaagagattatatacccatgattttgaaaataatttttatacagcatacaagatttctcgatgatccctcgctttgcccagggagaaacaatagtttctccataaaagcatacatttttctcttttccccaatctattccctcaacccaagagaaaatgtagtcttgtagttaccagcctttgcatcccccatctgctcaagcaaattgaagagaagaggcaagtggttggcttctgcatctgaagaatataggtgccaaaataataaagtggacctttttgttagtcacagagacttgaggttcttgctagtattactctaatcattgtaataaacctgtgcttcattttatgcagataggtacagtctgtatattattgggaaggacttccttcctaggcttaggaatgttaggagttgaaacatttagcagccgggcgtggtggctcacgcttgtaatcccagcactttgagaggctgaggcgggtggatcacaaggtcaagagatcgagaccatcctggctaacacggtgaaaccccgtctctactaaaaatacaaaaacaaaattagccgggcgtggtggcgggcatctgtagtcccagctactcaggaggctgaggtgggagaatggcgtgaacctgggaggcggagcttgcagtgagccaagattgtgccacagcactccagcctgggtgacaaagggagactccatctcaaaaaaaaaaaaaaaaaaaaaaagaaaagaaaaatttagcaccctttcttttccttggggcttcaacaacctacacttcattttaactagatagatagtacctacatattggtgaagggctttcccatctattctagatagtacctacatattggtgaagggccttcccatctattcagttgatattatagcaaaatagtaggaaaaacattttagataatattttttatcagaaaatgaattccgttacaaacacatccctttatgaaaaaataagatttgtcagtcatttcaccaatttcagctgagagtaagtgttcaaaggatacacagatacacaggcatggtttaggcaatccttattgttaaacaaccttgcagacgcagaataatttgatagctaagagagaaaattctggagctcattcatgggttcatagacttggttccaccactcactaactttgtaaacttcagcaagttcttgggccactgtgtgcctctttttttcatctgtagattggcagtcattgtggaagagtagcttgtgaggattaaaaaaagacccatgcaaagccacgggctcagtccctggcacatgtacatgcttggtaaatggtaggtgttattgctgaggaatggattcaattaaaatattaagaaaattaatattttgatagtgatggaagactggtttaatttcctcttcatgccatagaagaggaaatgttgtttttataattacctaatgaagaatctggaagaaatgattttgcaaatgatacccttaagctcatcactgaactaacaaaataactgagatttcataagttatggaaattgaaatacctaatttaaaaagtcaagtttgcagtacatttccatggataatgcctgaagttattgaagccatcatgactacaaaatcaggcagccaggaggccaggtctacagagtctgttcagagaaggctgtctggggccacaggacagagtgcgccgtggggctggcagcatgcacttggccttgttgagttagacaacaggtgccgagccactgccaggtgtggatatcaggatgaacaaaattgctgatggcctgtcataaagctttatgttagatcataaagtgctgagcccatatgatgagagatgagttcacatagcaagggatcacttgaagtgttcacttgattttcccctccctgtctttcacacgatcttcaaattctctctttttcactcattttcattccttccctctctccctccctccctttctttcctctcccccttccagtatttttctatctatttataacctctgtctctcattcttggtattcttatttttaaacattttctaagtagaatgacggttactggaggccggaaggggttgaggttaccagaggctggaagaggttgatgagggcgggaatgaggagttgttgatcaaagggtacagatagacagagggaataggttttgagagctactgcacagcagggtggctatggtcaataataatgtatttatatttcaaaataactaagagaataaatttcaaatgtctcaccataaaaaataagagaggtgatagatatgttaattagttagatttaatcatgccacattgtatacacataacaaaatggcacattataccatataaatatatacaagtattgtttgtcaatttaaaataatattactaataatttttttaattatggggaaaagttcatcataacagttaacaaattgattaatgaaatttatcttaacaattttatgaacaccaaagcatcatcaaaataaaagtagaagaggcatttgatgaaattcagtttctattaataaaaattcttaatggactaggaatagaaatttccttaagtttatgaaatatatcaacaaaaagggttcatagtaagtgtataatggtgaaacatttggctcattccttttaaagttataaatgagataaatatgctcccatctctgctttaagtcatactgagggcctagtcaatggaacaaaatgagataaaaaaataaaatgtatataaatcacacacacaaaaatactctctatacccttccatttttcagttctcagtgtcactctagcttttatagcatcatgtgaaatccaaggtgacaatgcacacctaagaatattatcatctgcataatatatgcagtcatgggaaatgagattttgtgaagtaataattggtccatgattctggactgtcgattcatatatggatagcattcagagaataaggaaaataaattgagatgaatttgattttaattattaatttaatttggaaacataaattttgaaaaaaattaacctgataataaagtaacttagtctatataggccttgattagcatgcagtatcagtaatagtacactttgcaaaatatttcttatgaattatattttatttgtaagtatttaacctagaaagaaggatctatttgccataatgcaatgtatgttaggaattttcagattgtatttattcatgactcgtgtcctctccgagcaattacactcaattcataattgcctacactagtgaaaaaggatccttcacattaataccataaaacagcaggaactgcaatgtgagtccaggcacagcaacccccaataacaaatgagccaggaaactagcaggcaagtcccagtggaaagttgagcagaggaccctaactctgaaatgctactggcacttttgatgtcggtcctagaaatactctgattatttttctggtactagctggaaataattatattgttaggtaagcaaataaaggccctctaattagcaaacttgaaatttacattaaattatgaaattcccagggcccagtactctgccaggtactaaggataccccgacacaaggcacagacctgccctcaaggagcgcagccttgtgtggaacagaggcaggcacacagtggcattgcagcatgcagaactacgacaggactgcaggaaagacgagtttaaataaagaaagccactggaatgatgtcagtgtgtttgcagcagaagccttgagaaactgcctcagaattttgaagcacatttatttttaagcacctgaagctcttatcaaacagtcctatcaaactttctttcatcagacacctacccaagtcaactgaacgtaaaatccaccacttattataaattcacatattaggtgagtggtaatgagataacagctacagaggataaatggattcaattctctccatctctacaagtaatctataatgtgacaggagagataaaaggtagaaacttactttgggaggccgaggcgggcagatcacgaggtcaggagatcgagaccatgctggctaacacggtgaaaccccgtctctactaaaaatacaaaaaattaacctggcgtggtggcgggcgcctgtagtcccagctactcgggaagctgaggcgggagaatggcctgaacctggaaggcggagcttgcagtgagccgagatcgccccactgcactccagcctgggcgacagagcgagaaaaaaaaaaaaaagaggtagaaacttatttgcagaaaagaaacaattatttgcattttaagtttactgctgtgagttttggagatttagtctgtgagactttcttaatgcatgatgtagttgttggtagatagaggtttgttctctgaccatttgacaacatcctgaaactctaacaacttctacctccaggtcaactgttgaacctgcaaggagccttttccccagatctctgacttccagtcggcctttctgcctcttgttcactagagagtacatcctggtttcctgtccttatgctaagtctgatgaaaccccaggatgtctgtctgctggcttaactggccctggatcagcaactgtcccctgaccagcaaccatctacccattatacctttcactgcctctgttaagcagaaggtttgccagtatatgaaccaatacagtgaaaacactaatattgcattagccaagtcccaggagagattttacatggaaagggagaagtaatatacaagtaagactagagaccaagactgctcaccttttacagacctggcaaacctgactaaaacgcgagagaggtttggttttcaagggggaacatttggattcctagccactagcttttgcttagtctgcctgagcctctccattgtatatcatcaggctgtccttaccattagtcccctgtaggacacctatccagaaaagttaaccaatttgtagcaacattctactgtcagatatcctactagttgccaaggatggaaagtcgtcaggagacttcctgtctgcaagaatcttataatctagaaaatgatataaaagcagaaaacagatagcaacaatatgaaataactgttcattatatagttctaaggaagaataaaagagacattaattctattaactctctcttccacgtgattttttccttttataatttaagtttatgtacgaggatgggggatggtggggttgaggggcagatgttgctaagggtagaatcagtgtatatgtacagtatgtatacaaacctaataagtgccctctatgtgtttttagatttcattgtaattccattttaaataagaacttctgttgctacagccttgaattccattattctttcatcgacaataacaacatttattgagtgtcatccatgtgctgggaacattcaagatgctgtggatacagaggtgaaaaagacaaagattctgctctcatagaacttcgttctaacacactgaaactcttctctccccaggcagccacaggcggctgtgacttacgtattgtgttcccacaatcccagtgacgctctgcactcctgatacttcacttttctctaatcagaacaatatgggtattgagcagtatgtgttaacagttgtcaatggcagtctctgggatggcatatcacaagctcaggcaaaaccctcaattagcatctaagtgtgtttgttcttcacagggcatattaactggggagatagactataagagaccctccctgctcattgctgtcagatcactatagaataaccaaaaccaaagtgaaaattttcaagagtgaatgacttatagccactccttgaagagcaggctggtttattaggaagagggagaaatcaattttaaaaagatttgaatgtcacgtattatgtgggaagaagttgaggataccataaatgaaatctgtgttcacaatccagaattggtccttgaaaaatctctctgcctgctatttaagaaattgaagaatagaaataacttgcagtatttttggtgctgtcccaaattgaaaactgttattggtgatgttggtcctgtgacttaagacatgacaaccacaacatagagaatgttccccatcaggacaagggccagcccaggagaaaagtgggccagggtcaagcccattagatgtctttacctctcttaagcctggctgtcaactgaacgtaaattccaccactttaggttgggagacaaggaattaaaggaaacagctcaatctttatcttgggagttcctgactgtctcagaaatgaggaatttgatatcttaagttctcaggtatgattaaaatagtcatgacataagtcaatcagttgccaacctcaagactttattttgcaatgccttatggaaagttctgtgtatactctgcttttctgataagctggtaataaactggagatcccaactgacagatattctgtaaagtacatcaagggtaatgccttgtttcggaggggagacgtagaaatagagaagagaatgcacaaaggtgtctattgcagtaagttttgttctcaacatgtttgtgtcttcctggcagtaacagagcagcagcagccacagatggcttggaagcccatcatgccccagactctgagcaggtctaaacacagagaaatcccaccatttgtgaaccagttacaatagtctgtgtcacctcctccattccctcagctcccacagggatgtcctgtgccgcaatcttgaagtcattccagatattgctttaacctaccagaacttgtactccttacattttgaggtaataatcttattaaaacaaataaatagtactgtcactctacaagaccacccaactcatttgaattagtgtctgtcactgttagaaagtatgactgtcaagtttgtttgcttattcatttatccagtgaaccataactgagaatcttggttgagtccacacatattacccaagccctgtgttagggaccagagatgcccatttttcacagaactcactacctggtggtgaagcagacatgttaaaaaataaattacagtataacataccacatataaaaaagaggtcaaggactgtacaggtacagaaaagggagttcctgagtgccttctacaagcgttaggaaaaagcttcaccaagtaagtgagggcattaggtaatagggtgtcctaggacaattaaggtttgtgtaactgagaggaggagtaaataaggatattctaggaaggatggaatggcgtatatcaaagcagtgtttctaaaggattgagctgacttgccaaatgacatgaaatttcccccttggccaaaacccagcgatatagtttggctgtatcctgacccaaatctcaccttgaattgttacagtccccacatgtcatgggagggacccagtgggaagtaattaaatcttggggatggatcattcccatgctggtctcatgatagtgaataagtcttatgagatgtgatggttttataaatgggggttcccccgcacaagctctcttgcctgccgccatgtaggacatgcctttgcttctcctctgccttctgccatgattctgaggcctccccagccatgtgaaactgtgaagccattaaacctatttttctttataaattactcagtcttggtatgtctttattagcagtgtgagaacaagctaatacacacagtaggctggagaaaagaggaaatgagcctagaggcaggtggagggttttcaaggagaacagccatccaattagatgtgcattttaattagaccctgccagaagtatgaaggaagattgactggaaggtgggagtccaaaaacaaacagacaaaacacagaagaccaaatagaaagaataacgataggtgagtcaagaaattacggaatcaagggtgatttctgagttttcagcttgaacaagtacattgtgacatttgctaggaagggaaagatgggagagaaatggatgaaggggtaggctggaatccagaaaataaatgggaaaagaaatgatatagtagaagagatcgtgggaaatcctgtagaaatgaggaaatgtggtgactcaaaagatagctcagaagtgactggtgaatgcaaagatgtaggatataagctactcgcatttcaaatgactaatcacgcatagactcaaattgaataaaaaggcatttacaactaggaaataaaaataatgatttgacttattttgatgacccaggataacatctacatcttttgttaaaataagtcattaatggtttatgaaagatgctccaacatgttatttgtaaagcatcagtgcctcaagatacagcctttttgtccctgtaaccaacccatttgcaagtaaaatgccatagtctaaaatgtttagtatgtgaagttacaattattatacattttatactttcaaaaaacctgttctctgatcttatattaatttactcctttcctctctcaacctttgtttaatttatagttctgtcttgtcttttccttcctcatttaagaaatcactaacattgcccattcttcaaaacaacctacaacttgattctttgcattccagcctttcttttcttaacttgcattataaagattattaggataggctggacacagtggcccatgcccataatcctagcactttaggaggcttaggtgggtggattacatgaggtcaagagttcaagaccagcctggacaacattgtgagaccccatctctaccaaaaactacaaaaattagccagacttgatggcacacacctgtaattccagctacttgggagactgaagtgggaagatcacttgaacccaggaggcagaggttgcagtgagctgagatcatgccgctgcactccagcctgggtgacagagcaagactctgtctaacaacaacaacaactatagctatagatatagatatataggattaactgcatatcctatcatgcatttcaattattatatattaaatgttctctctttagtatttcacttcacatctctgctggattgaggatctcagggagtgttttacagctaacgtgtgccagacttccccatctcagtcccattctaggccaactcatgatgcatgccctgtccgggttccaatagaggtttggcggaagaatccttacaaacaccaaatccttgatctgtcctgaggaagcctgaatcatctgattggccccagaatcaccctgattttccatgaattccctcaggcaaatgttggcccagaataagaccaatgtaaaagcccaggagaatagtggagcagtagactagcatccaagaatgggggaaaatgatgaactttgcccaagaatttgaaagcatgcttaattcagatttatagtatctgactcacattcacaaatttccctgtgctctttcctacaaaggttttgtttttcctttgctaacctttaccttctgcctaaaatatcactcccttttttctctttccatgctgaaaattctgtgccctctttcagctacacttttgatcactgagattatatgcttatgactttctggcattaaaagatttcactgactgctcagtttttctgagggtgtctatttagactagtacccctaaattttaagcgttcaataatgtaaaatttgtgagttataatgtttcatacatagtacaaatcacacctacattgcactgctttctaacttaaaaactgtacatttcaaaaagtagtaaatttgggagttattaagagggaataaaaacattgagttttaacgtagtgtgaaatggtagtaataaatggaaaaaaaagagattgcagttgcaaaatactgcactgagactaatcttcctccctctaacatttgaacattcttttctgttctgttcatctattcatttcagtttgtcatgaatgctgcaaatatctagtaagttccgaccacttgccaggccttgtgctaagttctggtgatacgagatgacaaataaactattcctaacctctagtagctcatagtagcaggaagaaaaacacatacataaacaaatcatctttatcaaatgtccagaaaaatcatcttagcatccagaggaccactggcagcacctgacatatagtagcagttagtaaatatgtatcaaggggtctggaccctactacagcctttgcctccagccagccagacagccttggtcaagtcaagaaacctccacatacattaacattgaagtggaaatgtgtgttccattcattcatctagcatttattgagcaactacagtaggtcagactgctctctggtgaaactccaaagtgaataaagcaaagtgctttgttaaggacctctcaatctagcagaggggaaaaagcacataaaggatcaataatgtatgattaagactatagtgggaaaatgtgtagaataaaatgagtgcctgaatgaaggagaaactgattcagcctgagcgatcagaaagtctaaagagaggagacaatgtgtcagctgctctttgaaggaggaacagatattggtgggctcattcctgaaggagagcccagcttgagaagggatgcagaaggaaaggcatgcagcgtttgcaccattattcctcacccactgtgggcatgaggaagggccggatgatgcttggcggtctcatccagactagagtatcaataattagcaccatttgaatgtttatgtcaaataatttgtggcccttaagacagagttggtggatgtttccttgtgttcaatacatgaaaaggctttcaaatctttaattagtgtgtcttttatttccattatttgaagatgaaaatgattcagtcaaaaaaatttcagctccaatattaagattatcttttgaggaagcatataaaaataaaaacaatgacaatatccaaccccatccaccccttccccagtagaagttgatatctggctagaatgagcattaataaataacctagagaaatacagtattgtacagttttatattttcaactttttattaaaatttttaccacaagtgaataatttttgttaaaatctaactttttgtactctgtattggatatgatttgcttgcctaattaaagtctacctgctgattatactagatttaatatattaatgtgtcttcatttctagaataagaacaaagaaaagggactatggtactacagggagagatagtatagacaatgcttacagttttattaaaacctgtggagaaatttcttggcatctaatcttccctcagcctaaggcaaaaaccatacaatgttataagtcaggtcagagctttttagttttaaatttggctgctttcctaacacataagcgtacaaaacagtatctggcacatggtaggttttcaataattgtttgccgaataaattttaaatgaagtaaggcactgggcacagtcctcaaagcacctctctgtagatactaaagggtcaggaaacagcagcagcgtgagtaccagcacaccaatatggaaacactttcaggaaatattcttagaaactcaatttataggcagtattcatttcaactgcacttcctattcctacatgaatttactactttctaaagattattcagcttgttaagagtagatacttatcttcataaagctgtgaacgacaagcaaaaaaatgattcaggatcagaggaaaggaaactaccttttctaagttgatgcttttttttcttggtttttgtgtgaacatgacattgatgcaactaatagtaataattcctgcatgtgttcttgacacatcaaccctctgaagtaaagatcacactacctatgcaacaaagtgtgattacttggatttttaacaaaggttaataggagtaatttgggggtttctccaggtttctctgcatgtagaatgggcaggcacaggaaaaggatgatgatgaaaatatacattcttgaggactgagactgcagacatgtaaagaaattgagtggttgaaagcttttagtctgtgatggtggttctctgaaaaaaagctgaattttacttaaatagcattaatataaaaatacagcttcatataatcgaaaaaggtcaataatttacttatttctttttactaacgagataatttttgaaagaataaaaggaaaaaattttttaaataacaaaatagtatttaagaagggaaaaatcagttttaatcactgcataagaaaaggattttctagttgataacgtaatgcctaaaacaagaaatgagagctccatgtagcattctttttcatttatattcctttcagtaacgaaatagaatctgttcccctaatgaaattctatttcattagaatttttgaagcacctgtcacctatcatcatcagtttgtacgtatttcaagtttttccgatgagcaaatggaataatgcagggtccatatgtccacatgtctgggaggaaagattccacgtggtttttggattacctgtctggactctttctcccatttattgcttggaatatgtcaccttctgtcaatctaattactcctctaggaaacggctgttctcagctcacagtatgacaatcgctgtcttgtgaaaatatcccagaagcctctgtagttgatggatctacctcaacagtgtcactctgacgtggaaagctgacttcagtatacaggcttgctcaagatttacttgagttctctgaggaaagagtttcttcagatacgtaaggagagaagctggtggttttaggagatctcttgccttatcttgacatacatgaataaatcttttcaaaacgtagtcagtcagctgagagacagtatatacatttaggacttccagcccctgtaaaagaatgacaattgaagtacctacattacctgaccagtgacacttgtaaaagatcagagaagctttcaaaggccaacagcagagattttgattttgctagaaaagggcccgaaggaataatgcttatttatccatttagtcagccctttcgttcatatcgactattcattactgtgataaagacagacttggctgaatctaacagaaattcttttgttatcattaaacagctgtagatttttaatataataaagataaaactgctcttatagttccacattcacactatgatattcaagtttgtgccatcacttccattttcagagctttataattccaccataatcatttgttcttggcagaaatgtgttatacaagcactcagctgaggataatatttttgaacatttttttcaatgttctttctggttatgtgattatgggaatttggaactcaatattaatttgctcttcagctttgtgtttgtatatctcaaaatgctcttttttaaataacacaatttaacttgaatcattacttagattcgggtgatattcatagcaagataatgcagtcagatacaagaagaatgtattgggagaaaatgagccacatttttccttctcatcactgccatttcctttgtgactccatgccacctgccttgtttgtttaatagtttatataattcttcaggtacaaagtgagccactgacctaattggtttttttcattcataaactgatgtgttttattgaccaatatgcattccaactcttgactaaaatttgacatctaagaaaatcaatattttagctctattttcatacttgaaattttccctcagcctaattttttaaaatttctacttctttttttttttttttttttttttgagatggagtctcactctgttgcccaggctgaagtgcagtggtgtgatctcggctcactgcaatctctggctcccgggttcaagtgattttcctgtgtcagcctcccaagtagctgcaattacaggcgtgcgccaccatgcctggcttattttttgtatttttggtagagacaggtttcaccatgctggccaggcttggctcaaactcctgacctcgtgatcggcctgcctcggcctcccaaagtgctgggattacaggcgagagccaccacgcctggacaatttctacttcatttatttcagtgtccagtgtactaactatagttacatatgagtgagagagatctagtctgcactcatcacttcacacgggtgggaaaacgggcaggggaaagtcaggccccacactgtctccaggcaggaggcaaatactcgttgactgaccttggaccatcatgcttggccatatgggtttgagacctggcataggtttacctaatctcttcatggaagacttgtgagagataatgggttaatatttgtggagatctttcaacaaagtgtaattgatgtttgaatttttataaaccaaacacaatatctaccccctgaaagctttgtgagaatatttagcacacatgtatgtgccagatggattgtaatgacagttgataggcctctcctcacccttgcattctgttgtcagaaatctgcatatcaaaacaactataatttttacaataagatttattggttaaaagatttgggtgcacactgaaaaatctactgcctggataagactataaattaacattatggaaggctttaaattaaaggtttatataagaaaattattggcagggtgccatggctcatgcctgtaatcccagcattttgggaagctgaggcaggagcatcccttgagtctaggagttcaagagcagcctggacaacataatgagaccctgattctacaaaaataatttttaaccaggtgtggtggcacacacctgtagtaccaactgcccaggaggctgagttggaaggattgtctgggcctacaatgtggaggctgcagtaagctatgaccacgccacactgcattccagcctgggcaacagagcaagactctgactcaaaaaaaaaaaaaagaaagaaagaatatttttaacatgtcttatagataacttttgaaaaatatcaaataatattttcttgatctgacatatttttctctatacaaatgaattctaatgaaaaatatgtggaatataatgcaaaaacaatcagaaagtattcttaaaagctcaaagatatgcagagatcaaagcagaaacacatcataatacaatagttatcagccagaagaatgtttttgtggttgagataataagaaaagagtatgaagcacaggaagttaagttagtaaataaaattattattctaatgtattgtgatgttctttatagtattactgtagaaagtctctaaaagtacttgttatgagtgaaaaatgatgcctgtagatccaagataaggggacaggtggccccaccaattataaattccccaagattgtaaatgtatattttatcatgctgtgtcaaaatattcattttaatattcaaacattttaccacataataagctgtaaccatatgtttatttgttatattataccactataacattaataaatatttacagagccactgtgtatcccagatatattagaaatcatagctttcttgattttttattttaagtgaaaatattcagtgcctcagaaactaattttaaataatgttacatttgttacacattgataagagccaaggagtttagatttttaagactgacacccccctttttaactcatgttgttttatttattttccccaattgcatgaattaaagatggggtgttatctcagctttgaattccttagcttgatgtcacagcttttgctttatttgtatgtgaattctgtctttaataaagatgagctctgctgaactttccattaatgagagacacttaggtatgcatctctttataacggatcttggtggtaccaggaaaattcagaaatgttgctagtctattaataattaacatgacaaactatgattaatcagaagttttatgatctctaaaaacataacattatctctgtaaatcgaattgtatacaattaagttgacaaccgttagtaaaaaaaaataataataataaagcaggccaggttgtggtggctcagcctgtaatcccagcactttgggaggctgaggcaggcagatcacatgaggcaaggaatttgagaccaacctggccaacatggagaaacccattccctactaaatatacagaaattagctgggcatggtgatgtacccagccactcaggaggctgaggcaggagaatcacttgaacccagaaggcagaggttgtagtgagccaagatcactccactatactccagcctgggcgacagagcaaaatcctgtctcaaatttaaaaaaccaagtaaaactcaagactcctaacttatactttttctgttacaatgttacattagtatttattcttctgtgacagctgagactagaccagacccacatccaggagacaggaggttcaagatgaggcactgactttttactttcatgtgtcagtctcagggtgattcctactcagctgaaaaactaggaggaacccttgctagtttggtagttattgacttggttacctgttttcagtgttcttcgtcttccttactcagctcagctgttttcacttttctttccacctgtgtttaggaagagaccttctcagtattataaattttgataagattttcacatatatagaaccctaacaaacaaaagtagttctccatataagcacagcgtctgagcattcttcaccgatgcttggtggggatattagctgtgttctcttacaccctttagctgtcaagtacatcagaagtggaggctgtggggacaggacaccactaatgccaaccattagtttaaattcacacttggatctgtttccaacatttctgcttttgtcatcatcacaggttcggaaatcattgtgtaatgtcctgatttctgatttttctgtgggaagagagtgttgcaatttgccaccttaattgtattctgctgtaattgtctctcactagatatttgaagcacgtaagaattctgtatcatgaaacttgagtccttataccctctgttcattgactgaatttagttgcaagaggaatctttcgcttttatttttttaaactgctgatgagcactcgattgaaatgactcagctttcatctgtggtttctcttccctaatagaataaagcatatgtaataacctgaaatactggacagcttgaacttctttaatgcccctgaatgtctcttacagcctttgtctaggtttgaactttccaaattatgtatttcagacgttgagaaagaagggccttaatggctgtgacagcccagaccccgatgcggacgattccgtaggtcacagccctgagtctgaggacaagtacaggaaaattaacgaagatattgatctaatgatcagcaggcaaagattgtgtgtaagtactcagaacacccttcattttttttactcttgatatttctctgaacctggcaggcattgaacaagaaagaaaacaaaggctgtgaaagccccgatcccgactcctcttatgcactcaccccacgcactgaagaaaaatacaaaaaaattaatgaagaatttgataatatgatcaagagtcataaaattcctgtaagtaccaaaggtagatggctggtctgctgataactgctgcagtaacataccttaaccctctcagtgatggctttctctaagactcttcggaaagtcaaacagataaatagccatctcatcccacgggcagctcatttagaaagcaaaccctaaaggatgctgagattatgtaatctaacagagttgccatcgaaaagttcattctgaggtagaacagttcacagcaggaagagaaagatttatgagacacaccgtaaatttacacaatcttttaaacacacagtccatgcaaatcacaatacatgagtaaaacactggaacctccttccaagcaagtttgagaattgctataaaatacatagattatacattgtttgctaagagcagatactcaagtgggtcagcaattctttcatgtaaactgacaatcatcacctaaataaaagctgatttctgaataaaacttcagcccctctccctatacatgaaattcaacaacagcactgaagggttaaagctaatgctcgctgcagggaacagactgcatgaaacctaatggtaagatttcaacatgtttgtgtgctggggtgattttaaagctttatcagaatattatccgctttgccaccaacattttccatgctttaacatttggctaatttttgttttaaccaaatgaaaaaaattctaacagtcaatcatatgccttgccagatatttaagagaaataactgcatgtattattttgttgtccacatatataggaggaaagtacatactttttattagattctgtcatcaatcaaataatgttaattttgtggcttaaaggggtgaaacccaaggctcacataccttctaaataactaatgttagtgtctgaaccttaattgtatacaagctcctcagtaggcaatcagttccttttgaaaaaagttcattttttgtaagttagcaaaacagcctaaacctgagaaatgagagagactgaagtgaaaatatgttttggtgattacaagtgcagatatgtggggacaaagttcgaggccaaattcacaactgcactcacaagataaattaatactttaccatagtagctgcacactcaaacctgaattgaattaaattgaacactttaaaacttatttacaaaatgtgtgcatattaaaatttctatccttataaatacctatctgcttcttttgttaaatgaaatgtcagcagtagaacttttgttgaatcagaattattaatacactgtatcatgaaggaaagctaagtgctgtaaattcttaagggtttcataaaactgactattatatgcgcacattcatagtgggcactttatgaaatggagtatttagtattatatgtagccatgcatacttgttatgtccagaattattaaataataaaatatccattggtattttattttgcctagaagaaaaaaagaagcggctcatttgggccaatttttatttttatttatttatttttatttttgagacggagtttcactcttgttgcccaggctggagtgcaatggcacgatctccactcaccgcaacctctgcttcccaggttcaagcaattctcctgcctcagcctcccgaatagctaggattacaagcatgtgccaccactcccggctaattttgtatttttagcagagatggaatttctccatgttggtcaggctggtctcaaactcctgaccttaggtgatccacccgcctgggcctcccaaggtgctgggattacaggcgtgagccactgcgccacgccatttgggccaatttttagttcttatgatctgagtttatcttgctatataatacattggtgtggagcagctgtgcattaaggtttgtaagtgtaggatgttaaggcggagtaccttaggtgtgtcagatagtaagaatcccctgcacagttggaataaagacagatgtatgcagtactgctgatcactcaatggaagcgatcatataggtggagttttaacccctaaagttctggaagaatgcacattggatcttgtttctcatactttagggagagagacatgtaatacacacctgtattccctcacaggatttcagcctgttacgtaaagagttcaagatcaagatacgtgatttcttaaggggtgcagtggtgtgtggtaggggctgaaaaaccacattagagtttacgggcagagctgtgagaaggagccacccagctccgagctatgccacagagtctccatctctttagtaagtgcttcagtcttcacgatgaaaagcccagtttttgcacatcgctctgagttgctggaagtcaattttgttgaaagtttccacagctgctaaaacatttacagcagggcaaggacactctgccctttgtatgtagagagtgtctccacctctttaaaaacattacaagactgtttttctatttcgaagacccagtttgaagagtttcccttttaaaacagaaaatttaatattgcagtcacctgttagcatattgtaatttatgcccatattcctcaattacataaaataattcatgggtgatttggaactgtgtcgagcagcatttcctcatgctgggttcgccatggttcatgctgggcttcacagcaagagaaaacacctccgtctgaggaaccagcagaagttaggaaaggggctgaatgaatgagaggcgggtgcaagttggttgagagtaaaagggaagggaggaagtggaaagaaacagtatgtattttcttcaaaataatgggctgtgaagagagagaaataatgttgtatgtaggatcaagggaggagttaaaatgaaagcgcttgagattatttacatgcagaggagaagtgcttggaggaaggaaaagattgaacatacaggtacaatggagatagaatggcaaagcctctcaaggaagggaaggaggatgggacctaaacaagaaggtgttacagatggagccaggtgtagctaaggtggtagctgggtagaattacgctgagtaggtgaccatataatgacctctattttattttatttttattttttattttttgagacggggtctcaccccgtgcctcaggatggagtgcaacggcgtgatcctggctcccctcaacctccgcctcccatgttcaagtgattctcctgccttagcctcccaagtagctgggactacaggtgcctgccaccaggtctggctagtttttgtatttttagtagagatggagtttcaccatgttggccaggctgttctggaactcctgacctcaagtgatccgcccgtctcggcctcccaaagtgctggtatcacaggtgtgagcctccatgcctggctattttgttttttaatgtatttagtttagcttctgtagttaattagggaagggggaagcaggtgattgaaaaaggaccgagaagttagacatcatgaggaataggagttggagagggaatgaacaagtccatgatagacttgtcaggcagccttgagggaatttagataaccagcattggtactcacaagtcatcagagttgtatgattttttttttcctctactacagcccagcagctggtaatggttaatcaaaatttaaaggtgtcattagtggcaaaaaaagggtggggggaagattcagttcaatcactcacattaaataaaagagggcccattaactaaaaatattttactttaactattttatttgatttttttattggacttttccttgtggtaagtttgggaaaatagtgggttttggatgagagttcagatacttttctgattatgactcactacagtaaccgtgatcactttgttcagggatagaaactaaaagttttttagctgtcatgtctgtgtccttcaaagctgggaccggcttcatgggccctcgacttggccctgttctcatagggctgcacttggttaaatactctgctgtcattgtcttgaagttcttaatacttttttaaaaagggcccccacattttcattttgcactgggccctgcaaattacatagccagttctgctgacagcatttcatttaatcaccccaaattctctctttcttcctatcttgagtgtttgtaaaaggtggagcctggccctgaagtctttgcaagtttggtgtttttaactactttttggctttcattttttagacaaaaaaaaaaattgtttaaatgtagatgctttcaagtttcctaattttgaaaagtcaaggagaaaaagaataatgccaatttcttagaaatatttatatgtgattatagcatttgcattccctaaaatgtttagagcagcttcatctcttcatagatacaaccatttcatgccttagataagaaaatcaaggtcaagggagattaaatgacctgcctggttagatggcaatttattacataacctggactgtaactgagattcctgatagaaaggctagtgtttattctgattctctaaaatatcttctcagtgtgctcatttttaagcttataatttgctttcaaaattattatagatagttcctttaactcagaaacagaaaatctaataccgtatgttctcacttagaagtgggagctaaacaatgggtacacatggacataaagatggaaataatagacactggggactccaaaaggggggaaggtagcagggcggggtgaagtttgaaaaattagctcttaggtacaatgttcactatttgggtaatgggtacactagaaatccagtccccaccagtatgcaatatatccatgtaacaaacatgcacatgtatctaaaataaaattaaattttaaaaaattattataggtagttcttgatacaggtaaagcaaaagattaatagaatacaaatgatcttggtatattttatgaattttgaaattttcaactatactctgataccataattatatttgactgcttagccaatcacaaagtagttttataataatcattatcatccagttgtttctgatccagaattctagaagctgaagaattaattcttggggataatagtcagaggaaggaaggagtagaatgactttcactgacctgcttgtttggatggttctgaactcattacataattattaataatcctctttattttggatgtgcatataatcacccaagggtgaggggatatgggctttgctctctaatgagacacaaccaacattctatagcatattcagggaagatatagttttatagcagatccttagatacctattaacagttaaacatttataagtagtaacagtgaattcaaattaaaacatttgtagcccagagatggctttaaatacaaactctaagcaaatatggaaaaggggagtctttaagatttattttttcctaaaacctgagacactccagtgtagatactcacccacatttcatgagaacccatttagtttattatttacatggtccaaagataataaactgctaatatctagcccttattcacttaacagaatgatttctgactacagtattttatttctatccaaaaacttatactgtgttgcatagtgtttggtagcaaaagcaacagactcagtcactagttagatgactttgggtcacttacttaacttaccaatttgaaaaggaaagaattatatctatggtcaagggatgtttaaaaggttaaatcatatcatgtatgtcaactatacagcacagtgcctgctcaataagtaatatacagtaaatagaagctttacttttgtgtcagtagagtgtcttcctaaaaattctcctttgaagaaaaatattaagttcgtataataagaagtagagtaggctctgcattgcctcacagcaaaagggcactatttaaccaacatcataaatgattttataaccaaggagaaagaagagcaggagaaagagatcaggatatgggcaaggggcaggacaaattgcaggattaaatagggtggtcagcgtgggcttccaagagaaggccagattttgagcagagacttgaaggaggtgatgcagttcgtcatggaaatgaggcagggaggcagaaggtgttaggcgatgagataacggaggttggcaaaagctagagcttaatagggcctgtggacccttggaagaaaaaaattctcatcttgagtttttattctaagatgagagccctcacagggttttgagcagaggagtgttggcatgacttaagcttttaaagggtcaatctaatttctggtttgaaaatataaaggatggcaaggaccggagcaggtaaatctgttaggacgtgactgcagttatctaggcaagagatggcactgcttgagccagtgtaatagtcacaccctccagtcattttgatacccaaagatagtccaacagatttccaaaatgctccctaaggagacagtcccacccctgtagagtaccagtgttctagatctagagagttactattatggcccaaggttgcagcaggaaacagatggcaaactctaaagggtaattgaagacagtttgttaaaaggactgtttacagatgggtagagttaaggaaaacctgagagaataatgaagtacattagggcttgcaacctagaagctgttcctatctctagatctgaaagagtaagtggaggggaaaagtaccagatcacagcaagatctatgtgtataggagagaacaactcaaaaagagatggggtcttcgctagagaaacgcagcctcagccagcctgtggcccagcaaggatgatgccactataaaaaaataccctgactttgctcccctcctgctctctgtgctgttgctggtgcctcccccactgaccagtgggaagccagagggcaggagagcctggttgatgcagtctggagggtcagctcctgggcacacagtacagtgaaggggctagagggtgggtctggatggagcaagtggagaatatacctagtagaatcactttactttgttttcttgggtatgctagagcaatccttatttggccttttaatgaagaaatacaatattttattcatgctatagacttcgactttacagcatatgctgattttttgttgttaaaagggggctggacatgtaaggctaaattcattatttgatgtcttatcaaacatttatattccattatgtcatgatgtctatccaaaaattatttcccctgtttactgtagataaatcctaataaagactgaccatattacttatatcacttgaacatttttatttccctctaaaacaatgacagattgggccagatgtggtagctcacacctataatcccagtactttgggaggccgaggtgggcggatcacctgcgctcaggagttcaagaccagcctgggcaacatggcaaaaccccatctctactaaaaatacaaaaaaatagctgggcgtggtggcacatgccaaccactacttgggaggcagaggcagcagaatcacttgaaccagataggcagaggttgcagtgagcagagatggcaccactgcactccagcctaagcaacagagtgagactgtgtctaaaaataataatataataataaaagtaaatatgaaataaaatacaaatgaaaaatcaaagatgtgtgaaagaaaagagttttgaatgtaaagcatttgctgttgtcaagattgacatgtccagaacatggaagaaaagaaaaatgggaaattaataataagggagcataaacataaacaaagaaaagtattgtgatcatcaccaagataaacagagaaatattacacagaaagatgtatgatgcaggccagccaaccaaacagtaacagaaagtggatgtcagcactaagggcaaacaatagtaaaaacaaaatgggaccaaaaaaaacaaccaactgagcctcaagcacatatgcatttaaatttgcacaataacttattgagaacccccaagggaatgccttaatgccttctataaatcctattccatatatatgtccattttatattaagaatgccatatgctttgataccatatgagttctctggcattatattcaaagagtatttttactcgtaatgcttaaaaaaaagtagctacaattatgttcctatgttcatctagttagtacagcagaaacataaacatgattttgcttaaattgacaaaataattactcaaaaatcaatcattgaaacctggattaatctaattagacatccacacagcttcagttcactaaatatttgccaactttcacaattgagatacaggtcttgccatttgtcagtggcggtacacaccaaaatatgaagcatagtgttttctgaattaccacttcaaaatgtgaattattgaatgatacatgctctgttgaatcttgtatgttaaaatgcctattatctttagagttacttttaaaacatagactttaaaaaatgataattaaggtatatgtgctatgcacatgcttggagatgattttctatcattaaacttctacataaatatgcttcaataagcaattaaatcaaaggcttcggtttgcattttaatcctttttctctgtgaagtcatcacaatcaggcacctttgatcttgcagtcatttctggcaccagattcagatatcacaaatgaacaattactacttaatagaatggaatccaaagacaatggagtctaatgaaatggggctttgttttaaacaaaagtgaaacgttttttaatggttgcaaagaaggagttctaagcacatttaagaaatcaatttatgatctgaacgtcttgagggctcttcttaatggtcttctagacacaaagtagtttggaatgtagaatttttcttggaaaaataagggctgtctgtcttgaagagcttctgttattaattcttttcttttacctttgttttgttttctgttcctgcaggctgttccacctcccaacttcgagatgccagtctccatcccagtgtccagccacaacagtttggtgtacagcaaccctgtcagctcactgggaaaccccaacctattgccactggctcacccttctctgcagaggaatagtatgtctcctggtgtaacacatcgacctccaagtgcaggtaacacaggtatgtcctcataaggatgtaatgctaacaaatagttggaaggaaccattttcggcaaagccaacactgctttatctacgagatgttttctggttttccacttactctccttcatggcttaccatccacccccgagctaggtctcctgcatgatagagcctaaattctttagtatgtttttcgaaatctttcataatctgccgtttatctttttcattctgtcacctatctcctcctgtggctatattttaaccacatactctcaaacaggatgtcagatatcctttctccacacttttacttctgctcgtcctccctgcctaaaatgccattttccctcttcctcctggccaagctaccacttctgtgaaaccttcccctgtgttctgtgatagtatttatcccatttagttatttattatttgggtcaatttttttttatttatacagtaacttatcccacaaaggacttaggcagaaaggaaatatgataagatagcatcatttgtaagacatgtgaaataaaaacaaagctgaatcagaaatgaagttaattaaacacatgtacacctgccacaaatttgtctctgcacttttacttgctgttgttcaattcacagtgtccaagagaaaaataaattatttctcagaaaaagttcatccattcttagtacttagaacaatcaaaatacattatgatgaattgtatttaatatatgtctattttgatactggatttaaagaacatttaagggaagaatgttctcttgatttgctaaactaacagtaggaaccaagtcaatgcgtattgaatataacaaaattattcctttatgtttccagaagcagcatcaaaaataattgtatttctaagtcacatacagcaaaccattatatatttgcatttcatatttttaaaagtactctataggaaatttttaatgtatcctacatacacatagctgtatgaaaatagtttattcatggaggaattttcctgtagaatacttatatatctgccttacaattaaaaccaaacatgtattactatttttgttacagaagctttatatagaaaatacaattaaattcatccaaataaaaaattttaatcttgagtctgggaaatgtatacaaaggacttcattgagccattctcttgacttttgaatatatttgaaaattttcgtatgaattttcagtaaccacatgtattcctttcagatcatactagaatgcagttcactttcctatttgataaactcatgctcatttttttgaatttgatacggtatttccaaaatattatctgattggaaataataaacatttgcttaaactgtaacgaaggccagatgcagtgggtcacgcctgtaatctcaacactttaggaggctgaggtgggaggattgcttgagcccaggaattcaagaccagcctgggcaacatagagaaaccccatctctacaaacattttttttttaaattaactaggtacagtggcttgtgtatgtgttcccggctactcgagaggctggggtgggaggaccacttgagcctgggaggttgaggctgcagtgagccatattactgccactatactccagcctgggcaacagagcaagctctgtctcaaaaaaaaaaaaaaatcgtgtatatatatgtatatatataaacaaacattttcttttaattccaaaacctgaaccaactaataattacagagtatcacttagaggcaattagaaaatctagatgatattctcactattattcttttggctgaatgttgtttttttcaaaactaaaagtaatttttttttttttgagacggagtctcgctgtgttgcccaggctggagtgcagtggcaccatctcggctcactgcaagctctgcctcccaggttcacgccattctcctgcctcagcctcccgagtagctgggaccacaggcacccgccaccacgcccggctaattttttgtatttttagtagagacagggtttcaccgtgttagccaggatggtctctatctcctgacctcgtgatccgcccacctgggcctcccaaagtgctgggattacaggcatgagccaccgcgccaggcccaaaactaaaagtaatttttatgttcaataccttattgaaacatcttgactctcataaataaacattgccaaattttaacatactgtctaaagttagcaatgaataagcatatgtttcttaatctgtggccggtgaaaaatttgttatattgtgtcagtcaataagattttagtagtaaatgtgggtagattcatgaaacgatcaaatttctggacaattaacattgcacaaaattaatggcataaaacatatttacaaagaactaaacatcaaatgtgaggtcatctgagcatatagtagaccttactctttctttcactttctataaaacatctgcttagggaaaacctagacttagaaataataaaaatgcagagaccaaagactggatttttttaaatgtaactttcttagaaaaaagattctgcaaaatgtcagtgattgaatgtatttttaacgtttgagcacagcatggcacaataaaacaaatgtcagccatctgacttgggttgtactttacaagtttatgactattgcaagaggacaaaatactgaggttgctgaaggtaaagtgttttgttctgtgggcctttagcctttctcgttttgatcttcctctttaatccataggtggtctgatgggtggagacctcacgtctggtgcaggcaccagtgcaggtaagcccagactccatactgcagtatgtatcattgttctgagttcttctactaggtgatttgcaggacaaagtcttttgaacaaataaagttaagagatctgtgagaggcatggaaaaatgacaccaagaatttttaaagcacttttctgaagcaggagtggttaaatagtaacttagaagaaaactatttattaactagaaccttccttaataaagcttcaactggtcagcagagaattaagggctctgatccaatcaacttaatcctggataccatccttggacacaagagtacctttagcaaaccatactttttgtgttctctgttaatcatttcacattaaatatgaatcattttccagccaaagaagtattgaacttctatgcatttctaaagaagagtacataaagaaaaggaggggttaagattttaattattcaacaatactgttaataaaataaaatcacattggcattaaaatgagctcttagacaacatgaatataatgcatccccaaaagaccctaaaatatatttcagctaagaacttcttacactgtgaccaataattgtctcagtcacatttctccaggtttccgtgttaatttgtaatattgagattattgagatatcgatgtcattttcaatgcagaggcaagatagcacaatactttcaaatgccaactgcagttcactattggcataacaagtaaccatggtaatttctgcagctggaacatgctatacatttaaaatagtaggaggcaggcatgaatgacacaaggttatgtttgaaatgtcaaaaaaaatcaagtttattgaaatagacatggatagcctaattaaaatattttgccagggtcaagtagaatagcctgctaattataagaaagaagataaagaaaattggtttacaaatacatttttataaatatatctatttgagggtagagtttctctgttctgatgctggctcttcactaattcactgaataatgaagaaaaagtattagacctacacagtgattagcaaacaagatgaataacactagcttcctattttatatatcttttgaaaattaggtcgagccaaattagtgtgtaaactcacgtagtattttgctggacatggaaatgaaattttttccctcaaaaaatactttgtggtttgtagcctcaaaatgagagaaccagatcaaatccagaccaatgtttcttggatccaagtctctaccaaacactatgattagaaagaatggtgaggactgagaattgggtggtcacaaagaccaagatataatataagaaaaatggtttagatgttatgatgttttacccaatatctcactgcaccgatttgcttgccattatggaaacagctagtagtggttctgaaagtcattaaaagtagtaaaaaagggccgggcggcggtggctcacgcctgtaatcccagcactttgggagcccgaggcgggcggatcacgaggtcaggagatcgagaccatcccggctaaaacggtgaaaccccgtctctactaaaaatacaaaaaaattagccgggcgtagtggcgggcgccgtagtcccagctacttgggaggctgaggcaggagaatggcgtgaaacccgggaggacagaagccttgcacagtagagcccgaagatccctgccactgcactccagcctgggcgacagagcgagactccgtctcaaaaaaaaaaaaaaaaaaaaaaaaaaaaaaaaagtagtaaaaaaaaaaaaaatgtggaggaaaacatggcctactcagctttgatggaagtggcttgttactgcttaatagctagaatgctttggaatcctatattgaaaataaaaagtgtttggttgttcaattattctgtcattgtcaattcccagacagttggctaagtttaatgatcctctagggatagagaagactctcaatcctgtaggcataaaagtttgacacacgtaggatatagtaacattgaactaacaaaatcttatgcacttagcaaattcatcctcttacctcaggacctctaccataggtatgagaatcttctaattcagaaatagaagaaaaccaaaagaaagatactgaattactccaccctggtgataataaatattatatcttgattgcatattatagctacgagcatgtagttttcacagtttctatatagctgtgaaagtgttacccatattttaaaaatagaggaagaagccctttctaactctggtcccaaggaacacctgttgcagatgccacttagtctcaagcttagctgtcatgtcctactcataaactcagccatcttccccttctttctcatgccaaccagtatcatatgtcaggctgaatatatccgtgctgatgtcagagaatcacataacaccagaggaaaacaaggccagccagaatgttgctacattttcagagaagaaaaccaaagcaaaaaggccaaaatatagcttccaaattttgcatattgtcattgaaattcaaggtttcagataaagtttgaaactcttgaggccaagtggcgagactgcaattacgttactttttagcagctgcagtttttttctgaatcaagtcatctcactttgtaaaaaaaaaaaaaagtgagagggagggagagtctcatgaggcaaggaagtaaattgaacatttattttgtgcctataaatactaaaagaccaaaaaggtaagcatgctttttttcagctcagttttatcataaagtgtagcatctttcccatccagtgcctgagccatccttttctcatcataccatcatccagtaagtttctagaacatcctaattcatctccctgctttatattgcatcctgcttcagtctccccaggactgcttgttctttcttaaaaccttaagctaactgtaggtcatcattcacatgccaaaaatccagccatggcttctctttcaaaattaacagtgaatatcttatccctaggcccattcctactctccagccttaaccttcttcccttctgccactgctatcaagaacccggccctccagctctactaacagtagacatctaaactgctcttactgtgcactctacaaaaagcatcattctcataatagtcgtttaaattaagtgttcacattatgccctttctacagattaggaaactgaggcacagggaaattaagtaattgcacaaggaagagcccaggtagtcaggtcccatactgtgtgtttgtatgtgtgtgttttgagacagtgtcttgctctgtcacccaggttggagtgcagtggcacgatctaggctcactgcagcctcaatctcctggtctcaagcagtccacctccctcagcctactgagtagctgggaccacaggcatgcaccaccatgcctggctaattttttaattttttttccttatagagatggggtcttgctatggttttcaggctggtcttgaactcctggattcaagcaatcctctctccttggcttcccaaagtgctaggattacaggcgtgagcctctgcacccggcctcagtgtgtgctcttaattgctacactgtgccgccacttggcaatgtcacggccgcttactcttacctatgcaatcctagcatgcctttccttcttctgcttcatgctattgagcactctttgtcatcccacagaattcagttcagccatttgagaaaagcctttcctgactctaacagacaagttatgcacctctttcctgtgcttacatagtagcctgtaccaacattacatttctcattgcattatgattgcaacatctgggcacatctctctaggacgctcagctctgtggaggcaaactctttctcattcagtttgtatgcccagtttaacacctaagcgttagcacacagcagatacttggtaaatgtttgttagctgagtaagggaaaaatagatcttctagccatgaagttttaatagtgttgatgtaaaccagaaggaacatttcaaataaattatgtaattttcaataaaaaaagatatacccttgatctgtaactcacaaaaataatgtattcttctgaaacagtatacaacgaatgtttaattaaccatttgattaaatggctgagtaccctgggccaataaagcaaagtttcattaactcctctaatattcttaacggaaaacctgaagagctgacatatagtagtaaatgaaatgtgggttggtatctcagaccatcacaaatcacctcttaatacaacttcttatcatcacttaacttgaaatactttcaaagatgaagacaaagggtaataaagaagtagcaggatggagttgtactcttggtataagagaaatatacagcaagtcattataatacattagttagtaacagtgacttttctaaggtttcagttgatggttattcatccactacttaattctttcctcttaacaacctaaatgaaaagtcactgcttttaaaataacattttgtcataactctataaaacttttttttttgagacggagtcttgttctgtcacccaggctggagtgcagtggtgtgatctcaggtcactgcaacctccgcctcctgggttcaagcaactctcctgcctcagcctcctgagtagctgggactacaggtgcacgctgccatgcccagctaatattctgtattttagtagagatggggtttcacccgttgtccaggctggtcacaaactcctgagctcaggcaatccgcccacctcggcctcccaaagtgctgggattacaggcgtgagccaccatgcctgaccacattaaagcttttaacatgctaatctgagtggttattgatgatggtaagatcaagttcggttgttttgtagtcattagatttaatggaaataaccattagcagagcaatgccttgtgttggattattcactatcccgttagtatcctttgttttcactttgataatacgattgccttttattgagtagaaaggaccagtatgctcaaggagttattgattcatagttgagatcaaaaaaagagaaaaaagaaatgaaaaacctttaggaattcctttgaacatttaagataattttacaatctacatagctatttgacagtaaggcaaaggagatttatgtatattggttaataattttaattggcatttattgtaaattagatataattttataaaaaagaaactaacatctgttttcttattttgaatgttaattgttgactattttatgcatttggttatcaagcattgtcacttctggaatgcttaatttatgtcagctaaatacatggagagttgatggtggcagtgtactgccgtggataaatattgagcagtgaataagagatctggtttccagactctggaaagactccatctagcaagaccttaggtcatgactcagcacctttgaacttagtacttactcagattggagataagaaacaaatatttttacaatccatttacacgcaatgttttatgataatataatcataaaattttgcttatgtttttgtaattcatctagcattgaaaaagaaaaaacttagcatattacaaaatagaactaagtggaaagaggaaaggtcagacaatgcttaatttttctgtaccagcaccattgttttgcaagtatttgttttcaagaatacttatcaaaaatttcttggctgactttcttattggccagaaagacttctctgcaattcttacttagtgacttaaaatatcagtgaagtggttaaaaatttagtttaaaaagttggctttaacaagtttgcattttttgttgcccaggaaaacataacttaagattgcaatattcaagaaagggagaaagatacttaattaccctcaaataagaaaactaattgttagtataaagatataatttttatattatttttaaaatattattaagcagcaaatgaaaaaaatctaggttaatagttgggttctgttttgaaagtattgttccattagtttgaattgttctgaattaaaaattctgaattcattagcagttttaccttgggagttcacccaaaacataagtaaataactaacggcattgctttattattattatttatgaaattaagtaacaatgatatttttaacccaaaccaagtttatcaagattaaagaaaaaaaaaaacctagtcctcaaattagatagctacagcatgtggtatgcagctactgccaagaaaatcagtgttcactttccatatacaaaaccaagcaaattatagataaaccattaccttgataccattctctaggggctcatgttgaagtgggaaaggcaggtcaaagacaagacaaatgaaaaatgttacaggttaagtcaggatgttgtaaaatatgccttcgacccctttggtttgacttcattcttaaggagtttgatttccagaggaaaaaaagaaaattttaggttataacttcctagagagtgttttagcagattttagagccctttgtttatcctgatttctgacttcacaaattgtatcctttttattctctatccttctatatctacagtaaagtactgtgaagattggtttctttactcatatcccattgatttaacctaatagtgtgaaggataagaaaaccttggttgtttttaatattaaattcaagccgttaatatttccccctgaaatactagttttattcagaatttgtctttttttctcaaagcagtcttttctctttatacacctattaggttcctcttccctatctttggcatcatgataagattttatttggagataacacagaaaggaaagcttttttcataatcatcagtgatgtgacattgtgcatcagtagagagcagatgctgaaggggggatttggttaaaaaccccctcttttggaaatcagttttttacttaccagggactttctcactcggtgcttcaaggctgtcagccaagagtataatctgctgtttttagacaaacctttgccaatcacttaaattttgcagttacacttacatagtatgtttcagttgaatttcaatccaaagaatatttagtcatgatacagtatcatatttgaaagatcattagctatgttaaacttaagtattataccaagaaccttggataaacagtttaaatttataaccaactgatacgtccaaaaggtgctaagtgttcactgtgtttatttattattgctccatttcaattgttttaactgaactcaaatttaagtttatctattttactagacattatgccttctttttacaatttcttgaccttagagtccacccaccacctccagttattataaagaaccgattatgttgtatttaaagtataaggaggaaaaagccctgctatactaatatagaacattataatatagtagtaagagaaaactaaatctatggccagtttacatattcaaacattataacattaatttacataacaatcaagaaaactgaatctttagttggctctaatattaagcaactcagtgaaaaccgtaaaaccatggaccaaaatttttgcccaaggagtagtttgggaaaagattccagaggcagatattcaaaaaaataaaacaaccaaggaaagtatgtgatatacaaattattttagggatggcactattgcccttgaaaagtctgttaaactcctctttttccggattgttgtaaaaattaaatgagataactgatgcaaggggtctagcacagtttctgccccagagtaagtgcttgttaataaatgtgagctatggttataatcatctacattcttgattttctagcctttctggttataatgtttagcttaatgcagttccagtagtatttatgaaatgtgtggtgaagggagcacaccagtaggcttcacagagatgtccagcacggggctcctatcctcaagggtggaagtaaagcggatgtattaataaatctgaagcagaatgtgagagcagtacagtacagtgcaacacatttcactttgaacgttatgaacttctgatgtgttcgcagcagttgtgtaaatgttaaaaccacaagtaattattctttctcttctgtcatgctctctctaatttatactgtctcaatatttttgtttataaaaatgactgaaagaatgagcgattgtgtcaataatgaagacaccccctcatttttagcaaagagacagccccaaaatctcaagaagtgaacaattaaatgagtcataaatctatcattcatagttaaatggaattttttaaagatagtgtggttcaatagcatttttatggtgcaattaaaaactatcccttcagtaaatcagtacccaaaggagaatgatatttgggttttttttttttttgtactggagacatcagattgtcaatttcttccttatttgcaaatacaaggatgcatgctaaatctcagacatctggcttttgtaatgtagtggtagcaacctgcattttggattcaaatcaaagcctcttccttgctgacagggtgatctcagtcaagtaacggaagcttcttaagcctcagtttcctcatctgtcaaaagctgggatggtgatgcctaaatccgcatgacagttaggacaaatgagaaaatgttcgccaacacaaacctacttgatggactctcaatctttggaaaaacaacttagtaataagtaaaatttctttacctctccctcacaatccagagcttacacagtatgtgctgtacgttaaaagctcattgtctcattgacagactgttaatttcacacacacacacacacacacacacacacacacacacacgcaaaatcgctgaacaaaacacagcccaagaaacgtcaaggacaaataggctagatatgaaattcctgaagctctggtccagcatcaggtgacatggtcaaagagaagagacagctctctttttagaacgtctgatgcccctgaactggtatggccaagaataattcttggctttggtatagtcttggggtatttctctaagaatataccacaaaatgcactgaggtttcagagaagtttcttcatagtttaacattatgcattattatataatttccctaagaaacccccagaaaaagtggagcctttattttgtgtgtaagaatccctaattaggagtctttagcaagataagaatcagaaatctgatttgccccctttctacattaagcatattgaaattttcatcatacccagatttctgacccctgaatgttttgtggttgccttttctcttagagctattcaatgtaaaatatctttttttctcaaaaaaataaaaataaaaacaaaactgattttgatacacaacagctgaataactcacagttcctagcatatgtaacaaggtttcaggcattcaggctaggactgcagtctagaagatcatatttttccactaatttttttttcaactgtcacttccagtagagtaggggattgtatgagcaagtttatgatacacaatttaaagtaattttctataaaaagatgtatgttcatttgaggcacaaaacaatatcctgatattggaaactaacttttaatcttaaaactttaaaaactaaaatataaaattaattgatgatagtgagcattattatgtatgtgacatttcctgtctaacaacccagtatgctgtaactgttttcaaaattgctttattttttttttaaagtgagtaaaacattttgttgaagtaaaagcagcaaattgatacttcagaggtccagctgtgtgttcagcttaatgttttcctgtggcaatttgcttcaaatccctcaaaatcagatactattaacaaattactaaacaaaattatttttatacatttatatattagaagttatttcccgggtaacaactaatcgcagatactaaaaaatactggacatttcactgtaacattgggtgtttctgatagaagctggtctcttaaattgacagtaagtaagtaagcatcgttaccatttaagtatattacaggggagaagattattgactaaaatattacaaaatctacttttaaaagcatatttaatcatccactcaaaatagcacactaaaagttaaacagctactctggtgttcagtgtagctaaactcagtatttcctacttgtaaatatttatttatccagaaagagaccagaaatatggtttgaacatcaccattctgtgcctctttatgagaattcagtgtcttctgaaccagaactactatttactatgcccaagttgaccttacaacatgtccctcaaacttgcacatcacctctggcttaggacaaccttgactgtcctgtccctagttgtgtcctctcttcatttgtatccccataatttgcaaatgagactcgacatagaaaggctttcactatctcagagcatgactggttctgaaggagcagtgtagtgttgtacttcagggcatggactctggacatactgcttgggttcaaatcatagcttcaccagttgatagctgtttgacattgagcaaattcctggacctctcttttcttcggttttctcatttctcatttttcatagggatactattagtatcccacagggttgttcttgtgaagattaaaagtgctttatatccatgtacaatatctagcacttacatagcagttacaagtgcctggtactcttctgagcagttaatgtgtatgcttaatgttgtgttgttggtaaataatactatacactgtgttagcgattgctaatattgttggatggtaagattgtcaatgactgcctcagatgagtacctgagagcctctcattcagattactttcatgcttctctcacactagggaaatacttctattgagaaaactaaggctctgtagggttgagagaactcttaacagaaacattttgagtagaacctagattactctgccttatcttttttttgtccccaactcctggatgcctgtaaacctttctctctgcgctgcctcattcagacatcatttctcatgtattctagagcaaggcgttctaactagcttctctaacagcagtccaacccccttttgtctctcctttccactgccatcattgttcctttcctaacacaaatttaataaagctaacaactaagaagctatcttaggcactcattttctagagtataaaatttggtaaaagcttagtataaagcctacagtgtaaagttaacataatcttagaggttcatgttagccaagccttctttttcaacttcggaaaactttctgctcttcaagatccattgtttcatcttcagaggaatgcccctccttctaaactctgagatctctctgtcctgcattccttctctccgcaaagcctctctctgaaccatctgataaattcctgttcactcttaatagccaccctgccaccattcttttccctaggataccatgcagcttatcttttggtgaaaagttctgtatgagtaaattagtattgagatttaccttgatataacgacaacctgtggcaacaaatactcgtcagtgtggaagaaaatatcagagacttcaacttttcattttcattagggaaaatgtctgacttgtttaattctaccacttgcagttagctaaggtaatgtgctgtgaaatgattaacaggtgcaacaggtagaaaagacgctttaattaactctctataaacaaatttagtaggtgggcacttacatgatttcctggctttcatatatatggt

SEQ ID NO: 1382 - DNA, 2161 bp, Homo sapiens
  misc_feature (244)..(249): "n" at positions 244 and 249 can be any base.
aagatgcatggtgaaatggtgagatcagaaaggggccctgcatttgataaaaatgcaaaaaacaaaataaaaatagcatgaaagaaactagtatatacaatggatgtcagttgacccaatagattgctaatgtattaaaaacaatttagggtgttgcaatgtgatatgttctaaccccacaggttatccttttgacagctgaccttaaacttataaaatgtaagcagagtaaaagaaaacaganagaanatagttactcaaatgtgcaactgcacaaatatacccccctcccgctattaagataacaaaacttctgctattaccataatattatatatattagaaagctatacacaagcatgttaatttcacagatttttttaaaagattcttaatattttatataattagaaatacacacatttcaaaaacaaacttctacaaagagaaaacagttatcttggttagcaaagcatggagttcttcatggcttagggtagtgctttctatacacaaagtcctttttggttttttacaggactgtttaaaatattagcgacgctatcaaggaaaaaatacataatttcagggacgagagaaagaaaaggaaggaaaaaatacataatttcagggacgagagagagaagaaaaacggggactatggggagaaaaaagattcagattacgaggattatggatgaacgtaacagacaggtgacatttacaaagaggaaatttgggttgatgaagaaggcttatgagctgagcgtgctgtgtgactgtgagattgcgctgatcatcttcaacagcaccaacaagctgttccagtatgccagcaccgacatggacaaagtgcttctcaagtacacggagtacaacgagccgcatgagagccggacaaactcagacatcgtggagacgttgagaaagaagggccttaatggctgtgacagcccagaccccgatgcggacgattccgtaggtcacagccctgagtctgaggacaagtacaggaaaattaacgaagatattgatctaatgatcagcaggcaaagattgtgtgctgttccacctcccaacttcgagatgccagtctccatcccagtgtccagccacaacagtttggtgtacagcaaccctgtcagctcactgggaaaccccaacctattgccactggctcacccttctctgcagaggaatagtatgtctcctggtgtaacacatcgacctccaagtgcaggtaacacaggtggtctgatgggtggagacctcacgtctggtgcaggcaccagtgcagggaacgggtatggcaatccccgaaactcaccaggtctgctggtctcacctggtaacttgaacaagaatatgcaagcaaaatctcctcccccaatgaatttaggaatgaataaccgtaaaccagatctccgagttcttattccaccaggcagcaagaatacgatgccatcagtgaatcaaaggataaataactcccagtcggctcagtcattggctaccccagtggtttccgtagcaactcctactttaccaggacaaggaatgggaggatatccatcagccatttcaacaacatatggtaccgagtactctctgagtagtgcagacctgtcatctctgtctgggtttaacaccgccagcgctcttcaccttggttcagtaactggctggcaacagcaacacctacataacatgccaccatctgccctcagtcagttgggagcttgcactagcactcatttatctcagagttcaaatctctccctgccttctactcaaagcctcaacatcaagtcagaacctgtttctcctcctagagaccgtaccaccaccccttcgagatacccacaacacacgcgccacgaggcggggagatctcctgttgacagcttgagcagctgtagcagttcgtacgacgggagcgaccgagaggatcaccggaacgaattccactcccccattggactcaccagaccttcgccggacgaaagggaaagtccctcagtcaagcgcatgcgactttctgaaggatgggcaacatgatcagattattacttactagtttttttttttctcttgcagtgtgtgtgtgttataccttaatggggaaggggggtcgatatgcattatatgtgccgtgtgtgga

SEQ ID NO: 1383 - DNA, 1398 bp, Homo sapiens
atggggagaaaaaagattcagattacgaggattatggatgaacgtaacagacaggtgacatttacaaagaggaaatttgggttgatgaagaaggcttatgagctgagcgtgctgtgtgactgtgagattgcgctgatcatcttcaacagcaccaacaagctgttccagtatgccagcaccgacatggacaaagtgcttctcaagtacacggagtacaacgagccgcatgagagccggacaaactcagacatcgtggagacgttgagaaagaagggccttaatggctgtgacagcccagaccccgatgcggacgattccgtaggtcacagccctgagtctgaggacaagtacaggaaaattaacgaagatattgatctaatgatcagcaggcaaagattgtgtgctgttccacctcccaacttcgagatgccagtctccatcccagtgtccagccacaacagtttggtgtacagcaaccctgtcagctcactgggaaaccccaacctattgccactggctcacccttctctgcagaggaatagtatgtctcctggtgtaacacatcgacctccaagtgcaggtaacacaggtggtctgatgggtggagacctcacgtctggtgcaggcaccagtgcagggaacgggtatggcaatccccgaaactcaccaggtctgctggtctcacctggtaacttgaacaagaatatgcaagcaaaatctcctcccccaatgaatttaggaatgaataaccgtaaaccagatctccgagttcttattccaccaggcagcaagaatacgatgccatcagtgaatcaaaggataaataactcccagtcggctcagtcattggctaccccagtggtttccgtagcaactcctactttaccaggacaaggaatgggaggatatccatcagccatttcaacaacatatggtaccgagtactctctgagtagtgcagacctgtcatctctgtctgggtttaacaccgccagcgctcttcaccttggttcagtaactggctggcaacagcaacacctacataacatgccaccatctgccctcagtcagttgggagcttgcactagcactcatttatctcagagttcaaatctctccctgccttctactcaaagcctcaacatcaagtcagaacctgtttctcctcctagagaccgtaccaccaccccttcgagatacccacaacacacgcgccacgaggcggggagatctcctgttgacagcttgagcagctgtagcagttcgtacgacgggagcgaccgagaggatcaccggaacgaattccactcccccattggactcaccagaccttcgccggacgaaagggaaagtccctcagtcaagcgcatgcgactttctgaaggatgggcaacatga

SEQ ID NO: 1384 - DNA, 41637 bp, Mus musculus
  misc_feature (11290)..(11309): n = a, g, c, or t.
gatctcatcagagtccctgctgtgctgctgtctgtctgtctgtctgtctgtctatgcccttactaaatcttctaataatcatcttgccccaaaggacagcatgtctcagtgtatctttcttgagtcccaaacccatagcattttggttaggaggcaagccaaggcaatttgacttgactcatcactttcttgtggaaacagaatatctgaagagcagctgaagagatatcaggtctacttcagctcacttggtagagtctatcacagcaggaaaaccatggagactggagtagcttggttggtggtggcaggcaccttttggtacaacttgttcacatcttggtggctcaaacagaagcatttctgttctaagtgggaaaaatgttctgccagatattaacaataaaattaaaatttttttaaaaaaagggttggttaagcactcaattttaaggactcaattttgtatctttccaaacctaggtaaatatcaggtggtattggtggttcacctctaatttcggtctctaagatccccaaaacaaactgactaacaagactagcaggctgtgcatttggttgagagaccctgcctcaatgaataaggtgcaagcagcagcaaaagaagattctcaccatcagccctgtgcctccacaactatgcaagcccacacacatgcactcactgcttgtagatgtatgtaaaagtgtgcattcaagcatctaacacacatgaacacgtgcacatacaaacatcctcatgtgcgtgcacacacattcatgcaagggatgtgggaaatggagggaacagatataagatctccctcctcctacttcagactccagaatgtggatggtgcttaccagagtttccagattcctgtgactctgaacaaaattgagacgtggaaagtcgcagaataaaaacagtttatcaagaaaggatgtgtgccgaagctgggcaagactgagaagccacagcaaatgtgcaaagcattgagactggtatgtgtgagagtgatagaaacacacacacacacacacacacacacctttattcctttgagacaaggtctttcactgaatctgtatctagattggcagccagcaagtccccaaacccttcctatctgcagccctcagttctgaagttgtaagcaggtgtggccatatttgggttttccatgggtgttggttgtttgaactcaggtctgcaggctttgtagtttgcaggttttgtagtttgaatgagaatgacctccatcactcacttgcttaactatatttggccctccgttgacagaatgctttgagaaggatcaagaggtgttggcttgttggaagaggtgagccactaggggaggggtttgaagtttgaaaacattagtgccactcgcagcatgtgtctctctttgcctcttggttgtaagttctcagcgactactccagtaacatgcctatttgtgtgcttgcctgctgccatgttccccaccaaataaactctgacactctgaaactgtgggcccctggtgtttgttcttgtttgttttaaacaaaatctcaatagttagattttttaccaatgaagactccagagccagatgctggggtgaaagtctgttaggggagagagaggcagaaaaagcacttcctcttcctcagcagacatcccagaaagaatgcccttcaaactgaatgtccctcccttctacttcctgtgcacctctctattagttttcctgactctcactctctatggtttttcttaataattctatgttcactccctgacaattgattgtttgatccacatttgacctatggttgactttatttgaatctgtttataatattcgagcagaaagcccttggattaaaggtgtgtgctaagactgagccacaccacaaataataacaggtttttattattaataatgggttttttattattaataacagtaaacacacaatctcgaggttcacagtgtcattaaattaaacagtttcttttctaagttgccttgattgtggtattttgttagaggaataggaaaatgacaaacacatatatcaaattctcttactcactaacccagtggctctcaaccttcttaaagctgctgtgaccctttaggacagatcttcatgttgtggtaaccaccaaccataaaattatttttattgctacttcatagctccaattttgctaccggtataaagaataacgtaaatatctgtgctttctgatggtcttaggtgatccctctgaaagggtcattcaacccccagaggggtctccacccacaggttgcgaaccactgcactaaagcacctccccagcagcaaggatttcaggtgtctgtttcccaggattacaggcttagctcttttgcacacactgtgccgtttctcccatgctctggtacatgagggcacagaggggaagatttccagccttccacttcactagctggatggctggtttttgttgtggttggtttttttttatttaaatattattattgtcattattattgtgtatatgtgtacacatgcatcatggccaaggtttagaggtcagagcacacttgagggagtctgtttttgctggaaggcaagtgcctttacccactgagacatcttgctggaccccaactcatttctctgacatgccaggcctgctttggcctagtcacatgcttcacgccatgtgaaagtgatagcggggggaggtttttagaagtgaagccttgaaggatcctcacaaggccttacaaatgtgatgggcaggcatcatgcagtgtttggcctgcttgtcgctcttccttcaccaagtgtggacacagccttaactccctccagcagtaggaaggctccaagttctgttacacttagtttgtttgtgtatgtgcatataccacaatgcaccagtagaagtggaggttagaggacagttttaggaattggttttctctttgtgaaccccagagattagagttaggctgacaggctgggtgacagggacccatcttgctatcttggaagcagataccaagccctcagctggtacagtacacacaccagaccctcagcaggcacaggacacacaccagaccctcagcaggcacaggacacacaccagaccctcagcaggtactggacacataccaaaccctcagcaggtacaggacccacatcttcagccactcaacacctccactgtgagaatatgaagctttttataaattactcactgtctagaattgtgatgcataggtacacatggtataggaaaggaaagatagaactctgggacaaggaactgaggtgcatattttacatatcaaagcagacctggtctccaggttctcccagcatccctcagtccttacctggcataccctgccccagggccagtgatctagccccagagtggcttcccaataaacttgcttttaatataatctaatctggcttgaattggttcatttcactggtggaaaaataacctatcaattttaattttaaatttcactctcttgatttaaaacaaagcacccagggctggagagatggctcagtgattctgagcactaggtatttctccagaggacctgaatttaattcttagaaactacagggctttttgtaaccatgtgttactctagttccaggatcccaatgtcttcggctggcctccctatgtgcacctcacatacatggtgcacagacatacatgaaagcaaaataccccatacataactttttaaaaagattactttttaaatcaacaccaaaaactgaaactcaaaaggctaaacaaaccaaactctggatctgttgaaataatcacaaaggtttactcttgtgttgcacataaagaatgccagtttggtaggggcttcctatgcaattggttttgcagggcagattcaggttgtgttgttgttttcccccttcaatgaacatttatgcttgcatatacagtaggatcaagttgtatagtcttttcttaaaaagttattccccatacccaatcacacatggacaataggtcccatgcatggccaacactattgtccatgtgccttagctgcaggtgctataagcagaaggtcagagaaggctgtgtggaaatgtaggcaaagaagaggggctaggcatacatgactgaagatgcagaatctccacaaatccaggaggggctgtgtgaggagacagaggttaggaggactatcaccaatgttttctaccctctcaaaacgtgactaatgaaagctaaattccagtctgaggatgaaccctccacagtcctgggaacagcctgccctctgtggtcattttagaaggccatgaataagaagtttgcatttgagagtttgaatgaagaagatacagcaatagttcccattttccagatgcggtacaaggagctcaaatttggggatgtctcaaaagtcgacttaaaatttaaaaagcttaagttttagctttagctgccaacaggtggtctctccacacccacaagcccagttcatggccagacaacagccatagctgagtacattcagaaacacccttccattcccatgcggcagtccctcaggacttcccttctaacctcaagactcaacagtctctgctgaggccctaagtcctctttccagtacttcttcctgctctgcacactgatggcaaaagctgacaggttcatgaaggaaaaggtaaaagtaggatggcagagggactgtccctttgggccttgtctgctcactgctatagtcagtcccaggcagagctgcagaggatgaggacaaagcctcacaggcttataactttgtcatatatatgttcccaaatagatttgttctttcatccccacaggtgggcaggtgagagcccaagctctagggtctttcattttccagtgacgtatgaagtcttagtgagctacaggggtggagcagaatctaacgatgctctctgtggtcccatgagtctgatggacatccttgatctatcctaagatgcagagtgtggctgaatggatgagtcaccaaccagcagctgcagaacacacttcttatggtgatgagaaggggcacagtgtgtgctaggggatgaaattaacatatttagtgccagaggaatatggtcaaaactaaggggtgggatacagagcagaaagccttgactcccatccatgggactgtgtgccttataagggtatgccaggctctgacaaacttatgtgttctgcatgtaaagagctttattatgttgaaacaccaaagaactccaaatagattggaccagaaaaaaaattcctcctgtcacaaatgcacgaaataaagaaaaaagtattaaaagcagtaagggaaaaaggtcaagcaacatacaaaggcagacctatcagaattattacagacttctcaccagagactatgaaagccagaagatcctggacagatgttatacagaccccaagagaacacaaatgccagcccaggctactatacccagcaaaactctcacttaccataggtggagaaaccaagatattccatgacaaagccaaatttacacactatctttccacaaattcagccctataaaggataatagaaggaaaactccaacaagaggagggaatctacaccttagaaaaaacaaaaaagtaatcttctttcaacaaactcaaaagaagatagtcacacaaacataattccacctctaacaaaaataacaggaaacaacagtcactattccttaatatctcttaacatcaatgggcttaatttcccaatgaaaagacatagactaacaaactgggtatgtaaacaggacccaacattttgctgcatacaggaaatgcacctcagtgacaaagacagacactatactacctcagagtaaaaagctgcacaatgttccaagtaaatggtcccaagaaacaagctggagtagccattctaataccgaataagattggctttcaaccaaaagttatcaaaaaagataaacatattcatcaaaggaaaatataccaagatgagctctcaattctgaacatctatgctccaaatgcaagggcagccacattcataaaagaaagtttactaaagttcaaagcacacattgtacctcacacactaagttagactccagagaaccaaataatcctatcaacagagaattctcaactgaggaaacttgaatggctgagaagcacctaaagaaatgttcaacatgcttagtcattagggaaatgcaaatcaaaacaactctgagattccacctcataccagtcagaatggctaaaatcaaaatctcaggtgacaaaagatgctgataaggatgtggagaaagaggaacactcctccattgctggtgggattgcaagcttgtacaaccactcctgaaatcagtctggtggttcctcagaaaattggacatagtactacatgaggatccagctatatcactcctgggcatatacccagaagatgctccaacatacaataaggacacatgctccactatgttcatagcagccttatttataatagccagaagctggaaacaacccagatgtccctcaacagaagaatggatacagaaaatgtggtacatttacacaatgtgatactacccagctattaaaaacaatgactttaccagtaactatttttaactggtaagctgtgcctctagcccttgacattgaacttttgatcttcctgcctcaacctccccatgctaggattacagatccttgccacctgtagtggttctaatagggttggcccccatagactcatgtatttgaatgcttggcccttaggaaatgacactattaagtgagtgtatccttgttaaaatggatgtggtcttgttggaggaagtatgtcactgtggggctgggatttgaggtcctacgctcaagctctgcccagtgcagaagacagtttccttttgtctgcctttggatcaagacagaactctcagctccttttccagcaccatgtctgcctgcatgttgccatgcttcctgctatgatgaaaatggactgaacctctgaaactataacccaggcccatttaaatgtttattttttataagagttgctaggtaatggtgtcttattcctggctatagtttggtacatacggagaagactggaaagcagtaccttatgaatatactaaactacagacatatttttaattcatagattagaggattgtcaggttagttgctaatcattttctttcctgaatgagtaaataaggaaacaatttctaacacattctaactacagagtctaagctcattgttgccccagctgagggaaaagttcctccagggaactgcagcagcagtctgcagcccagccaggttggaagtttgtgccctgtggagaccttcctaaagctgtaatcccagcatgtggcgggtggaaacagaagtacctcataggaatccaatgccaacctggctgcaatatcaagtcacaggctagcttgggctacagcatgagcctcagtctcaacacatacatgcatacggacatgcatgcataaaataaaacagactctcggagccttagccagtggatctccacacgcaggcttctcatctgcaaagtttaatagttatttagccctgtgtggttgtccacacctacagtcctagatatttgaagacccagctacacctccaccaccaccaccacaggtaaacacacactttgctagcatgggtctgaaaagaaatccaggaagagctagccagcttccttctttgcagttgtattctctttacagtctgtttgaggctggtaaattcattgttttgttagacttaaaaatgtctgaaagttgccaggtgtagtgatgtatatttttaacactagcacttgggaagcaagtttcttggttcatggctatcctaggctacagagtgagttctgagaccagacaaggtggcacaaaacaaaacaaaaaaaccaccctatctaaaaacaaaagcaaaatataaaatgtctaaaagtaaaattttaaattcaccccacaacataaaatcagcagctgcttaaagcaaaagcatctagtttattaaagtacagttgtactggggagcctcctgcagggaactcacaggctcacttcccaaaatatgtgtggtgtaatgagctcatccaagggggcagggcagggcgaggcgtggtttcatgattctatttttaaagtgtttataagcacatcctttattgcctaagtcagctgacaagggagaaatgaatctcacatagcaggtagaggcaaactccgtactaatctgggtttccttagaaagtctaaagggtagcagtgcttgagtttcaatgatcagctctccaaccagttctagaatccaagaaggaggccgcccaccccacccccccacccccacccccacccccagcctccccaacagcctagtgcagactgcttttgccaattcccaggctgcttggttggtgtgggctatgctagcttgctctctgtgagaacagaaaggtcaagtcctccacaaggtgagcaacagagattcctgtaaccatcaaaggacttcaaagccacacaaagctctcacatttataaagtaattgcagacagccaggcgactttcctcaccaagtaaatctagtcttgcttgttatgtaccttaaggttctataacctgggcgccgttcctcaccccagctttctgtcctacctctgccagaagttttcttaggatatccttgaagggcgattcattttccaccgagggatcgtggaaagatcattttaagggatgcgttggacctggtgaggatgatgagcaaagtgagcagcaacttagttacaggggcactggcttcacaactcagcctaggaccccaggtctgtcgttgggatggacattagacctcttttgttctctggggtctggtaaagtacctggcctttgatgcggagcatttggaggggggagcaggataatggtgactggagttcttggaggagctttcctcctagaactgtctttgggtctcaccttcagtaaactttctaacaaaaaagcaaacccctagaatattacctggagctaagggatcctagaagtcgctctaatagtggagctgtgccatcgaacaactaattcagtagactaaagatcaaaactagttgtgcgagcagagaataccgcaggcaatttttgccaaaacttaaaagtacagtatctgaactgaatcagggcgagaccatcctggctgcttgcaagcctcccgcagcaactgggagagctggtcctcttggcaggtcctggggaggatctaaaaccgcaaactccggccaggaagacgctctctggccacagattggggacacaagcccggggtggggtggattctcaccaccgctccgcccggttccgcctccatctccatcccgcgccccggggcccgagggtgggaggacggaatttcccagcgcgggggttcttgtgttccgggccagccgacaggctctttctgtttacggagagaaaagggaaatggaaaaggcggggaggaggttggcgtcggctgcgccaccccaatgctggttcaggcgcctagagtcagggttccgcagagccctggtcctcccgctgcctatcgcccggcctccagtccgccgtctgtcctcagaacgcccacacgcctgggtccggcaggctggccacccgctgcccaccgacacagaacactcaggttaacagggtttagggtgccctgagtgtgtttcaggggcagggatgcccgggggttcccactctgaaacggagcgtgcctcccaccggtgaacactcgagtggcctgctgcacgcaggtacagctggaaaacaccttgcgcaagaccgcggggcggtgtggactcgaggctcctcccaccttcctccttcttcccggatctcgggtgaccagtcagtgcaggcctgggctgtggcgcgggacgcgagcactggcgctcaccgcgcctcctgcgggggacactgcctggactgctgaactctgtttgctgagcctgggtgagtgcaacttggagcctaaaggacccctatggtcgctcagtttctgggcttttaccttaagcaaagcttgtttatcttaaggggccaagtgggtcgagagggagttgtgggaaacatatttggatcccaaaggaaaacagaatctttttttttttttttttggataaaatggatggggttgggaaagataaagccaacaaacttgcttagcattataagacatctgctgaggcacccaacttcaatggattgaggcttgtgtgttctggcccttaaagactttatcctgtaggagaataagagcagtagacttgattcatcttgaagttttgaacaagagtgaatttgattctacagggctagaaagcatgtttctggaactttttcaaaagaaaaatatattaagagatatgtcctaaggagcaatgggttgtttcaatgggggaaaatccctttttaaaatgggaactaacacaggcattatcccccactgcaaggcagaatatcaagactgtatatagtctgcgtttacttgctgggcaactcgaggttcgctgtctggatgttaacagccaagtcctgttttctattttcatagctattttctgaaataattctaagttattttatagttaatattttgaaatttaattacaaaaaaacccaccagtcttggactgcatttggaacaactgtctctaaaactgccctaactctccatcctgctaggacatatgggttttggagaggattttgacccgagtccaggatcaggcattttaagctgagcacatttgtcactaaactggagtggcttcatcatgcacagaaagggatgctggtctgtgtagctcagaaaccataagctaatgtgtggtctgcttagttgagccaggagggtgtaggatgctcctcaggctccagaggctgttggggcactggtttgctgggcagcagatctttgtggcaagagcctctcaggaattgagcaagctctgtagaaagtttcagaattaaacatccttccatctccctgtcctccccctctctgtcttgttcccatatagccgtgtgtgtgtgtgtgtgtgtgtgtgtgtgtgtgtgtgtgtgtgtgtgtgtgatagagagagagagagagaaagagagagagagagagagagagagagagagagagagagagagagnnnnnnnnnnnnnnnnnnnnttaggctttaagtatagccttattataagggcacacattctgttcaagcctttctgcaggtttgcaaacccaaattggtctttcctttcttgaacagtgctggatgcctcccccccacaccccttctttctagagtcgcaaactttactgttttgtcaggtcatttatttgctaattcagcttggagcctttaccaaggaagcttaaagccaaaggatttttaacttctgttttcctagtaaattctacagctgcagaaactgcaactaatggctatgctaaactgaggttaaaggttctctctcctatcagcttacacggcttcctgtgtagcttgacaagtcagggacttgaatcacagtcttcttcagcgatgtgtaagatgtctgggaaggcactgtgtggaccatgatctagatttaagtgtggcgataacaaacaccagcagacttttctgtctgggctcgccttccccctttgcttcaacatagacacaatctttaaaaacttaccagactgagaaataggcgtcaaatcggactcacagatgagaaaggaggccagcatggtgtctgttaacctaggtccacatcctagtgcttgttgacacagcttaacttactacacaccagacactggtagattgtgcgcaggagcttctgtgattggatgataggcgctattattatctccaccttgcagatgagggaaaccaaggtacagattgagatacttgtttaaccatctcataggcagaggttggtggtgagatttgggcatgaagacaggagtattttaatgtgggatggatgctagatgccttcttcatttgcacatcaggagcacatgacttgatcatgtgtgcaggtgtccctggtggaaatttccagaaactttgaactgaagctccacgttgacacaggtgcatggctttggcggagtaatactttgttacttggtgtgtgtgtgtgtattggtgtaatgcacgtgtacatgtgtgtgtgtgtgcgcgagtgtgtgtacatatatattacaggtgccacatgcatagtacatgtgtgtgctggtacatgtggaggctagaagtcaacattggctgtctttcccagcttactttttagggaggtctttcattaaacttcgagctcatgggttcagttaaagttgccagccagtgagctctagggagtcacctgcctgcacactcccggcactggcactgtagcacttgccgaggtcctgtgcttttatggacctgacatatcttccagagaggcttaagtcagacaggctttgaaatctgcttacatctagtaggtgctcttattttttctcacttgtaggggagcagagttatctcaggacccagagggacagtaccactttttattgtcactttttatcggcttgcttgacttctcttgtcatctacatttcctaagtgtagcacctgatcttgtgggactgaagtgtcactttggctggtgaagtcagttgaacttcacctgtggctcgcttatagcagatttggttttcctgggctcttttctccttctaaagcctctccagatataggtattaagttagctttctgggaccctcaagatgtgtgctttgtgctattttaaaaaagaaattcaggtgtcaggagggtgctatgactcacagatcaatgagtcacctttctgatacttgtttatctttggcacgtatagatcccagctcctgtccccttctatagagctgtttaatttcttcccaccagatttccccacacactgatcttcttactgtttcacaccctccctccgtttcacaccctccctccaagtaagctgttttacatgcttgcttctctcttgggacttagcttgcttacctagttagttcctgaatttcagtcaagtggttcattttctttcaaaccactttttctttaaagccacagccatcttgagctgtacaatgaagctgtacaaggtcagtaattataaaaagcagaaacctctgtcttcagagagacctggactgctctctgctgtgtttgggtttagtgaaagtttgttttcagtagctaaagcagatgccagagtcagtgcctcccaagcatctcaggttttccctgcaaagcaagctggactaaagattttctaaggtccctttgaacttggcactgtccacttgaattcacttgtgtgagtaaagaagaatccttgttatgaacagaggcacagaggagcagatctccaggccctttggtctccaatgcaaacacattatagtgaaggatatgtttgtgttttcttctgtagactcccagcaggcactacagtgatggagtacatgagcactggaagtgacgagaaagaagaaattgatttattaattaagcatttaaacgtgtcagaagtcatagacataatggagaacctttatgcaagtgaagagccaggagtgtatgagcccagtctgatgaccatgtatccagacagcaatcaaaatgaggaacgttcggagtcactgcttcggagtggccaggaggttccctggctgtcatctgtcagatatgggaccgtggaggatctgcttgcatttgcaaaccatgtctccaatatgacaaagcatttttatggacgtcgaccacaagaatgtggaattttattaaatatggtatgtttcttctcatcagttgagtgctgtgtgctctgctttgctggtagtgcttcattgaatgcacagtggcattgaacttggcttaagaatggctgccagacacaagttactgtatctggttactggtaagaatcacttctttcttaaaaacgggaagaagatcttcatgcaaattccattgtaggggcctgtaatttagtagtgaccctatgaagaagcaatgggaatatactttgtttactatagggcatgtaaggtaagcactgagccctgacctataccctcaacccttacagatttattttgacaattcactgaaaggctcattcattatatacatgaaagagagggtcttaattggagttcatcagtcaagagacatatgagtgctgtcttaatattttagaaaacagaattattttctcttatcacgttggttaaaaatggttcttatagaactgcagcttacaggtggcaaatagctacccacagattcactctctttaagtggtgatgacccacggtgatggagttgcttagtcatcccaagtatgcagataattcaaaaatattgtgacaagtctttgttaccacagtagttgctcaggtggagtgtttaggtgtggctggcattctgtcagatccttattgtgtcagaggtgaatatgtgggcgatggttaaaaggtgatctaattttgtaaaaaggacagttggcaaaagagtaggcggtaagttacaaacatgcctatttgtagagatggctctcttttgtttggtgtgtacaaatggcagtatgtcccgtgctgggggagctctttccaaagagcctgagttgggacaaaggacatcacaacaatagcaataataataataatcttaattgtctcatttatttaatgaaaaatagcacagtaatttaggtcagctatgaagtgagttgtttgtcaactgtgtttggctcagtaagaagcaagctcacattctacataggggtgtgacttcctttggtgtgggtctaccacactgcatttaacagtgggctaaatgctttgtctgtaggatgtgacttcattctataaatgggaatttatcatttgaagtagtagccataccagattttctcaggcagggtaaaattagagaagtatgcttcaaaataacacacttgggtgtgacaaattcagtgcagatgcatttctttcgtttttacacatatttgataaatgaatacaaatgagataaactaattgtccttgcttgtgaatatatagagacttaggtgtgcttgccctcaatgaggagagatggaccacagtccaggtacataaggaatactgggatattttagagactcttagaaagtggtttcttgcttctctttaagggtagaaccagaagagctaacacagaaagggccagaaaccacagtcattagacggatgtacaacctgaccagcaaaggtacaactgaatggttatcatttcttgctaaagaggccatgctcaacacatgagcaagtccaaactaaaaataaaattatgaatcaaagataccatgaaggcagggctcttaataatcttaaaaatacttgtattttcttttaatgtggaagaatataaaatataaggcaagaagaccagaaagaatgggatgataggaagtagtatagctcatgggcaagtatatccatcttcgttaggcctgggagctgggcctctcaggactgtgtttgactttcctgatactggcattaaaaatgaaactgttcccagtggcaatctgtcacagctgtgtgcctcataagtcattgcctatggagtcgtctctggtcagagctggtctggcgtaatggtcataggcatggcttttaaccccattgactctggcacggtgccttctgtggatccatctatcatctagtcgagctttcttttgtcatgcttcatctgcagacttagcagagctgtgtgctttgggctagctttgctgttccttatctctcttctttagagaattagctgccacctagaatgggtccagagtaaaatgtgtccataaaagcttcctacatagggagagaaacttttccttacctacgtgttcatttggtaggcatacctggacagccatggtgtatgtggctattccagatactagatagcattttgatagtctgtaccacagggagctcactgcctggtgctgcaggatgcaagtgcgcaggtaaaataacagcacacagtcagccacagaggacctacactctgacaagtgtgggaatgcttagacaagatttctaagggaaggaaaaaggagggtgtcagcacaggcttgcaagaaaaactggcacccatgccaaggtgtaaacatcaccttggagccagctaaatgaagtgaagagtgttttctgtgaagggacagtatgtgcaaaggctcgcaggcacagagacctgctgtgttctgactgccagcacacagagtgctgcaaacttcattagacaggatgtagagctacagatagaacaataacccaaagcatggcatgtaggctagttctccctgagtgtgtatttatatgtgtgctacttcccttaaaataacatatgttattaaagattgcactcatattcaacagaacccaagaaaagagcatcaggagactagcctagagactgctctgtgtcagagtgcaaagttatttataaccagttcatacttgacctggagtaaaatacaaatgagttcccaggcattcaaccctgggaattatatgtgaattcccccccccctcactactctccccccaaacacacctctccctggattcgttcactcaaagttactggtgtggcatttggaatgatgatcctcttggggttgaagagtccaaccctccacttggtgtttgagccaggcaggttcagtgccacatttgtcaagttcttatatataacgaaattcatctctgatcccccttaccttagattctactctgtggcccactcccactcctgtaaatatatatgatgaactgtggtggtagctgagagttctgaattaagaacctggtatgtagtttgcctttgaaatggaaattcttactacccgtcttactagccagacctgaacatcaggatccacttatgtccccaggagggtaggagagatgtagcttagcctttgtgttagctactctctttccatggatttagctgaagaccactcctactttgggtcacacagctaactcaataaaatacctaagaaatgttctcaggtattgcctgctgtgtggtttagtacagaaaacagcaatctggatgtgagactagatggcatgtgtcaagtgtctgtcctggaaagtgactttggtaagttgaagatctgacagaaatagaatcacagggttcttctgcaaggttgtttggatccctagaaagaggaaactaaagctaaacatccttgtcaaactcaagcaagagagacctggagttagggagaaaatcaggaacgctgtggattgctcactgcctggaacttgggcctcactggatgagtccaggcagctttgaagaactgagtctgcaccctagcatggctttaattacagccttctggaaccccaaaggcccttacacaaagagtgggcactctggctgtggggttaggcagaatcaagtgcaaaacctaattctggcactgactggaaagttgcttcaccccttggaaccagcctcagctatgcaatggaaagaaaaatagaacgaacatagctcaggctggctgtagactttaatgagataatgcaaaacagctaggtaagtacaggtccttgcttagctttcagactgcagtggccgatccttccctatgtccccctggaaagaataagggggtggtagtggaactggttcatagcacacttagtttggtacaaagccaaactttcatgaacaagggttaaacacggagataggtaactagaacattctctgaatgacaagaagcaaggggacccaaagaaagtcttgccagatgttagctctggctaaatgtggaagagaccaccactgcagtgtcctcagcagcaacaagagacaacacttgtttggagaggcagttatattttaaatgagacaataccatggtctctacttagttcctggaaggacctgtacagggttacaactcagcaaaagcaccctgtaaacattgttaaaatttagtgacttttgcatatccaagtattgggttattcttcgcttccttccctggctaacatcgagcacacatttgtggactgtggagctaaattagtaatgatagaggttaagtgagcagtcctttggtctgcctctaatggtgagtagacatctggttgcatttacagttgcatcaagtgcttgttcttcattcagggaataggcttaggggctccacattctcctcagctcttaaggcagctcaatactgtttcattcctaagtccgggagtgatatctcaggccataatatcatgagtcacactgaggagagagctggcattttaggagactatcctgcagaacagtttagatcagtggttctcaacctgtgggtcacaagcgcacaggggttacatatcagatgtcctgcagattaaatatttacaattcacaacagtagcaacaacagtcatgaagtagcaatgaagtaatttaatgtttgtaggtggggttggggaggggatcaccacaacatgaagagctgcattaaggagtcaaagccttaggaaggccgagaaccactgctgtagacatttttaaaacgtgttctaggccacgcttcccatggactaccattttacttgagttagggtatgtactcacttttcatttatttttctaatgttcttcctgtgtatctctgactgtcctagccctcaccactctcttgcctctgccttctcagtgctggtatttctggaatgtcccaccatggtggacttgggtggaatccgcatcccacattgctctcaggacatacctcttgatgtttggacaggactcgttttgttcttgttctttgcaccaaagcatgttttgtttgtggtttatgtatgcagtgctagatgtcagtcccaggaccttatgagaactaggcgggtgttttaccactgagcaacacccccagcccagatccacttgttctgaaaggcctgattctaacccttcaaggcctgggcccacctatctcttctcatggctgcctactcaacaccaagcccatcccatagtaggcacacattaaattaagcaaggaagtcaaagagaaacaactctgcccttccttatttatgtagcattgtcaactcatgactgatatcactggctccatagtcctccctgagcctcagttaatttccacgctctctctgtgtgcatcctgggtgagtaacagctaggcagacaaacaggttagcacatttaaatagaatcaagtcaacctccaggctgggtgcagccttcattttcagtctttgggtctctgtcatcagactccttagataaataatttttcaacttttatttagcagctaactactcacaagcatttagaaatatgagcaggttggaccaggaacttgtgtctgttacaagctttctctggcttgctcaagttctaaaaatagcctgtactgtcagaatcacacatggaaccactgcactgaagggctgtgtataagattgtttctaaaatagcctctattgagtgagcctcacctcagcatctgtatttcctaacaggtaatcagtccccagaatggccgctaccaaatcgattcggatgttctccttgttccttggaagctgacatacaggaacatcggctctggtttcgttcctcggggggcctttggaaaagtatacttagcccaagacatgaagacaaagaaaagaatggcgtgcaaactggtgtgtgcagccacactgtgtgtctgactccctggcttagggttatttaccctcacattgggtcttacctaaggttcctaccccaaagtgtctgtcatttctggagtggcttgtggcttgggaccattcagctcctacatctctacttagttgtcttgtagcttgtaatctaattaaatgaatgttttggtgtgtttgacaaaggcttggatcacaccatctcccttaaatgggagtagtggagcttgcctgagttggaagatattggctactgttccctggggaggggtccatggcaggcaacagaggctagaaagacagggtgttccttaggactgcggaattatagggctgaactcagttgtacaagtttctgatatgaccctatctcttattaagcaatgtctgtttaaaattaatgcattggtacttcagaggactgctgggcagactggcagctgagaatatacaaatctggaatgtcactgcttaatgacacccagcagaggtctgcccgtttgtgggacaattctgggctgttcacttaagcacagttttctgaagtagcattctgagaacttcataggtgccagacaggtggatatttatgctctggaacactagaacacaaagagaatgaatggcttacagctaaagtagtgtgaatgcatctcagaacccttaagttcagagagctggacaccaaataagatctagtgtatgaggttttatttgtattaggaacaaaaacaaccacaaattcatctgctaaatgctgtgatcatggagtacccttgggacatagtgactggaaagagtcaggggattcctggtggagtctggtatttttgttttagttggaaatcacttctgtagtgacagtcaacagttaactgggtttgacattattttacagtgtgataaagttaaatgttattttctactctttgtggtgcttggaatcgagcccaggacctcacttatccacagcaagtactccatcactaggctgcatccctggcccgtgtccactcttgatttaacaaaaaagcaaaataatgaatatttgtcagatgccatgtttcagtctcccaaactacccacaagacagcaatgtatagtctttaatttgttctttcattatgattcactagatacgcctttaatcccagtacttgtggggcagaggcaggtggatcataataaattaaaggacaacctggtgttcatagtgagttccaggccagccaaggctacatagtgcaatccccatctcaaaacaataaaaattctgactaagtgatcttttattaataggaaaacaagacttatagtaagctatttgaagtatctatccagagtttccaaactgtaattatctggagaccttttataaaaaatggcaacccagtatcataatttttaaattttgatagttcatggggaaatggctttgtgggattgttgttcctttagtatttgttatagtcacatattttagggcagtgctttcttagaatcaaaatacaattaaaaatcccagacaggctcaaaaggatggaggcttatgaataaggtagccttccataatgtgacaactttcaagaacttcttattttcccagatgtgtgcacagcatcatttaaaaacaatattggaaattttacaatttttcttttgcccctagcacaatattaggagacattttagaatatctctgctctgccaatactacttatcacagttcttagtgatgaagacctgagctttcacgggatgtaaagattggtgagcacttttcttaaaggcttgagtctgaagtggtcaagggaccagtgacttcatcttatcacacagtgaggtgaaattttggaacacagtgttctaggagccatggacatgaagagtatcaatcataggaaattcttagctcagtcagtattttgaaaccttgttcggattcctaaactctaaatgaagtgaggttttccctaccctgtttttcattgtctaaaaaatgttcatatctaaagatgtcatgatgtagaagtgagtctgtggtaaacatttcttgacaccacggtgctctgttatacacatcaaggtgtccttgtgttgttttggcttcctgttttctggttgctctgtattgtctggcatttgttttattgtcctgaggtttttagactcttgcccctgttttgtgttgctagatccctatagatcagtttaagccatcggatgtggaaatccaggcctgtttccggcatgagaacattgctgagttatatggtgccgtcctatggggcgatactgtccatctctttatggaagccggcgagggagggtctgttctggagaaactggagagttgtgggcccatgagagaatttgaaattatttgggtgacgaagcacattctcaagggacttgattttctgcactccaagaaagtgatccaccatgatattaaacgtgagtagtggggtctgccttattgctgtgagatggggctagtgagatgctttagcccaaaggcactcagcggcaggcagctccctgcagacacagcatccttttctgtgctccataaggggctcatagcaggaatattagcagtcagaagggaggctgaggactggagatcaatacaaggatgatgaccacgtgtttgttggatgtgctgcctctgtccttgtattgtgatttaaaaacaatcagtactgagtgggtagctcaaggatagaactcctgtttagcctatacgaggccctgggtttgatccccagcacgcgcgcgcgcacacacactcacacacacacacacacacacacacacacacacacacacacacacacacacaggattaaataatgcaagcacataggcatatatttttgagtaacaaataacctcttaattttgagccatgatttggcaacaattcattaaacaatctctttttaaaaaacccaaattaatacctaatgttgaattgcactctgtagaccaggctggcctagaaatcagaaatctgcctgcctctgcctcccaagtgctgggattagaggcgtgtgccaccaccgcctggcggacaacacagatttaatcagaagaaatccctatacatatatatttttaacaacagtggctcaatagtagatgtgtatatcttagattttgaagccaaaaccgtgagctttcctgctggctgtagctcctagctgcccacactaggtgggttcctgacaggcctcaggtgttttcacctgactgctcccctacttctctcttctggggtgaaccacctgagtcattatcagaagcgtttccttctgctctgcttggaacttgctgttctagatgattttcctgttgggttaggatgcattaactcacattaaaaacccctctcgttgcagctagcaacattgtattcatgtctacaaaagctgttttggtagattttggcctgagtgttaagatgactgaagatgtctatcttcccaaggacctccggggaacagaggtaattgattgattgtattggtgatggtctggaaatgctgtgacaatcagcaatgaaggggacaaaatggcaacattggatgatcgttgtcaccagaacaaattcattttacattttaccttttttactatttctatgataagactttaaatatgcatggttatatttatagatattttttattactgtttatatatacaacacaaagcacttacagacaattcagtgccaaaacagaggaccagttgagcattcctaatccaaacgtctaaaaagctagacaagacctagagagaggttgccaagtaaagtgcttgctacacaagcccagggacctgagttcaaatcctgagaacccaaataaagccatgtatggtagacctagtgtgactatgggtagatctaagtagacaggagtcttccccaacgctcacaggagagtagcctggaatacaggactatgaataagagatcccgcctcaaggtgggaagtgtcatatgtgcagtgtcgtatatattacacagacagacagacaaggtgaaaagaaaagcccataaaaatatcaaatattccaaacatgagcttctaaatctgatttttgattctaagtttctcaagtaagggatactcagaattcatctttaaaactgttagagaacaatagtcaacttatagttcacttagtaccttaaatgaattatttcttccttaaaattattgtgtgtaaatactggtataacaggcagatgactgctattatcctattttataagaagacaacggacagattgtaacatggtgcctgatattacccagtcaccagcagagccagagtttgaattcttgaagaataagcatttagttttgtattttctgtgaattcaggctctaaattctgagtaacatttaaaacagaactaccacattactacatatcaaattatgactactgcaactcctggttcagtagttttctcagctctggctgttagcatttactgaggagtggccaccgatgcctgcctgcctgcctttcaccccaggacagcataagcttggagtcctgagcacagatgcaccctgttggaatttggagtaatagaatgtaactagtctgccaatcgaagctcactgagaaagccctccctggggagaagtaagcttcggtgattcctcggttttgatttctgtgagacaggcctcagtatctaaccctggctgacctggaacccataatccccctgcttcagcctccctggtgctgaggtcatactagttcataagcctcttttaagttaaagaatgtttgtttcctgcttaagagagctttgtcacagtagaaagtctgagcagacttaatgctcaggacgttgtctttggaaggcgtctccacttttaggcattagtcaggagtgcagttccaggacattccacccttttccctggaaccagtttgagaaacaaaactatttatggtattagagagaaaaaaataccttttatttcctggcagtgcagtcaagttgaagattttgcaatgttggggaaaatcttaggtctgggattctcaaccaggatggttgggtgtagagtcacagatcttgatcttcaatagcttttcttcttatttgagtttagaatagctcaggctggccttagttgcactatatagcctaggctggacttgtattcaatatcctcttgaccctgcctctgtgtacttattagaattatggggcatatagcatactcatctagctcctgagtagtatttagatgaagtattttcagccaatgttaatttgcaggtattcagtacaaaactgatccggttgtctttttttgttgttttgtttgttttgtttttttgagacagggtttctctgtatagccctggctgtcctggaactcactctagaccaggatggcctcaaattcagaaatctgcctgcctttgcctcccaaatgctgggattagaggcgtgcaccaccaccgcccggcctgggtgtcttcttataccctgcccccatcaattgtctcccttgtactgtctgcacagtgctcacaaatggaggcctgattgtgatcagtgtgcaaaggacaatgaagtgctaatgcacttcagcaagtctgcttttactccttatatgaaagagcaaattagatattactaaccaggcaagcaggcaggttcacttcctttaggatatgtgatcgctttgctgctgggaaggcaatgtctgtttcagatttctgcagtatatttcacaactacagactgcacctctagatagtgcttgctctctctctccctctctccctccctctccctccctctctctctccctcgctccctctacccctttctccattcataatcagagtgttagacagtaacttgagtgttacactgtaacatgccatatacccaaagttaatctggtgtatatttactggtttttatatatcagaaggggaaaataggaaatataaataacacactagaattactttgttgtgttttttgtttgtttttgatttttatagttcttactttcttctgagtctagcatcagcttctgtaagttaacatataatgatcatgggcacatgtgttcatgcaggcattccgtggcagcctcttttccttgctacaaaagccttagctctgacttcaagttcccctgcacattactcattcctgggggttgaggggttagacaactccggggccagtgctgtctgttttgtcctaagccttccaggcagccagcccaaagatagacctttctgtcctgcctgctctggttctttccggagcttgaggaggaagaaacactgagctggaagctcctggctgtgtgccagaagtctgcaccatggcagacggatactggcagctccaatcataggctgggcatgagggcatagagagctgggatcccacccatgtgtccatttgcttcgttcccactctgtgtgacagagggagaggaggcaggcatcccccactgacagtaagcacacatcatttctttcttcactgtattcgattacggtaagtttcaacaggaagtcccctcttcttggcaaactacacgcgtaacttcttgttgatcgtggggtacaaagttgactaatttgtaattctgtgaatgagattgtgcttatttaaaaagtgaagagacatctgcagtgcattgtctgcagggaaagtggatgagcatggagctcggctacagccggcttgctggggaagaagaagaagtgtgttttaggaaggagttgagcctgctaggaaggggaaactgggcaatttccccgtttttgtaagttgattttctacttatttactcagaaatgaattctgagaacaccaaccctttccccatgttcacacaacagcataaaacctttttaaacttcatacctgaagggatttgaatcccgagtggttcatacttgtgagtcttcctctcctgacctctttcctccccaccctgtctcctcttttttctcatctcttccttcattattctgttttctttcctcccccatcccttcatttactctttttttcttgtttggtcttggagcatttgtgttagtggtgaggtgtcccaaggatgggacccaagtagaggcacagggttcattaacctgaaggacacttagcaggctattctcagagtggctgtgtcttactgtgaccagtcatatgagggcagatgtggaattttccacatgtggcatcatccaactcaaaagctttcgattttggaaggctttgtacttttaaattagagttatgcagcctatagtgttaattagaacactagtgttctgtgtctgtgacagccctacaggatttgtctgtgacagccttacactctgagtctgtgacagccctacactctatgtctgtgacagacctaactacagattattggtggccaggtctttcttttaccttttcatcttaaatttagaaaagcaaaatttacagaaactatccttatttactcagcatcagcttgggaaatcaaatgcaaatgatgctgtattttgttattttttgtatctattctttgggggcagaaaggcctctgtctgtagcctaagctatccttgagctagtggcagtccttttgcttcaggctcagaatgtgcacactcttgctgtctcagacatttgctatttagttgctgggatacttggcagatataaatgacttcctgggccattttcccagctttaccctttatttgtctaggttcttcccttctaagccactgttgtaaaaatcctgcaggattccgccaccgtttggcaattaaatgataaatgggagaaatataggtgtagtcttggctaagtctaaaagaattgctgtaatagtcaatcatgtgtacctgatgagcatctacagaactcagaccagcgggagtcagcaggttcagaaacctaatcctttgctgttagatctgttgtgtgttcagtccagggacagagctgctcttgtcatactgcagtgacgactccatccaagttgtcctgactctagagaacgtgctgggattttccttggcttgagggatactgcagtagcattccctctgaaagccagggcatgcagcaaataccacagaggcaaaggagccagcttctagaactggacatggagaagagaggcagataaatgaaactttcctcatctttttcagatatacatgagcccagaggtgatcctatgtcggggccattccacaaaagccgacatctacagccttggagccacactcatccacatgcagacaggcaccccaccctgggtgaagcgctaccctcgatcagcctatccctcctacctatacattgtaagtgagtgtcagctgggctttcccaagtgcatcccaccacctcataccaagacgatagggtaatgggagaactgcgacctaggagacgtggctcccaattctgttattgacatgaaaggctgttcgaatgcaaactgactgaaatgaggggacagaatttacatgctatcccactgtgtgataagacacacttagaaacatcagattcggacaactctgtcagttctttttaaaataagaaaatatagtagttttgttctctgttcccctcaacctccctttgctttgctgaataacctagcatagaacagagcttgggaggaagaagatgcaggtatttctctgctgcagtacccactgttggacccccataagaagctgtcacagctactttaaacccagctttaaaccaaaggtggtttaaccaaccctaggaagttggagagtatttgctagatcatgcagtaggcaataggtctctcccctagcctttcctgcagaagatatacctctactccatccatgcttacagagctggtttgttggcagatccacaagcaggcacctcccctggaagacatcgctggtgactgcagtccaggcatgagggagctgatagaagctgccctggagaggaaccccaaccaccgccccaaagcagcagacctactgaaacatgaagccctgaatcccccaagagaggaccagccacgatgtcagagtctggactctgccctctttgaacggaagaggctgctgagcaggaaggaactacaacttcctgagaacattgctggtaggacaccatgctgggtgtgtgggtgtatgcctgtgggtgtggagccactggcctccctcctgctgtctacagcaaagctctgatgtgggtcaagaaagcttgtgtgtgtgtgtgtgtgtgtgtgtattattggggagcaggggtggagcagggggcggaggtgaaggtcagccatgatacatgacagcacatgtctgtaataccaccttttggataaggcagatagaagttcaaggtcagcatcaattacttgagactttgtcttaaaaagagaagaagctgggcatggtggcacaggtaggagggccataagagcaaggcctgcctggattactgagtttgagttcaaggctaccctgggcagcttaatgaaatgttttgaaataaactgtaaaacagatgctggagctgtaacttggaggcagaacacttgcctgtcatgtacaagatttgagttccatcacttgcaacacacacacacacacacacacacacacacacacacgcacgcacgcacgcacgcgcgcgcgtgctcgctcactcgctcatacacaccaaccaggcacatctctagaatttaagacagaaagattgcccagatgatagcacaacatagtgaccccttacctaaatgaaacagaaaggggtgacttcctaagcatcatgcaatatcatctgagagacagaagaaaacattcaggcaacactgtggatcagctcacccatcaccagaattctagccattttcagtgtgaactgaggtaacacagtcattggatggtgcctccgatctgcgttacttgaaacagagtatcccttgactttagaaacagagagtggggcctgccatggctgggcaggcttctaattcagccttggctccgagtgctgagaaagtgctcagtctgatgacaccttgcttttctgtcttctgcttgaagtcgccgtgttggctatgaatcgttcccacctaggagggctggtgtattccacccctaccctctgagcctggagaaggcttctattcactcacgtagatcaaaagtcagaggtcaagcctaaagtgcctgcattttttatccctgtctaatttcactatatctcgtggggagggggaaatgaggttctgatgaatatgctagagtttctacttcattccttgtcttcattgacccccatttgacccctgtgatctgtgtatgctattccataagtagcccaggacgttcttaaagccatctgtgccagagccacagctggggactgtctcttgagcccctcaggggtcttccttaacagaagggacatggagttgttacttgctgggccatccaatcacttatgttatttcctccttgtttccatgttgcctctgcagattcatcatgcacaggcagcaccgaagagtctgaagtgctcaggagacagcgttccctctacattgacctcggagctctggctggctacttcaatattgttcgtgggccaccaaccctggaatacggctgatggatggctttgttggcaacaaaacaggatatttctctcctgaatgttggttttgcagaccctacacagcggccctggatagtgaattttacccaggtttttaggggtcaaggaggcctctagtgacacaggaacagctgtggcccttttttgaagctactctgacatgtcccagagcccaaggttctcatttctcaggtggtgggactagacagagggagtggcaagctcagggaaggatcatttctggtgataattccattcactttgcactttgatgggcattaaaaaaaatagccctcacaagatagtaacctcaaattcctgttcttggttcttatttaagcatgggtcttcattcaactcagaaggcctgatctgtgtatattctggtgtgtattgtatggtagctctttgagccttggttggtcgactctagtgtaagtttaattaattgtatattgtgtgaatagaacaacttaaatattacagcaatacactgggctagtgtctcacaaataactgatttactcagagccacctgacagcaggccactagtgacagtttctgttatgttcctatggaaacactgtactgtacatactatgcttaaaacatttaaaacacaatgttttaaatgtggacagaactgtgtaaaccacataatttctgtacatcccaaaggatgagaagtgtgaccttcaagaaaatggaaatatttgtaaattcttggtaatgcctccgttgtaattaatgaaactattttctttaaagtgtttctatgttaaaatagcatactgtgtatgttttatccaaattcattcatgaatctttcatatatatatgcatatatatacatatattgtagagtgtgaatattcttatttaaagtatatttttacattatgcaaatgaactttaacattttagtccaatgtgactagtcaaataaaccaaataaactgagtattttgtcttaatttttgggattgtatatttctcagctgggtcacaggtttgggataagaaactttgtcactggctggctcctctgctgttgccatggaatgccttcatgctgaactggtaaatgctttatccttggttggctgcactgacacagaaaaatacctgtgacttggggaaagtattccagtctgtgttgtatcttgtgtttatacagttataccaccttgagtgcagacttgtaagctgtttacttgtgaatgctaacactagtaactaacttgcttataaatcaaatcacattcaccaaattccagtggagacagtttaatgggaaggcacatgagaccgctaagtgatagaatggagcctttccatatgtgctggatacagtgtaccgtgtctctgtatggtaatcagcatcccagcactgtaaaaaaatgcctgagataagcagctttcaggaaggaaaggtttagtgaactttggttcaaggtttcagcagcttctctccatggctgcttgactctgttgcctttgggcctataatgaggcagcgtatcacagtggtggtatgcagtggacaagatgctcattccatggctcctgggagagagatggagagagaaaagcaaaaccggaacccagtattctcttcaagaacaccagcccaaactttactcccctaggctgctccgtctaaatagtaccatgggctgggagtgtatacacacacacacacacacacacacacacacacacacacacacacacacacacacagagagagagacacacgacatgcattcttcttaggaaacattttgagttttgttttttttttctcaagagctcaaagcaagtgaagagtagagacatgtttgagactagacctttctgactgcacaactcaagcccttcttcagtctgctgctcagggagagaccatcatctgtaagggaaagaccaccttgtaggagaggctcggcacaaactggaatgcaatgcctaagtaagggcagaggtgagattatcacaaaactgatggaacttcaggttcagaactcttcacttgtgtgagcccaggtgaggcctgaaagacttagttctgccctttacttaaaggttcatattaagggcatttgaatacggaggttccatggtatctcctgaccttgtcctctgcctgagaaacacagtaacttgatcttccattgatgatgtattcctgtgttcaagggaaaagcctgtgtttctactggagggcctgaggagatattctgtaggtctgaggacagattcatgccaagtttcactggcaaccaggtagaatgcgcccagttagatggcagatttgttaatggagaattgaagtctcatgggggagagggggagagggctgctccatgagcaaagaactgtggggcacacaagaaaaaaggatcctactcatttcatgaattcattatttttaatagctgagtagtactccattgtgtaaattttctgtatccattcctctgttgagggacatctgggttctttccagtttctggatattataaataaggttgctatgaacatagtggagcatgtgtccttattacatattggagcatcttctgggtaaatgcccaagagtatagctgtgtccccagtactctgtccaattttctgaggaactgccagactgatctccagggtggttgtacaagcttgcaatcctgccagcaatggaggagtgttcctctttctccacatccttgccagcatcttctgtcacctgagtttttgatcatagccattctgactggtgtgaggaggaatctcaggggttgttttgatttgcatttccttgatgactaaggatgatgaacatttctttaggtgcttctcagccattcagtactcttcagttgagaattctttgtttagctctgtaccccatttttaatagggttacttcttgagttctttgtatatgttggatattttccctctatttgatgtaggattggtaaacatcttttcccaatctgttggttgttgttttgttctcttgacagtgtcctttgccttacagaagctttgtaattttatgaggtcccatttgtcaattcttgatcttagagcataagcttttggtgttctgttaaaggaaacccaccccccccctcgcccacaagcttgaggctcttccccactttcttttctattagtttcagtgtatctggatttatgtggaggttcttgatacacttggacttgaactttgtacaaggagataattcacgaaattcgtaggcaaatgggtggaactagaaaatatcatcctgagtgaggtaacccaatcacaaaagaacacacatgatatacactcactgataagtggatattagcccagaagctcagaatacccaagatacaactcacaaagcatataaaactcaagaagaaagaagaccaaagtgtggatactttggtccttcttagaagagggaacaaattatccatggaaggagttacagagacaaagtgtggagcagagactgaaggaatgaccattcagagactgccccacctggggatccatcccatatacaatcaacctacctagatacttttgtggatgggaacaagtacttgctgacagaagcctgttatatctgtctcctgagaggcctgccagtgcctgacaaatacagaggtggatgctcacagccaaacactggactgagcacagagtccccaatggaggagctagagaaaggacccaaggagctgaaggggtttgcagccccattggaggaacaacaatatgaaccaaccagactcagcctctccccagagctccctgggactaaaccatcaaccaaagaaaacacatggtgggactcatgcatatgtagttgcatatgtagcagaggatggcctagttggtcatcaatcgggttttcagagggaaatcaggaaaggggagaacatttaaaatgtaaataaagaaaatatccaatattaaaaaaaaaaaaaaaagaacaaaggatcctggtgctctgagctgtctaattccagcagaaatgaatcacattccattctggaattattagacgattctcattttcaatttataacatctattttaaaaaagacacttctagtcaagtgtttaattgccattttaatttttacctaagagccaatttttattattattatttttagtataagaaatggaatccagggcctcacatgtgctaaacaattgtctcaactatagaaagccacttttaaaagccagtttcagcagtgatgcctagaacatgcccattagcagtaataggatcaggcacctacaccagcctctcacaccttgttctgggccacacaggaacagcatcaagccacacccatctgacttgtgtacttgtacagcaacacagcagggtttgtacctgcaactggggaggggagacaggtagatcagaatgaaaaaggatcacagtgctcctactctataggacacaacctctgaccaggagcaacagcagtctcttcaagagctggctcctgatatacacatttctacttcctaggtcagaaataagctgagctgaggcagctcataactatttcctggaagaagagagcatgtccttcattaatttttcatactaggatcaactctgatgacttgaccaaatcggagacttctgctccaccacatatcagagaaccagaagtgtgcacaacaggagacctgtttacccagaagtcagtgagggactccagaagaaggctgtctgaacatagaaattgatcttcagttgactgtgagcaaaacaatctcaacaatctctcactacaactctgcatggagatgtcatgggttgattctaagtggatcatgtggggaaaaaccttaagatggtaagagtagggaattgatactatcatctttaatgcatcagctagtaacaccttttgattcattaatttaaccattcaatgaaacttcatcttcccatatgaatgtgaaatttcttttttgggttgtgtgtgtgtgtgtgtgtgtgtgtgtgtgtgtgtgagagagagagagagagagagagagagagagagagagagagagagagagagatgtatatagacaatggtcatattccctgctccctttcacactccaccctatttttttgacagagagtcttcactgaatctaccactcattcatttggccatactggctggccagtgatatctaggaatctgcttgtgtctacaatctcagcactgtggatacactgttgcatctggccttaggtcctcaggcttacacagaaagccctttattgacagagccatttcattaaccccacaaatctaaaatttcatcaagcattttatttgaatatgtctttgtagcggtccatgtattcacaaatattcttgacattttttgcctaattaacatacatttgagagatcaaggtagttgaaaagaaagaatattttcagcacaaagaagattaatggacagcactgaagccttggatctaggagtggatttcacttctggctatcctccttcttgaagataccttctctgaacccgtaagattgagggtggaagaagagtgccttcaaatagcaacaagatggtcttctgaatatttgaagtttgaatgaaaagaaaagagcacacacatgcatacacacatacatatacacatatgtacatacacacacacacacacacacacgtcctctcctctctctgattaggtatttacactgttggaaaatccaggtcttgcctaagtttttatctctagaggatagacacagtctgaggagtgctatagaactgcttaagacatctttcaccttctttgtgtgtaatttaactgcaatagccagaaagagagagaataaaagaaaaattcattccaattttcttactgaaacccaagaagtatctttgttaggtctgtccagaaagcaggagggagcagaacatttggcacttgcctatccagcttctccccactacagttacatcccctaaccatcctaaaagtaactataagtaaatagccctaaaagtaactgcaggttattccactatacacagtttggtgattctataccagcaaacatgcacacagtaacataatttatacacgcctgtgtgtccttttggcagaacattttccaaatattacagagagaagtatttcactaagcttggcccttagcatgagtcttactttgtaggagaactatcctagtcattccttcagtatagtggaaggctctaattttccttgttcatttcttatgtcttctgaaaactggtgttaaagttgcatctggcccctgattctttttttttttttaaacaaaattgaatggcgaacaacttaccaatatgcctcaggtccatacttacttgttcagagagcagggtgggaaccagagccacttaattctaaccacaggattttactagcaggatgtagtattgttttctgcttactgcttctttcctagtgtcttttgcctgggaatcccagagcagaagtaaggcattacattatactaatgctaacgtcagggtatggggagttgataatagctctctggataaactgaccaagtttctcttgtaaggacagtgaaagactaaacctgtcaccactcaatatcaccaggagtaattgagaattggctggaggaaggagctaagaaagacaggccaaatccaaatgatattacagaaatgatagtgtttagggatagaaaactaagtcatggcttccccactgaaattagtgaaaagagatgagaaacgatggataccctagggtctaagatgctgtgtgtgacactttatagtcacactccatgaactaactcagtggcactcaaggaccttgtcttagggttacttttgttattatgaaacaccataactaaagcaacttggggagggaagggattatttggcttactcttccattatcactattcatcatttaaagaagttacaacaggaactcaaacagggcagaaaactggagacaggaactgaggccatagaggggtattgcttactagcttgctcagccttctttattataaagcccaagaccaccagtccagaggtagcaccacccacatggactgaaccctcccacatcaatcactaattaaaaatacaccctacaggggcttgcctgcagcctgatcttaagaaggcattttctcaattgaggtttccttctctaagatgactctagcttgtgtcaagttgatgtaagactagacagcacatacctttttgtggtagccataataatggggtattctagttctatttaggagaaaatgaatctcagaactccatgaatttggcagtctgaggtcctaatattcctaataatggaggaaagttcttccaaacttgctttgcattagagttagcaggtgtgttaggagtattggttttcatcctaaattgccttgattaccaaagccagagtgggattctattgcagagcctaggcccaggcaggggtttacaaaagcccatgtttgggcattacagagttggttcagagttggagaaacagtcaaaacatgacttcttgttctgtgaagttttccttttgcaaatctgggaaacaccctcgtagaaagcagacaggttctttatcaagtgcattattattatccttagcctagtggaagactgaagctacaagaggctggagaagcaggtaagacacttgctagtgcatggtaaacctgaggttgaggctcaagtctacctggcttcaaaatttgaggcccttccactaaatagtacaactctgtgaaatttctgaagaaaaagggagaaagaaattttttaccaaaacttattaaaataggaattcaagttaggcaaagatgacttgatctataattccagaacttggggtgtaaaagcagtaagatcatgaatttaagcccagcatggactatttagtgagactgtctcaaaaacagccaaataatgaataaatgaatggatggatgaatggatggacaaatgtatgaaagaataaataaataatgaaataggactctaagtatggtgacatagtatttaaattttagaagcaaagttattaacatattaaaacaaaatagctgtagaaagtgttcttcattcctaagtatcattttgttggaaagtgattacaggaatggtgagaacagcaggagcaggtaatgagaagaccaaacctaaggataataggtatagacaagaaggaagattgccaatttaaagggccagtaaatatcttcaacaaaattatagaagaaaacttccctaacctaaagaaagagattcacatgaacatacaagaagcctacagaactctaaatagtttggaccagaaaagaaattcctcctgtcacataattatcaaaacaccaaatgcacaaaacaaagacgactaacagcagtaagggaagaagttcaagtaacaaataaaggcagacctatcaaaactacacctgacttctccccagagactatgaaagctagaagatcctgggcagatgtcatatagaccataagaggacacaaatgccacctcaggttactatacccagcaaaactatcaattaccatagatggagaaaccaagctattccatgacaaaaccaaatttacaaaatatctttccacaaatccagcccttcaaaggataataaagggaaaacttcaacacaaggaggaaatctatgccctagaacaagcaagaaagtaatctttcagcaagctaaaagaagatagccacatgaacagaattccaactataacaacaaaaataacaggaagcaacaatgacttttccttaatatctcttaatatcaatggactcaataataatacatagactaaaagactggttacataaacaggacccaaaattttgctgcatacaacccacctcagtgacaaagacagaagctaccccagagcaaaaggatggaaaacaattttccaagcaaatggtcccaagaaacaagctggagtagccattctaataaataataaaattgaatttcaacctaaagttatcaaaaaaagataaggagggaaacttcatactcaaagataaaatctaccaagatgaactcaaatatctgaacatctatactccaaatgcaagggaatccacattcattaaagaaagtttactaaagctcaaaacacacatagcactgcacacaataatagtggtagacttcaatagcccactctcatcaatggacagatcatagaatgagaaactgaacagagacacagtgaaactaacagaagttatgaaacaaatggatttaacagatatctatagaacattttatcctaaaacaaaagggtataactccttctcagcacctcagggtaccttttgcaaaactgaccatataataggtcacaaaacaggcctcaacagatataagattgaaataatcccatgcattctatcatatcaccaaggactaaggctgatctctctaacaacataattaatagaaagctcacatacatgtggaaggtgaacaaacactctactcaatgataaattggtcaaggaaaaaataaagaaaaaaattaaagattctctagagtttaatgaaaatgaagccacaatgtacccaaacttatgggacacaacaaaatcagatctaagaggaaaactcatagttctgagtgcctccaaaaagaaatggagagagcatacactagcagcttaacagcacacctgaaagctctagaatgaaaagaagcaaattcacccaagaggagtagatggcaggaaataatcaaactcagggctgaaatcaaccaagtggaaacagaaagaaccatataaagaatcaaacaaatcaggagctggttctttgacaaaattaacaaaatagataaacacttagccagactaaccagagggcacagacacagcatcctaattaacaaaatcagaaacaaaaagggagacaaaaacaacagaaactgaggaaatccaaaaaatcatcaggtcatactacaaaagcctatactcaacaaaactagaaaacctgaatgaaatggacaacttcctagacagataccaggtaccaacgttaaatcaggatcagattaacgatctaaacattcccatatcccctaaagaagtagaaacagtcattaaaagtctaccaaccaaaaaaaaaaaaaaaaagcccaggatctgatgggtttagtgcagagttctatcagaccttcaaaaaacacctaatacaaatgctcctcaaactattgcacaaaatagaaacagaaggtactctacccaatttgttggaagccagcctgcagctaacatgaaccgggtttcacctgggaggcaacctggggctgaaaagagaggggaaactaggtggtcaagagaaagaatggagctaagtcaagtttcctgatcaaagctcaaatgtttaataaaagtctgcgcttataaagaggggaacccatcccttgccacactaagtttcttgatgtcatgatgccaagttgtcagcacagacttttagcagtaagtcgccaaatttacaggttgcagttaactccagaaaatcttggagaaccggtttggcctcaaggcaggtggtaggcagtgtcacatcaaaggaaactagctgagttggaggagctgcacagcaggtagcataatctgaatcagcctgcctaggctggaggaggttacatttcccccctgttatcaatattaaaaaaaaaaaaaaacggactgaggcataaaatttatttatgctctatagtcctgcctgggaattatggtggctggtggtcgtgcctgtcttaggaaatcttagatcttcccaaaccatccaattctgtcattgaggctatgtgcagctagtttgtgttatatttcacacaaaacatggctctgtt

SEQ ID NO: 1385 - DNA, 2507 bp, Mus musculus
agtgcaggcctgggctgtggcgcgggacgcgacgactggcgctcaccgcgcctcctgcgggggacactgcctggactgctgaactctgtttgctgagcctggactcccagcaggcactacagtgatggagtacatgagcactggaagtgacgagaaagaagaaattgatttattaattaagcatttaaacgtgtcagaagtcatagacataatggagaacctttatgcaagtgaagagccaggagtgtatgagcccagtctgatgaccatgtatccagacagcaatcaaaatgaggaacgttcggagtcactgcttcggagtggccaggaggttccctggctgtcatctgtcagatatgggaccgtggaggatctgcttgcatttgcaaaccatgtctccaatatgacaaagcatttttatggacgtcgaccacaagaatgtggaattttattaaatatggtaatcagtccccagaatggccgctaccaaatcgattcggatgttctccttgttccttggaagctgacatacaggaacatcggctctggtttcgttcctcggggggcctttggaaaagtatacttagcccaagacatgaagacaaagaaaagaatggcgtgcaaactgatccctatagatcagtttaagccatcggatgtggaaatccaggcctgtttccggcatgagaacattgctgagttatatggtgccgtcctatggggcgatactgtccatctctttatggaagccggcgagggagggtctgttctggagaaactggagagttgtgggcccatgagagaatttgaaattatttgggtgacgaagcacattctcaagggacttgattttctgcactccaagaaagtgatccaccatgatattaaacctagcaacattgtattcatgtctacaaaagctgttttggtagattttggcctgagtgttaagatgactgaagatgtctatcttcccaaggacctccggggaacagagatatacatgagcccagaggtgatcctatgtcggggccattccacaaaagccgacatctacagccttggagccacactcatccacatgcagacaggcaccccaccctgggtgaagcgctaccctcgatcagcctatccctcctacctatacattatccacaagcaggcacctcccctggaagacatcgctggtgactgcagtccaggcatgagggagctgatagaagctgccctggagaggaaccccaaccaccgccccaaagcagcagacctactgaaacatgaagccctgaatcccccaagagaggaccagccacgatgtcagagtctggactctgccctctttgaacggaagaggctgctgagcaggaaggaactacaacttcctgagaacattgctgattcatcatgcacaggcagcaccgaagagtctgaagtgctcaggagacagcgttccctctacattgacctcggagctctggctggctacttcaatattgttcgtgggccaccaaccctggaatacggctgatggatggctttgttggcaacaaaacaggatatttctctcctgaatgttggttttgcagaccctacacagcggccctggatagtgaattttacccaggtttttaggggtcaaggaggcctctagtgacacaggaacagctgtggcccttttttgaagctactctgacatgtcccagagcccaaggttctcatttctcaggtggtgggactagacagagggagtggcaagctcagggaaggatcatttctggtgataattccattcactttgcactttgatgggcattaaaaaaaatagccctcacaagatagtaacctcaaattcctgttcttggttcttatttaagcatgggtcttcattcaactcagaaggcctgatctgtgtatattctggtgtgtattgtatggtagctctttgagccttggttggtcgactctagtgtaagtttaattaattgtatattgtgtgaatagaacaacttaaatattacagcaatacactgggctagtgtctcacaaataactgatttactcagagccacctgacagcaggccactagtgacagtttctgttatgttcctatggaaacactgtactgtacatactatgcttaaaacatttaaaacacaatgttttaaatgtggacagaactgtgtaaaccacataatttctgtacatcccaaaggatgagaagtgtgaccttcaagaaaatggaaatatttgtaaattcttggtaatcgctccgtgtaattaatgaaactattttctttaaagtgtttctatgttaaaaatagcatactgtgtatgttttatccaaattcattcatgaatctttcatatatatatgcatatatatacatatattgtagagtgtgaatattcttatttaaagtatatttttacattatgcaaatgaactttaacattttagtccaatgtgactagtcaaataaaccaaataaactgagtattttgtctt

SEQ ID NO: 1386 - DNA, 1404 bp, Mus musculus
atggagtacatgagcactggaagtgacgagaaagaagaaattgatttattaattaagcatttaaacgtgtcagaagtcatagacataatggagaacctttatgcaagtgaagagccaggagtgtatgagcccagtctgatgaccatgtatccagacagcaatcaaaatgaggaacgttcggagtcactgcttcggagtggccaggaggttccctggctgtcatctgtcagatatgggaccgtggaggatctgcttgcatttgcaaaccatgtctccaatatgacaaagcatttttatggacgtcgaccacaagaatgtggaattttattaaatatggtaatcagtccccagaatggccgctaccaaatcgattcggatgttctccttgttccttggaagctgacatacaggaacatcggctctggtttcgttcctcggggggcctttggaaaagtatacttagcccaagacatgaagacaaagaaaagaatggcgtgcaaactgatccctatagatcagtttaagccatcggatgtggaaatccaggcctgtttccggcatgagaacattgctgagttatatggtgccgtcctatggggcgatactgtccatctctttatggaagccggcgagggagggtctgttctggagaaactggagagttgtgggcccatgagagaatttgaaattatttgggtgacgaagcacattctcaagggacttgattttctgcactccaagaaagtgatccaccatgatattaaacctagcaacattgtattcatgtctacaaaagctgttttggtagattttggcctgagtgttaagatgactgaagatgtctatcttcccaaggacctccggggaacagagatatacatgagcccagaggtgatcctatgtcggggccattccacaaaagccgacatctacagccttggagccacactcatccacatgcagacaggcaccccaccctgggtgaagcgctaccctcgatcagcctatccctcctacctatacattatccacaagcaggcacctcccctggaagacatcgctggtgactgcagtccaggcatgagggagctgatagaagctgccctggagaggaaccccaaccaccgccccaaagcagcagacctactgaaacatgaagccctgaatcccccaagagaggaccagccacgatgtcagagtctggactctgccctctttgaacggaagaggctgctgagcaggaaggaactacaacttcctgagaacattgctgattcatcatgcacaggcagcaccgaagagtctgaagtgctcaggagacagcgttccctctacattgacctcggagctctggctggctacttcaatattgttcgtgggccaccaaccctggaatacggctga

SEQ ID NO: 1387 - DNA, 47573 bp, Homo sapiens
  misc_feature (46686)..(46806): n = a, g, c, or t.
atcaaagcatctaagtattaaggaaaaaatccttctgggctgagtgcgggtggctcatgcctgaaatctcagcattttgggaggccaagcaggaggattgccagaggctgggagttccagaccagcctagccaatataatgagacccctgtctttaaaaaaataataaaaatttaaaatattgttttaaaaaggaaaaaagttctgatgggcattactccatagatttaatttaaaaaggcaagcaatctcccctcaccacactaaagaaacttaatttgctggcaattgcttttagtactgcagcataactgctatggtttggatatgtcccctccaagattcaggtgttgccaatgtgatagtgttgctggaaagaggtcccagtccagaccccaaaagagggttgttggatctcatgcaagaaagaatttgggacaagttcatagagtaaagtgaaagcaagtttattaagaaagtaaaggggccggccatggtggctcacgtctgtaatcccagcactttgggaggtcgaggtggacggatcacctgaggtcaggagttcaagaccagcctggccaacatggtgaaacctgtctccactaaaaatacaaaaattagcctggcatggtgatgcatgcctgtaatcccagctactctggaggctgaggcatgagaatcgcttgaacctgggaggcagaggttgcagtgaattgagatcacgtcactgcaccccagcctggaggatgagactctgtctcaaaaaaaaaaaaaaaaagtaaaggaataaagaatggctactccataggcagggcaggggctcaacgaaggatacctatagttatttcttgattatatggtaaacaaggggtggattattcatgagttttcggggaaaggggtgggcaattccataactgagggtttctccgctttttagaccatataggataacttcctgccattgccatggcatctgtaaactgtcacggtgctggtcacatggtgctcttaacatgtgaatgcattgtaatttgcatataatgagcagtgaggacgactagaggtcacttttgtcaccatcttggttttggtggattttggtcagcttcattattgcaacctattttatcagcaaggtcttgtgccgacctcctatctcatcctggaacttagaatgcctaacctgtgaatgcagcccagtaggtctcagccttattttacccagctgtattcaagatggagtcactcttgttcaaaagcttctgacaacaggattaagaggtgggacctttaggaggtgatcaagccatgagggctcttcctttgggaataggattaaagcccttataaaagaggcttcagggagcagtggctccatagccctttgacaatccatcatgcaacaaggcatcatcgtggaaggggagagcagccctcaccagacaaccaaatatgcccaacctgccagtgccctgatcttgtacttccctgcctctagacctgttctttatacattctcctctttataaattacctaggctcaggtattttgttatagcagcacaaaaagggactaagaaaggaaaagtcaaggaacaaaatgtgtttagctcagcttaaaacaaagtctcacatgaagataagcacaccacatccttttaaatccgtttcccaaaccattgcatggggaaaacaccatttcaaaaagactaataaattatttttgaagggtataatattctagttttattttgttcatttttttttttttgatagagtcttattctgttgcccagactgaaatgcagtggtgtaatcttggctcactgcaacctctgcctcccaggttcaagcaattctcctgcctcagcctcccaagcagctgggattacaggtgcacgcccccacacccggctaatttttatattttcagtaaagacagggtttccatgttggccaggctggtctcaaactcctgacctcaagtgatctgcccgccccggtctcccaacgtgctgggattacaggtatgagccactgcacctggtcacgcatgttctttttttttttttaaagacagagtcctgctctgtcacccaagctggagtgcagtggcctgatcacagctcactgcagtctcgacctcctcagctcagtcgatcctctcacctcaacctcttgattagatgggagtacaggtacccccaccacataggctaattaaaaaacgaattttttttagagatggagtctcactatatcgcccaggctggtctcctgggctcaggtgattctcccagctcagcctcccaaactgtgggattacagggtgagccaccatgcccagcccttttttctgtttttatgcatttacacttgcatgtacaggatggggatcagattatatatatatatatttaaccaattcctccccctgcccaaacaatatgttgacagcagttccctcccttcacaggcagagccttcactgtgcagtattttcaggccctgcattgtactgaggggagacaggactgtgaggttaatatgtaaaggagtgagaggaggcacttaaggttgcatatgggaaatctccaccaactcaattggggctacaccatagcatttagccctaggcagtttaaggagatagggagttggagagagcatgattgctgagcctttctccccctttaaaagtttagcaagtgaggccgggtgttgtggctcatgcctgtaatcctaacactttgggaggccgaggcaggtggatcatttgaggtcaggagttcgagaccaacctggccaacttggtgaaaccctgtctctactaaaaatacaaaaaattagccaggcgtggtggcacaggcctgtaatctcagctactcgggaggctgaggcaggataatcgcttgaaccttgcaggggcagaggttgcagtgagctgagatcacaccactgcactccagcctgaatgacagagcaaggctccatctcaaaaaaaaaaaaaaaaaaagtgtggcaagtgaaagctactgcatgcgcatgaggacacagtcttgcacagttctgggtgctagcagtcctatgccatgtggtcatttcggaaggccatgatcaagaaaccctgcacaaggagtttccatttgggaggtggaacacaggagcacagaccaatagttctgtttttaaagtgcagttcgagaacctcaaatttggggaagccacaacactaagtaagtaataaaattcttaacatttagcatacagaataatgctatttaggccctttgagagacctacattttagttttctgcacatgagaacagatggtcttggttcatatacaggcccaatttacacccagccttcaagataaacaacagccacagctgagtgaatttaggaactccccttcccttcccagggttaccggggacttctctccccttcccccacgggaggacctcatctctgcctggggccccatttcccttgctcagttgctattttcactttacacaggaaaggcaaaagctggtgagctacctcccaaaggggaggagaaggaaaacggaaggaggaggatggagaagactgtccctttcaaccttgtctgcattcctcccccatagtcctaaggtggatgggaagggaagagggttgtaagagctgagggcatagtcttgcctattgctgtaccatgaatgcattatagatactcatctctattgcttaaggcaggcaggtgggcctgtggctctagggcctggtgtctttccaatctcacctgggttgtcttagagggctgctgggggacagcagaatctaatgaagcaccctgtggtccccacaggtctgatggatggctctgctccacctcaagatgctaagtgaggctgaacaggttctcatgactgcatggtcatgaatagagggcctagcctgtgttagaggaaggagtttatgttttaggtattggagcagatggccatagtccaaggagcagtcagtggcagaggtggggcatggggtggagctgttcgttcccacagtggaaaaggcaaccctaaatgtctacctccgttggatacttcattctttgggccgatgtgccttttcagtggtatccaaggtaactgctctaaggatgcatgcattttctgcatgttactttgtcattttgaaaatcccgcccctcttttttttttttttttttgagacagagtctcactctgtcacttaggctgcagcacagtgacatgatcatagctcactgcagcctcaacatcctgggctcaagaaactgaggaccagagagactgatatggagaacaggaggattgtttattttaggtatgcaccagctcagtggattcgcatccaaaaagctgagcattgaacaaagactgagtggggtttttataagcaaacctacaaaagccaaacaaaagcaattaatcatacagtaacaggtcacataatctatagcataactgttgacttagcataacttgtggccttgcctagctagtgaccttatagctgcgtcaaaagaaaaataagaactggctaaatacagagatttgtaaaacataatcatgcttaagaaaccagggaaaggagtaacagtaaaagaatttgtctttttcttctttttttttttttccttcaacctttctctggaggggggtgttgtctggagcccattcctttgtccttggctttctggacagcattatcttataactcttcttgaagtgagcttgctaggcagaggaaaacttgaaacttgttcttttctttttaacctttgccgtgcctgttacttttcttacagtgaatgaatgcatatttatttttaaatttctgcctcatctcagccttccgagtagcttggactacaggtgcgtgccaccatggccagttaatgttttaaatttttttttttttttttttgtagagagaggattttgccatgttgcccaacctggtcttgaactcctgggctcaagaaatcctcccctggcctccaaaagtgctgggattacaggtgtgagccaccatgtcctgcttgaaactcttaatataaaaaaaattgccagatgtggtggctcacacctgtaatctcagcactttgggaggctgacgtgggtggatcacatgaggtcaggagtttgagaccagcctggccaacacggcaaaaccccatctctactaaaaatacaaaaattagcctggcatggtggcatgcacccgtaatctcagctcctccggaggctgaggcaggagaatcgcttgaacccgggaggcagatcttgcagtgagctgagatcgtgccgctgcactccagcctgggcgacagagtgagactgtgtctggaaaaaaaaaaaaagaaagaaagaaaagggaaaaaaaaccagaaaaactttaattatttttattttattttttatttttgaaatggagtttcactcttgtcgcccaggctgaagtacaatgacacgatctcagctcactgcaacctctgtctcccaggttcaagtgagtctcctgcctcagcctcccaagtagctgggagtacaggcatgaggcaccacacccggctaatttttgtatttttagtagtgatggggtttcaccatgttggtcaggctggtctcaagctcccgacctcaggtgttcccacctgcctcgcctcccaaagtgttgggattacaggcatgagccaccacacccggccagaaaaacttcaattatatctgaaatccactcacattatcataagaaacttacacatatcaatgaaaaaaaaaagagatactgaatttttagaatccaatttcaaattgttcacaatttaagacaataataatagttgtaaatgtattacctacgtgtctgtacagcttctcagctgaaagttattatcaaaagtataaagaagttgttgttgaaactcttaatctgtatagctgtttcaacatgaaaccataaagaaaaagttatgatcatgaaatcaggctcaagttcctcttaactttaaaaatatctcatttaaagctttattcaaattatctactttcaatactttgtattttattgtttttttttaacaaaaaacaacatattttcgccaagtgacctatagctatgctcccaatttattgcagttattttattcacaaaattccatattttatgaatataaaaaactgagaaacaatgccccatatcatattaattagtctagagcacaattgtggttacatcggttaatgggccaacagggttacctacccattgttaataattttctttctgtgagtaaaataatttggatttccaaactacaaattacaaacccattaatgtcccaacctatgagatggagcaagcttcttcaggtaaactgcaatcggttacagccttatttgcaaatgcattttgcttgcttcaaacagcttctagagagctgtttcgtaatgtgctttaggatcacttccagaataaccccctatggttgtgtgcactgtggctcaagggacttctcattggtaggtttaaaactcacttagctcgcccctagaagagcaggattgtttttgtaagcctgcataaaaaacaaaaagccagaccagaaaaatgcaaggagtctaggcaaggtggctcacgcctgtaatcccagtactttgggaggctgaggcgggcagatcgcttgagctcagaaatttgagaccagcctgggcaacatggcaaaaccccgtctctaacgctacccaaaatacaaaaattagccgggtgtggtggcatgcgcctgtagttccagctatctgggaggctgaggtgggaggatcacttgagccagggaggtggaggttgcagtgagctgagatcgccccactgcagtccagccagggcgacagatccagaacctgtctcaaatacatcatacatacatacatacatacatacatacatacatacatacatacagggagtccacagactttttctttcttttcagttgctctctcccttttggcctccttgttaaaaactctacatacgttttcaagtaaaaccttctaatttaccccaacagatgaacctgctctggattaagccagaagcaagagagaaccctgctagaccagccatttcaccagctccctaaaatgcagctatatttgggagacttctgtgtaggaagtaaggctaataatgcagttcccagaagattaggtgtggttttaatgagctcacacaaggcgggtggggaggggagtggttccatggttctatttttaaaactcgtgtaaagatcatcctttgttgtctaaacacggcagtagagaaagagacgtctctgtttctcacgttacaatcagaggtaacaacctgtgctaacctggtttccagcgaaaaggccaaaagtgtactgataacttcggcttcagctgagactgggataacccgcttgagccagtgccaaattccacccatccggcgcgcaagcgagcggggcttctcctccccaaccccggcccaggctgcttctgccgggtcagtgctgccgggttggtggaagctgccttccctccctccaagatcagaaaggcggagggttcaggaaggggttctcctctaggtgcaagggactgcctggatatttggagggaatggcaaagccctgcttcatgaggtgaatgaatataaattaaatcgctctcgtatttaaaataacttgacggatgacagtgcccattcagtcaatcggccctcgacgttggatttgctacctgggcttgttgtctgcgagttaaggtcctgcaaaaagcccctggcttgtcacctcaactaacctatctcctccagcaattctctcaatacatcctcgggttgtattgtaattcattttccatagcagaaatgtggagggctctagagaaggtacaaggcaaattttttttttaaattttatttttggttggccgcggtggctcacgcctgtaatcccagccctttgggaggctgaggcggacgaatcacctgatatcgggagtttgagaccagcctgaccaacatggagaaaccccatctctactaaaaatacaaaattagccgggcgtggtggcgcatgcctgtaatcccagctactcgggaggctgaggcaggagaatcgcttgaaccagggaggcggaggttgtggtgagcccagatcgctccattgcaccccagcctgggcaacaagaacgaaactcagtctcaaaaatttttttgttttattttattttttaaatttgagacaaggcctcgctctgtcgcccaggctggagtgccatggcgcaatcatagctcacggcagactcgaactgctgggctcaagggatccccctacctcagcttccgaggagctaggatgacacgcgtgagccaccatgcctggctaatttttagattttttgtagagacggggtagctatgttgcccaggctggtctccaactcctgacctcaagtgatcctcccgcctcggcctccaaagcgctgggattacaggcgtgcgcaaccgcgcggaggcaatctagaaactgcagagggagcacggacctgggcactgggaagaatagggcgtggacttggagtgtgaccgcgtttgaatctgggttgtgcctgggacaccccacctcctgggccgtaggtggggggggagagagagagagagagagagagagagagaggatgtcgaccttacatggctcctagctctccgcgctctagccgaatgcctggttcctagtgggtgcttgatacgtgggaaatgtagggggagggggtggcggggcattgggaatgtcccgcagagtggatttcgggagagtggcgcttttctctagaactctcttccggttacacctggagtaaaagcttgacactctagaaggaaaaccccagatgagcagctaggactgagggttagcggtaggcgggagcggggagatagtacaagtacgcttcctaatgaggcggtgccgcaaaataaccaattttaataaagactgcagagaagaaaaccaggttctgctggcggagtgcacaggctcccagccgagcgcccaacaaccaggttccgggcccaccctgccgcagcctcttggaaatctctaagttggaatgtgtgcgtgcgcaccacgggtcactgccctctttgtgtgtgaatttgaagcgaaatctgggcgaggcggggccgtgctactagcaatcggacccacagtcgcggttccaagaagccccgaagcttccccggcttcccgcagcactgctgggagggcacacggcgcctctgtccccaccccagagcgtggggcgcgcggaaaaaggtctggtgactgccctccccgccgccccccgggagcgtgccctcccgccggaccctgggactccagagaagcgccgagggcgcgagtacactaagatatacgaccttccctggggaccgggaagggcacaaccacctcttgcaactccgccactaagacgccttgggtcaccaggcccgggggaaaactcgtccccgtcccaggctctcgattcgggccgcagctcacgtcccgcgctcctccctgcgcgccgctctgctcctccctagtcccgcctccagctccgcccgggcgcccagagggcaaatgaggggcggcggggtggcgggtgggggggagacgcggaatttcccagcgcgggggctctggcttaccctgcaaccgggcagtctctttctgtttacggagagaaaggggaaatggaaaagtcggggaggcggtggctggcgtccgctgcgccgcccctgggcaggctcagacgccgtgagtcaggggcagagcagggcggtctgagcgtgcgggcgacgcgggtctcactcgtccgctccgctctggactgcgcgccacgctctggggtccggcgccctggttcctgcttctgccgctgccgccgccggatcccagtggcccggcgtgctcggctcccacaggcctgcagccagcatcgcaccgaaccttcggggggccgcggctggagcgctcggccggcgtgggagcgccaaggccgcaggtaatccagggttgggggtctccggcgtgtctttcgggtcgcgtcccgcctgggtgccccggggattcccatgcagaaatggagggtgcccccagcagaggggaaaactctggcgtgggaagaggtgggggcgtgcccacagctgcgctcgcgggtcgccggctgcaccaggcacagctggaaagcaccttgcgcaagggtctcacggggtgcagactcgcgactcctcccccttcctcctccttcccgtatccgcagcgccagggcagtgctggtctgggcagtacgcggggaagcggggacccgctgtcactgcgcctcccgctgccgacgccgcctggacggccgcactctccctgcccgagacccggtgagtgcagctcggaggctggaggacccgatcctcccaaatgctgggtgctttgataatttataagccttttaggctcccttgacttagagaaccaggaggaaaggagtgggagtgtgggttggcggagcccagagacttgtgaatggctgggactaaattcaagtttgtaacccggactctatcccatgactaaagaggtcatagcagaacacgaaggctgggcttttggtctaagaaagaatactaggagaaaaaaaaagttattttcacggaagttgttttcgagcgatagtgcatgatcaggactctgaaatttttctagctctgggcggagaaggacgcctagggattgtctccatagttaacaggggaaggccaccggctgcctgtaagagagaaacgttgcgatgcttgtctatttcacttttgggaagacaagattaaaggctgctcttgataaaaaacagggacagaaaggctcttgcagttgctttacatacctgtggcctgagtcgtttgtgccaaggagagtgtaatccacttccagctgacgcccccagctctctgcgacggattgaggtttgtgtgcaggacgtctggcatacggcccatgaggactttgtcgtgtaaagcaaatgggaacgttgaggcatgtagaggttttgaagcagagtgtcggtccttccttccatacgcctgaaacgcataatccggggctttttgagagcaaaaacatagtcagaaatgtgccctgagggagaatgtactattttggcacacatatgtatatatgtatatataatttttaaattttttttgagagggggtttcactcttgtcgcccaggctggagcgcaatggcgcgatctcggctcactgcaacctccacctcccgggttcaagcgattctcttgcctcagcctcccgagtagctgggattacaggcgcccgccgccacgcccggctaatttttgtagagacagggtttcaccatgttggccaggctggtcttgaactcctgacctcaggtgatgcaccctccttggcctcccaaagtgctgagattacaggcatgagccactgtgcccggcctaaaaaaatattttaaatgagaaataacacaagtaatagtcattctttgttaggcagaagcatatgctgttatgctggccattttcattcacacttgccaggaaacactcacattttgtttctgtatatggaggcagccaagagtattatgttaatgtttaggaagagaatttcctcgtgattttattgctgatttctgaaataattcagtgtaactaattttgactgtatttgcacatctctccaattccaaaagctggcataattttctgtttggttaggaagtaggaattttatgaggacttttattgtaaactgtgtcaagggaaaaatcatcttatactaaacgtctttattgccaaactagaataccttcacaatctgaactttctctagatgggcacagatcatgaataactcagaaaccattagcatattgtgtgcttaattaaggctggaaagtgctgaggctttttgcaggcgcagttagcaggcgaactggtcagcagggtttctggggaacgtagatttgcgtgacaggggccctgtgttgctaaggaattaatgcaggcactgagaaaagtctcagcgtcagacactcctccacctcccgggtcctgcttccctccctctcccctttccaggcaactcacagtttaggggtgtggttgtgtgtgttcaagctcttgggttttacatataaatgcctgagacttttctgcagggtttaaaaactaacatcttgtcttacagctcttttaggatttgtcttttagaatctccagtcctcacaggaaaaccccccaattaaaaaaataaaagaataaagaataaaaagaataccactactactataaaaaaaaaaaaaatcctctaaaatttgtcttcccagatcagcagagtgaatttgaactgtgtggacttttttcctctttctttcttgagtcatgttagtactgagaacttttttttttttctgtcaaatcatctgtttgataaataagtccaggagacttggatcctttcaacccctgaggccctaaattaggctgttttttttttaacctctgtgtttccagtaaattcgacaagcagaaactgcaactaaacggctcagtaaaaccgaagtcaaatgttcctccattaatctaagaagttgctctcctaactcagcagactccaagaacctgaatcacaatctccctcgaagatgtacaagatctcaggaggggaagctgccccctcactctagatttcacggtggtgataacagccatgaaagcatttcataggtttctgccttttttttctctctctttatgtcttgttttagatgcaatcttcttaccgcgaagaagccaggggaataggtagccacatcttgtttgcagataagaaaggaagctaacgcagtatctgcaaagccaggagtctgactcagtacttttctcactcatgcatacaaagcagctaaaaatgacacagcttatttaccatgcccctgacactgcactgagcactttatgagcttgaactctgttaatcctcacgaccacctcatgaggtaggtgctgttattacttccattttacagatggggaaaattgaggtcgagagaggttacgttacttgctcaacgtcatgcaagcagtaaatgggagtgtggggggaggcaatgagatttgactccaagcagtctgagaccagaggaatgttggattgcaggatgctaaactgctttcctcagacacaattcatacgtcagaaaatgaccatcaagtaagtgaatgatgacactaaattgcatggttcttttgtcaaatgaaattcactgagaggcagatggctgggtcatgcgtgcaggtggctctgcagtggagcatttcctggagctttgaaatgaagctccagattgatcagacgtgcgtggctttagccctgagtgtcctgtgtgttaaaggcttgtgcttctcagaacttgaaatacctttcagaaagaggctatgcttttgggagtgcaatcggtgatttaagtaaaccaatgtgccttgaaattctcttagatctcttaggaccttttgtcttttctccttcagaacagagttgttctaaaatcctgagtaacaacgtcagtttttacccttgctttactttctttttctcatctacagatctccaagtgtggcagctgatttgtatataagagctgaaatgcaattttggttaatatagtcacttggacttgcttatgataaatttgactttcctggcttctttctactactcacagcttctagaaggccatttatttatatattaatcttctgggaccctcaagatgtttgctttgcactattaaagaattctggtcctaagggaggacagctgaatcataggttaaatgtatcatcatctttctcatactcatcactgggagaacaaggtttcctgtcatccttccaattagctgtttaactcatttgcataagaatcattcctgaaacttgacctattgccatcaaatttgtgtagattgaaatccatttttccagcttctggctttcagggcctgagttttatttgccaagttagctcctgcatttagtgaagaggttatttttctttaaagtcaccagaggcataaaaaagccatagcgattcttgcagggagggtgccacttcgggggaatagctgggttgtgtaaggttggaagccctaaagagccggtagcctaaggtcttcaaagatttctgagctgctcttgattcgtgtgtatgtttagtgaaagtttgttttcagtgcctgtagctgataccactgactctgtgagtaagagtaagctctctggatctcaggtttccctctgcaaagtgagctggactaaaggttatcttaggtccctttcaactctgcactgtcaacttgaattcatacacacagttgacacagaaccctcgttttctgaacaaaagcatataaaatcctgttgccaatccttgtatgtcagtttcccatgggtcttgaatgcaaatacaaatatcgtaaactaaatatttgtgttttctttcctagactctccagaaagagcaacagtaatggagtacatgagcactggaagtgacaataaagaagagattgatttattaattaaacatttaaatgtgtctgatgtaatagacattatggaaaatctttatgcaagtgaagagccagcagtttatgaacccagtctaatgaccatgtgtcaagacagtaatcaaaacgatgagcgttctaagtctctgctgcttagtggccaagaggtaccatggttgtcatcagtcagatatggaactgtggaggatttgcttgcttttgcaaaccatatatccaacactgcaaagcatttttatggacaacgaccacaggaatctggaattttattaaacatggtacgtttctttccgatcagttgggtgctatgtgctcagctttcctgctgcagcttcatttaatgcagagtggtgtttgaatttggcttagatgggctggcaggcatgattttaaaaaatgtaatcatcagtaagaagtacttccatgttaaagatgcaaaaaaaaaagtcttcattaaaatttctatttaaagattcttgatcatattttagtagtatttctacaaataggtaattaagaagaatgtattttggccgggtgcaggggctcacgcctgtaatccgtgcacttggagaggccgaggtgggtggatcacttgaggtcagcaattagagaccagtctggccaacatggtgaaaccccgtctctactaaaaatacaaaattagcctggcatggtggcgggcgcctgtaattccagctacctgggaggctgaggcacgagaatcccttgaacctgggaggtggaggttgtgatgagccgagatcacaccactgcactccagcctgtgtgactgagtgagactctgtctcaacaacaacaaagaagaatgtattttaatttaacagttcactaaaaagtttattcatcagttatgcagaaaagaaaggcttaatgagactccttcgtctgagaggggaataaacactttgtcactaattaatcttgaaggctgaattatttgttcctttcttgtcacatcttgaaatgttattaattcatttcttgcaaaaatgtagtatgtaggcagtaaatagctatccacagattcactctctttcattggcaaagtatgaatggcaagtgatatatttgcttaatcatcgcaagtatgcaaatcatgcaaaatattgtggcaacattttgttgccataatagtagatcaggtgatgtgtttaggtgtgcctgggattctgtcaggcttttagtatgtcagaggtgaacgtaggtgctggctaaaggtaacctaatatttttaaaaagaataatttgcaaaggagtaggtggtagcttgcaaaacatgcttattgatgaaagtgacgccctttcttttggtgtatctaaatggcaaaatggctaatgttgggggaaagtcggtgctgaatgagtgcggagtccagaaaaagtacttaattattttgtttttttgcataccacattcatttaattaaaaacaacagagtaatttaggtcaggtatgtagtgaattgttttgtcagaagccagtcatactcaaccatagctcacaatggagcaagataatattttgcattgttgtgtgactgctttggtctggctctatcaagctctatttaatagtcgactaagtactttaccttcagaatatttcttccttttataaatgagaaataatcatttgaactagaagccatatctgattttcccaaataaaggatagttggagaactcgggttcaaagttatatatatgtctataccgagaaatataattgtttgtgtatttctctcatttttaacgtatttatttgttaaaatgggaattaaattttttttaaaatcctgctccttctataaaaatgagtattttaaatgaaaatatgcagaaaaaaaaccaaagtattcttgcttgtaaatatgcaaagacttaggtatgtttgcttattccgtggcctatctgggaatgtacagaaagaaattcaggaaatttagaagaaatacaaagaaacaacattctgaagtcttttaggaatgggaccagaaaagttaatcctaaaaagaagagagactaagacattaagatgaggataaaattgtatcagcaaagggtttgagtaaaatgttgtcattacctgctgtgggtcctgtgctctttaaaagaacaagtacataattaaggagaattcttttttttttttttgagacagagtctcgctctgtcacccaggctggagtgccgtggcgcaatcttggctcactgcaatctccgcctcatgggttcaagcaattcctctgcctctgcctcccgagttgctgggattacaggcctctgccaccatacccggctaatttttgtatgtttagtagagatgggttttcaccatgttggccaggctggtttcgaactcctgacctcaggtgatccacctgccttggcctttcaaagtgtggggattataggcgtgagccaccgcacctggccaggaaaaattttaagaataaacaaatacataagtaaaggcagggatcttgaaaaactttaaaaagatttttattttaaaatgatcaagaatataacatataaaacaagaagactaaaaaacagaagagaataagaggaggaccttaaaatctattggatcttagatatggcctcgctaggcaaatcgacccagtggtcgatggctctggggggctgcggttgactttcctgccactcacattaaagatggactacattgctgtgcctgctaggtaacccatcagagctccatgcttcataaatgatagcctaggaattgggactgtcatctctgattgtagtcacttcaagacagtagtgagggaggcaaggcttgctttcggctccctttcatcctcacgtggaacattggaaccacccaatgttcaagatctttctattcccatcatcttccacccactaccctatcagaactttactcactgggcttcatttgctgctctctaactctcagctttaggaaaatagcagctgattggttcctaggtaaaatccatctatatgatgtatctacatagggatggggaaactttcattcaagtatttacctattcatttgctagacacagcttggacatctgcagtgcgtcgggtgctagagatagtatggaacagtctgtgcctctgggagcttgctgcctggtgcatgcaggatgcagttgaataggcagttatagcagagtatgctgcttcccagcacgtgtgcatgctgtttgctctggcagtgcacaggcaggatactttacatagccatgagtgtggtagaaggaaggagaatgtcagcacagccttccaagaaggatttatgcctaagccgaggtctgaagtgttgagttggagtcagctagatgaagtggacagggtccaggtggagaaaacagcatgtgcagaggtccagagacatggagacctgatgtattcaggcagccaacaaccacaacaccattgagttatttagacagggtagagaaccaggaattacaaaagcatcctgaagaacaggcatgttcagtgattgtgtgtgtgatttgactaaaaataatatctgttaaagatcccaccaacatccagcaagatctggggaagaagctttgggagactaacctgggaattgctttgggtaagagtgctgcatgttatttatcatctacgctgattcataacctggcccgggaacaaataatctaaaatgagttccaaacactcaactctttggtggttttatggggactgaaggaccccaaaaccttcaccccttttttacaactttatatctataagtgtgagagctgaagatgttccttagggcttagtcatggagtcatggcttctcagagttgaaaaagcctttaagatacttgagtccagccctccgtctagtactcaaatcaccctgttcatcatctccaataattggtagaacattttggtatgttcttgaaaatctcctgtgacaaggagctcattacacactgggacacaaagtttcctatttgtccagtcctgactgtaagaaagttctcttccttatatagaaccaaaattcatctctgaccgtttagtgcaagccctacttattggccattaaaaaaagtgcatatgatgagcagtggtgaagacgatgggtcctgaattaaagtacctgggttatgtagttcagctctgaaatggattggctgtgtgaccctgggctggtcatttcacctgtctgtgcctcagtttactcattcataaaatggataacatcatgacactccatagagttgatatttggagcaattaatgaatacatgtgacctggttacacatagtgagtgttaaatgaactcgaggcattgtgggagttactgttgtatacaattgttacaccccttccttatgacagtccttccaaaattttttaaattgcatgttccccagatcttgtctcttctttcacatgcatttccaactgtgtgcatgacttctcatgaattgtactattaactctctcatcatctgggcaggaccctgtgaactcaagcttgtattagtgtctatcttagagccatattttgaatgtgaggatccatttgttgtgatcagcagagtgggacagagctagcttggcctttgtgctagataatatgcctgcatgaatatagatcgataccatgtctgtttcatagtagcatatcacaccagtcacttgtggaatctattcttactataatacttaaagagttttctcaatatgctgcttcttggcccagtgttgtttcgtataaatgacagtgatctggatgaggagataggaagtgtgcttataatgcctgcccttacaggtgattttggtaagttgaagaactggcagagataagcagcatagagttccctaagatggtttgatagcgctgggtgtggtggctcatgcctgtaatcccagcactttgggaggctgaggccagaggatcacttgagcccgagtttgggaccagcctgggcaacatagtgagacccccatctccacaaaaaaataaaaaagtcagccaggtgaggtggcacacacgtgtagtcccagctacttgggaggccgagatgggaggatcacttgagtctgggaggttgaagctgcagtgagctgtgatggggccactgcactccagcctaggtgacagagcaagaccctgtcttaaaaaaaaaaaaaatttatacgggcccctagaaagaagaaaaatacccatctaaaatttaaatacagggttcgagaccagcctgaccaacatggagaaaccccatctctactaaaaatacaaaattagctgggcgtggtggcacatgcctgtaatcccagcaccttgggaggctgagacaggagaatcgcttgaactcaggaggcagaggttgcgatgagctgagatcgccccattgcactccagcctgggcaacaagaacgaaactccatcacaataaaataaaataaaattaaattaaattaaatacaggggatctggggctaggggaagaaccaggcatttgcagaactgcaaactggtcaggacttgcacgttacactagaaattcagggcccatcatgaaaagagcctaggagaactcataggcattgaaagctggtccccagaatctgggaagttataaaataggggtgaatgggggtgaaggaacttgcattatttgatctacagaggagaaggctaaggtatgctcagaaaatatgtaaacacataaataactgagttatttttataacccggcatttaataactgggttttcatcttagctcagctttaattatggccttctggaatatacaaggctcttacccagactaggaggtatgctttggagtcagacagatctgagttcaaatcctaatgccagcactaactagcatgttccttaacctcttgaagtcagtttcctcatctgtgaaatggagataaaaatagtagttaagctcagactattgtagacttcgatgagataatgtattgaagtactgagcacattgctgtacttagaactcaacaaatggctgaaattatcttttgtcctcttggacagaataagaggacactggttcgaggtgggttataggccaggcacaggtggctcacacctgtaatcccagcattttgggaggccgaggcgggtggatcacttgaggtcaggagtttcagaccagcctggccaacatggtgaaaccccatttctactaaaaatacaaaaattagctgggtgtggtagcacgtgcctgtaatcccagctacttgggaggctgaggcacaagaatggcttgagcctgggaggcagaggttgcagtgagccaagatctgccactccactccagccactgcactcaagcctgggtgacagggcgagactccgtctccaaataaaaacaaaaacaaacaaaaaaacctaaactgggttataacaaatttaggttggtaaaactttcatgaagatgagttaaacacagagatggttcactggagggtgaggtgaaatcaggcctgtaaatatttaatgacaagaaacggaaaatcagcaagtgctcttgagtgttgtgagtagggttctgtctaaatgtgaaaagggactaaatctatcatgttctcagcatgctgcaaaagaggcctccagcaaccagaggcgacatacaggttatctttcaaacaaggcaagaccgccatctgcacttattcatgttagctctagggccctgcacagggtctcacacagcagaaacactcagtaaatagtttctaaatttaatgacttcatatttctaagcattagagttagtctctgctttattccctgactaatagtgaacacatctgtttgtgggatgtgtagctaaaattagcagtggtggagctgactgaatggcccttacagttactagaactatttctgtagccgtgtccctagtaagaagtcccatgcatctgcagatgaatcaagagttcattctcttcccatgtggtagatctggggatttgtcacattcccttcagcagctgctgctgcctcttttaagttttaaacaaaatagaaatggagtctcactgtgtcacccagactggtcttgaactcctggcctcaagtagtcttcccaccttagcctcccaaagtgctgggattataggcgtgagccaccgcacctagttgttcagcttcttctgttacttgaaataagttaaggtcctttaatagtttcacaattcctgagccaggcgccgtggctcacgcctgtaatcccagaactataggaggctggggcaggtggctcacttgaggtcaggagtttgagaccagcctggccaacatggtaaaaccccatctctactaaaaatacaaaatttagccaggcgtggtggtgcgtacctataatcccagctactcaggaggctgagatgagagaatcccttgaacccaggaggcagaggttgcattgagccaagatcgtgccattgcactccagcctaggcaacagagcaagactccatctcaaaaaaaaaaaaaaaaagaagaagaagaagtttcataactcctgaattcagaatcagaagccataatattactgattacattgaggagaaactggtactgaggcgatttatcccttgaaagaacactctggacatgttacaggcacgcgttccagattgcatttcccatgaactaccatattattttgttttaattttaattattttctcttctaattttttcctctttaaaaattgaaatatattttatatatagtcaaatacacagatgttaaatgtccaattttacgagttttgacaaatgcatgtgcccttgaaacccacattgctgtcagaatagacctcttaattcttgttttattattttaaaatttatattgtgtttttatttttttctgtagaaatgaagtctcgctatgttgcctaggctggtcttgaactcctggcctcaagatatcctcctgcctcagtctcccagtatgctagtattacaggcgttatccactgctcccagctgtctctcaatttttgaatcaactagtttcaaaacttctagttctaagagttggcttgctcatgaaccctgggaggtcagggatcagccatctcgtttgtggctgcctccgcagcaccaaacacagtgcctagcacctattttgcaagcaatagataacaatgcatgcgatagatattaagtgagcaagtagatgcaaagtaattctgccctcacttaatttacatagcattgtcaactcatagctctgacatacgctgtggttttccaaaatcttccatgatcatcagttaattttgatgttctttctctgtatgcgtcatgtgtgagtaatagctatgtggactaacaggttcgcacattgtaatagaaacaagtcaacctgcaggcacggtttatatttacgcaatctttattttcagccttttggttgccgtagtcatgcttttttagataaataatttttaaagttctatttggcaattaattactcatgagtaggtggaaatatgaccaggtctgaccaggcacctgcatctgttacatgctctctctgacttcctcaagctctaaatatagtctctgtacagttggtaggattaagcacagtgacattaatttcataactgtgtatcagaatgctgctaaaataaccagcttcctaataggtgggtcttagaaaaagccagcttgactgaagttctcaccgtctcacatttttattttgttgtaggtcatcactccccaaaatggacgttaccaaatagattccgatgttctcctgatcccctggaagctgacttacaggaatattggttctgattttattcctcggggcgcctttggaaaggtatacttggcacaagatataaagacgaagaaaagaatggcgtgtaaactggtatgtgttttctacctagataacccacactgtgtgtttggcattctggcttttgtttttttgtccatttgcattaaccaaaggtttttatcgtttgattgggtcttatctgagggtgcactgcctcaaagcatttgtttttctgaatttattggctacttggggccattcagccctaaaatctctgtttaggtgcatagttgattttaatctagatgattaaaaggataagtgctggtttttaaagcactgatttggataaataacatcatcactcttggagagaagtagagaagagccatcctgcaaagtaggagcaattctctgtgcttctcctttcattccgcccactgcagagggggccaggcagaggcagaaactgggaaggaggtagccttttcaggaaggcagatttaaagggctgaatttaaatacatcaatgattgaaaagaccctatcccaaattttttattattattattattattattattattattattattatttgaaacagagtcttgctctgttgtccaggctggagtgcagtgtcggggtctcggctcactgcaacctctacctcctgggttcaaacgattctcctgcatcagcctcccaagtaactgggattacaggcacctgccaccatgcccagctaattttttgtattttcagtagagacgggtttcaccatgttggccaggctggtctcgaactcctgactacaagtgatccacctgcctagccttccaaagtgctgggattacaggcataagccaccgcgccctgcccttatcccttcttattaaacaataactgccaaggtgccactactttggaaaactgtatctacataaggtgagcattcacaccccctatgactcaacaattcctctcctgtaggtgcactcactccacagagacctgtccacgtggccaccaaaaactaaaagctatgtggtagcatgttcatatctgcactatttgtaagggtcccaaactagaaacttccaaaatgctgaaatgggatatatttacttagtgaaattctggatagtaaaaagaataaatgatttacaactataataatgtggattaatctcataaccattatgttgagcccaaatagccagacacgaaatgagatctactgtatgagattctatttatataaaggaccaaaacaggcaaaacaaaatctgtgctactggatgtcaggatggtgggtacccttggagagtagcgactggaaggggccaagaggggggcttcttgaatgctagtagacatctgtgtgttttttctggtttgtttttctttttgagacggagtctagctctgtcgcccaggctggagtgtagtggcgcaatcttggctcacctcaacctctgtctcccgggttcaagcgattcttctgcctcagcctcccaagtacctgggattacaggcactcacccccacgcctggcctgacatggtttttcattttgatttagatgggggttacatttgtacgttcagttgataattcattgagttggacccatcatttttacacttttttgtatgtctgttttactttaattaaattttcaaaagtataacaaaataaaatacactcacttttgatttaacaaaaaataaaataaataattgccaaatattatgtcttggtttctcttattgtaataagagagtagctgggattacaggcatgcacaaccaatgcctggcaaatttttgtattttttgtagtaacggggtttcgacatgttggccaggctggtctcgaactcctagcctcaagtgatctgcctgtgttggcctcccaaagtgttgggattacaggcatgagccaccgcccagcctcagtgcttattttaaatacattgctataatagagtatgaactgtggcaacaaacacttcatattatctcacaaccaactgaaatattgaaaatacaacctaaactcaaggtaccatagatactgttgtctaataggtgggaaattatctcttttttgattcattcataattttaaaactttggatagatttctgacttctaaatgaaaagagtaactcattattttgttttttattttcttgttctgaattttatacttaaagctgactaacatagttaaaggcagatctgaggtgaacattattgtaactgggcagtccattttcacacagggcagagtattcttgagggcatttatttgccttttgttttttgcattgacctatattttatatttttaagatgactttggggttatttagaatctcgcttgtatttttgtgttctagatcccagtagatcaatttaagccatctgatgtggaaatccaggcttgcttccggcacgagaacatcgcagagctgtatggcgcagtcctgtggggtgaaactgtccatctctttatggaagcaggcgagggagggtctgttctggagaaactggagagctgtggaccaatgagagaatttgaaattatttgggtgacaaagcatgttctcaagggacttgattttctacactcaaagaaagtgatccatcatgatattaaacgtaagtatctttggacatatacctttttggctcaaagagactagttattcaggagacaaacaagctccttcctgtaatctgaagaccctccatggagggtggaaagctccctcagagcaccgtccgtcttccttctccagagacatatcttagaatcatgcggggttactagagctttcaaagtcataaggaaagattactttcaacagttgttgaaaggttatagctacatacctattaggtactgctctgttaaaaaggcttttaaaattgcaatttaggctgggcacggtggctcacgcctgtaatctcagcactttgggatgctgtggcaagttgatcacctgaagtcaggaattggagaccagcctggccaatgtggtgaaaccccgtctctactaaaaatacaaaaaaaaaaaaaaaatagctgggcatggtggtgggtgctggtaatcccagctacttgggaggctgaggcaggggaatcatttgaatctgggaggcggaggttgcagtgagctgagatggcgccattgctctcccagcctgggtgacaagagcaaaactccgtctcaaaaaaaaaaaaaaaaagcaatttacttaaaaacatacaaacacagagacaagtatttttgagaaacaaatacctttttcattttttataccaatgtaacaataatccattaaacacacctttactaactgttttctaggagtctgatatgatgaggaaataggtaaacctttaatagccagtactaaattagagtggcacaactttcactgggaaaaaagatgggtattttacttttctgttttagaaaagtggcttgacaacagtatgcttatgtcttagagtttgaaattcaagttcttgaacattattaatggctacaatcattcatacccacattggctgtattcttgatggatccaaagtgattttcacctcaactctgaatttcattctcctcttttgaatataatacaaccatctcactagaggaagcatttcagtcttttctgattggagattcattattgttttagataatgttttcatttgacttatgggtatataaaaaattttatcttaaaaatatttcctctcattttagctagcaacattgttttcatgtccacaaaagctgttttggtggattttggcctaagtgttcaaatgaccgaagatgtctattttcctaaggacctccgaggaacagaggtaattatgttcacatgaaaagggttactattttattaagaataaaaaggaaaaaatgttctagaattattgtgggaacgaaggacaaagaaggggaagaaacccactgcattaaatcattattttccttggaacacatttaatgagcacttgctctgtgtcaagtactaagtttagcacttgattttttattgtattttttgctatgttatttataatacataatagtatttgtaatataatatacatgttgatatatataatatagaacatttgtacacaatgtcatgtcaaaatagatcacattggccaggtgtggtggctaatgcctgtaatcccagtgctttgggaggctggggtgggaggatcaattgagcccaggactttgagacaagcttaggcatcatagcaagaccccatctctataaaaaaaaactggtttaggctgggcacggtggctcaaacctgtcatcccagcactttgggaggctgagatgggcggatcacctgaggtcgggagtttgagacaagcctgaccaacatggagaaaccccgtctctactaaaaatacaaaattaaccaggcgtggtggcgggcacctgtaatcccagctactcgggaggctgagggaggagaatcatctgaactcaggaggcagaggttgaggtgagccgagatcgtgccattgcactccagcctgggcaacaagagtgaaactccatctcaaaaaaaaaaaaaattagctcagtgtggtggtacacgcctgtagtctcagctagttgggaggctgaggtaggaggattgcttgagcccaggagttcaaggctgcagtgagccatgggcattccagcctggatgacagaacgagatgttgcttcaaaaaaaaaaaaagccccccaaaatagatcatatccacagttcggctttattttgtgtgtttttgtttttgtttttgagacagagtcttgctccatcgcccaggctgtaggacagtggcgcatgatctcagctcactgtaatctccacctcctgggttcaagcgcttcttagtctcctgagtagttgagattacaggcatgtgccaccacatccagctaattttttttttttttcagtagagatgcaggtttcactatgttggccaggctggtcatgaactgttggcctcaagtgatcctcccacctcagcctcccaaagtgctgggactacaggtttgagcccccgtgtctggcccacagttcagctttaataataattatagaattagagttaactttataataagtttagcacttaaaaagcagtatgttatttaatccttacaacaacccagttgttgctattgttattcttattttacaatcaaggaaataagtttgcagagattaaaataaagtgtccagagtcactcagtgacagaccctggacttgaacccagttctttctaagtctaaccctaaggtctaactgctacataactttaaaaaattataatattacatacattattaaaatatattagtgatataactaatatcactgagttttggctcaatgacagtcttaactatggtcattaatatttatgaggactctaaaggcctctctttgagcctaggaattctataataaacctcaagtagtgagcataaatgtatcttatttaaagatgtaaaacagcactcatgtttaactcatctgtgaagcaaaaaatgacccagaaaagcctttctttcctgactctaaatgagattctgaaaaatgcgttcgcgggcttccaagtaatgtatttaacattcacatcattaggctgactgggtgattcaattagccagtgtccactgggcatctgctatgtggcaggttcttgtgagcaccaacgaggaagcatgacacaaggcagtgaggagcaagccttagtggtactccagcgatcctcactctttggtgggaggacttactttaaattacctgaattattaaaagagcaaccgtttagggatgggcgtggtgttctcacacctgtaatcccaaccgttcgaaaggccaaggaggtgggggtggtttgcttgagcctgggggttcgagaccagcctgagcaatagagtcagacctcatctcttttgaaaaaaaaaaagaaaaaaagaaggaagggagggagggagagagagaaggaaggaaggaaggaaggaaggaaggaaggaaggagaaagaaaaaggaaggaaggaaagaaaaagaaggaaagaaagaaagaaagcatgcacaacagtttagttcacagttgattgtgatgggcacaaggttggatgcaagcaggaaggtaaatgggtgtaaaagctgcctccttggcccctcaccactaccgggggaagctgcactgcctgagccactcagccccatgcccttctctttgctggaagtgcccataggaaatagagagagggtctttggctgcacctctatgtcaggattaccaggtcagtcttggtgttcaatcagatgacaacccttagtctaatctagctagtatacgtgttgcactgaactggattgcagccacaaaaaaattgtcttcctttcaaaccagattcttccagcctgggcaacatagtgagaccccatcgctacaaaaagtaaacaaacaaacaaaaactttactttttgtaaaaatggcatggtggtgcatgtctgtagtcccagctactcaagagactgaggtgggaggattgcttgagcccaggatgaggctgcagtgagctgtgattatgccactgcacccatagcctggaaaatagaacaagaccttgtcctaaaaaaaaaaaaacgccaagattctgtaagtcctttctcaactctctcaaagccagcactctcccgggcagcagaagaaatccttgcttttgtgaatattactgaagttattattgaaaatgctcgagcgaggattcttgacggttgtctttgagcagaacaatattcagaagggaagctgtaatttttttttttttttaagaatgcttagtccccagatcttaagaatactttaccaaagtgtgaggtctaataagacttaatgcttacgacatgttttctttggaaaatgtttcagcatatttggcattagtcaggagttcagatatgtaatattccaccaccctttttcctggaaccagtttgaaaaacaaactatttatggtattaaagatggaaaatacttttctcttcctggcaatgtggtgaagttgaacattttgcaacattggagaaagaagtgttctttctggggctgtctagcggaatgcatggatatgagataataacatattttactcctgagtagtatttggatcaggttttttttggcaaatgcaaattgctttttgtgaagtgcaaaactgagccttggtgtttataaatataaactctcttctaatcagcctgcatttaatatctgcctagtacacacgagttgaagtttgataatgaacaaagttgtgaagtgaccagtgaaacctttcaacaagcttgcttttacccttcctacttaaagagccaggagatctaattagtcaactgtgcagactggctgatgttagaatttgatcatgtggctactgcacagtcatagacaatttctgatttctgcagtatagctcccaaatgcaaaccctggttacccctgtttgattgctctctctaagcattggtattcagagcattctattgtaaccatgtaatacacatccagggttaatccagcatatacagaatagactgtttttgagttgcaaggtacagagagagaatacatagtgaatgcgaataacaaatcagaattacttttagaacttggtcctttttgaaaaatccttctaagtctgcttggttttacctttgtaagttaacatatagtcatcacatgcacatatacgcacacacacggtctctttccctttctaataaacatattgaaaggtgaagggttcgatcgctgacatcaaggttttctcttgctccagtgccctgccccgagggtgcagaactctcagagagccctgtgttggtcccaccagggctgtttcatgccttctaatcagccagagtgctcgaacattatgccctgctgctccctgatctaactggtagttggtagagcttgaggaacaagagctccgagccaggaagctctggggtttctacctgagtggcagcacccaggccaccaggcttacagatgttccatccccccaggctgcctaggcgtgcagtcacatagaacctgcagagccacctctgcacaacccctgtgggctacaccagcagtgggcactccgcccaatccttgctttattggcagggaggagggggtacaggagagaagataggcatcctctatggacagttaataatacccattgcatttctttttcttttttatttgattgtggtaagaacacttagcatgaactctaccctctcaacacatttttaagtatacaatacactattgttgactataggtacaatgttgtgcattaattttttaagtttgtgatatatttagtagcaaagtccttctggaaagtcctctggctctgctgcagggaaagcttgagaacgggagctcagtttcacctgtttgctgagagcaaaaggaagctggcccggaagtggcttgcaggaaggagttgagcagggttagggtggggagactgggcagtttctctggtttttgtaagctagttctctaattacttaccctgaaatgtgttccggaaacactgacctccattctcttattcacatggcagacagtgtacaagctgtttcaagcgaaatactgataatcaggatattaactactatatgtctgcaccagccatgaatacaaatcactggtcaccagtgtttgctctgttcctttttaaaaaaatgtttaattaaattaggtaactaattaatttgtaaagatggggggtctccatcttgtccagactagtctcaaactcctgggctcaagcaatcttcctgcctcggccttccaaagtgctgagattcagtggctcacgcctgtaatccccacactttgggaggccgaggcaggtggatcacgaggtcaggagttcgagaccagcctggccaacatggtgaaaccccatctctactaaaaatacaaaaattagccaggcgtggtagcacatgcctgtaatcccagctagttgggaggccgaagcaggagaatagcttgaacccgggaggcagaggttgcagtgaaccgagatcgcaccattgcattccagcctgggtgacagagggagaccccatctcgaaaaaaaaaaaaagccaaagtgctgagattatagacatgagccaccatgccccacctctctttgtttctttcttaagtttagaaataaatgctcgttagagaaactatttataaaaccagccctgtttattcagcatggactcatgagaccaaatataacttatacaatgttaatatggctgcatttaatatttagtcactgggctacatagtaggtaaaaataacagatagtttgtaaaaatgactctttagaatcacttctacaatattacactttattttttaagtttttccctttcaagaaatttgtgttaataccctatagacttctatcaccttttatcattgcagatatttagaaggttagcagtgtaatgacaaacagataaagaagtctgtttgtagttcatttaaatataaaaggaattggcgttttagttgaaaacttagctacacctgatcagtgtactgcagaactttgatgagtgggagtccctgatagattcctggttctaggctctttgccaccagatcaaccagaaaaaggtggtgttttgttttgttttgttttgttttttgagactgagtctcgctctgtctcccaggctggagtgcagtggtgcgatctcggctcacagcagcctccgccttccgagctcaagcgattctccttgcctcagcctcccaagtagatgggattacaggtgcccatcaccatgcccagctgatttttgtatttttagtagagaccaggctggttttgaactcctgatccgcccacctcagctgggattataggtgtgagccaccgcgcccggccaggtgttcttcatcagactgcagggacacctccagcaattgctgcatggttcctggggaatgcctgcattattctcctagtttaaggcaaatgagccaatttccagaactggattagggaaatggaaacccacacaaaggaggggaatgaagctgaatgtttcccacttctttttcagatttacatgagcccagaggtcatcctgtgcaggggccattcaaccaaagcagacatctacagcctgggggccacgctcatccacatgcagacgggcaccccaccctgggtgaagcgctaccctcgctcagcctatccctcctacctgtacatagtaagtggggttcaaccagggctgggggcggcgggggggggggcgttgagttatgcatcccgcaggcttgggagggactgctctgccttctataccacccccatctgaatgaggcaatggtgaaatgacaggtagctacaagttcttcccatgtagaagcaagctccattcttgcaaagaaaacatagctattttagtgggagcttactaaaatgtgcattgggcataatttatgctattccattgtatgtgtaataatgcaacactacttagtagcatcagagtagcataaatatttcagcaaaggaagttgtatgtgttctttgaacagttaaaacattttttattattaatgttcacaccagtgtggcttgtagtggaatatgcaattcccattttactgttgataaattcaggagcagacacttccctgttactgcacagtgacttttgggacactgatttgaagctgtcactgacattcaaacctatcacttatcttttgtaacattaaatcagaagatgggtttaacctggtatcctttagaaattaaagtgggccaagcacggtggctcacgcctgtaatctcagcactttagaaagccaaaacaaaaggatctcttgagcccagaaattcaagaccagcctgggcaacaaagcaagaccccatcgctacaaaaaattaaaaaaattagctaggtgtggtggtgtatgccctgtggtcccagttgcatgggaggctgaggtgagaggatcacttgagcccaggagttcgaggctacggtgagttgtgttggtgccactgtactccagcctggatgacagagcaaagaccctgtctcaaaaggaaaagaaaaaagaaattaaagggaagcttgcttgcttaagggctgaactgcattcgttgcagggcatgtggtggaaaacggattactttctaggtcctggtactagcatgcttttgctgttgagggtgtatcaccatacctttgatgctaagagagctggtttgttgatagatccacaagcaagcacctccactggaagacattgcagatgactgcagtccagggatgagagagctgatagaagcttccctggagagaaaccccaatcaccgcccaagagccgcagacctactaaaacatgaggccctgaacccgcccagagaggatcagccacgctgtcagagtctggactctgccctcttggagcgcaagaggctgctgagtaggaaggagctggaacttcctgagaacattgctggtagggacaccctgctgtgtgccgcacacttacttcccttctctttctgtccacatcaaacctctgatgtagttcatgaaagcacttggaaaaaaaggaaatgacttcttgagtaccataccttgcttgagaaatttcagcaagattagcagaagcatgtttttttttttaaattggctaatttagcaccaaattataacagattttcagtgcaagtgtaggtagcacagtcactggaaaatgcttctgacttgcttttttgcaacttgcttttttacaacttttgtctttgaaaacagattgagcatgacagctttgcagttggttcttcttaactcactttttttttctttttttttgagatggagtcttgctctgttgccgaggctggagtgcagtggcatgatcttgggtcactgcaacctctgcctcccggtttcaagtgattctcatgcctcagcctcctgagtagctgggattacaggtgcccaccaccacgtctggctaatttttgtatttttagtagagatggggtttcaccgtgttggccaggctggtctcgaactcctgacctcaggcaatccacctgccttggcctcccaaagtgtggggattacaggcgtgagcaaccatgcccagcctaactcatttatattaagccaccccagtccttggtgggggaacatcatggcactgccctgcacagataaaatactcagtttgaagtcaacttgcatttccatcttccttggcttaaaatcttgccagttgtaaatttttcccacttaggaaagtcagtatgctttccaggagcattgaatatgcataaagagggatttccatttttattaaaagtctgtggcattcttaatccatttaggtccaaaccgagatgtcaagcctggtgcgcttgtttatatttctttgctgcttgtctaacttttgtgtatttaaagagagcaatctggctgttggaaaaatatgccaggatttctaactaatttcttgtctccattgactcctgtttgaactttttgttctatgtcatattatgtgaacttagccatagtgttcaaagacccatctttcacgcttaagacactgttttattaggccccaaagatttatttcactgcagaaggaacaggtatttatcatttgacacgttttcttgttacttactttgtaatgttttccttttcagattcttcgtgcacaggaagcaccgaggaatctgagatgctcaagaggcaacgctctctctacatcgacctcggcgctctggctggctacttcaatcttgttcggggaccaccaacgcttgaatatggctgaaggatgccatgtttgctctaaattaagacagcattgatctcctggaggctggttctgctgcctctacacaggggccctgtacagtgaatggtgccattttcgaaggagcagtgtgacctcctgtgacccatgaatgtgcctccaagcggccctgtgtgtttgacatgtgaagctatttgatatgcaccaggtctcaaggttctcatttctcaggtgacgtgattctaaggcaggaatttgagagttcacagaaggatcgtgtctgctgactgtttcattcactgtgcactttgctcaaaattttaaaaataccaatcacaaggataatagagtagcctaaaattactattcttggttcttatttaagtatggaatattcattttactcagaatagctgttttgtgtatattggtgtatattatataactctttgagcctttattggtaaattctggtatacattgaattcattataatttgggtgactagaacaacttgaagattgtagcaataagctggactagtgtcctaaaaatggctaactgatgaattagaagccatctgacagcaggccactagtgacagtttcttttgtgttcctatggaaacattttatactgtacatgctatgctgaagacattcaaaacgtgatgttttgaatgtggataaaactgtgtaaaccacataatttttgtacatcccaaaggatgagaatgtgacctttaagaaaaatgaaaacttttgtaaattattgatgattttgtaattcttatgactaaattttcttttaagcatttgtatattaaaatagcatactgtgtatgttttatatcaaatgccttcatgaatctttcatacatatatatatttgtaacattgtaaagtatgtgagtagtcttatgtaaagtatgtttttacattatgcaaataaaacccaatacttttgtccaatgtggttggtcaaatcaactgaataaattcagtattttgccttagttgttgtgaagcctgtgattctcagctgggactgaggatgggctataggagttgagttatagattggaaggaaatgtgtatcataagaaggcaaaaaataccaggagctttgcaaattgtattaatacactccttttctattgctcttgtatgaagctattgtcagctggaatggtttgcatcccccggtacattgaggtagaaaaaacaattgtggttgtgcctgtaatcccagcactttgggatgctgaagcgggaaaactggttgagcccaagagttcaagaccagcctggccaacatgatgaaatcccatctctacaaaaaatacaaaaatttgccaggtgtgatggtgcatgcctgtagtcccagctactcaggtggctgagatgtgaggatcacttaagcctgggaggcgaaggttgcagtgagccaagatcatgccacactacactccagcctggataacagagggaggccttgtccctgctaaaaataaaataataattgtgtgccactggtttagggttatgtggttctattttgcaccctgtttttatatatttatactatccttgaatacacgcttgcatactctttgcccattgttatgtggcaagctaataactagccattgtagaaggtggctttaactcacatacatcaactctagtgaaaactgttgaatggaagtctgtcatctacatagcaaatagtattaaacacttttacatgtgttgtgtaaaacatgccatcccttgtaatccatgtaaacacacatgaaatatgcattgctacctcttttttctcagagaaggaaattgaggcatagtgagggtaagtaacgttatcctcaagaccgcaaagcaagtgaagaaacagctggtatttaaacccagtcctttctggctccagtacacatgttctccctcgtacgttgctgcttgtaagtgagagatcaacactgcagaggaaacaatttccttttctgcccctctggtaagggcagaggcagactgaccatgaagctaatgaagcttcagcctcagggctcctcacttgcatgggcccctccatagccctgtgcctgattttttttaatgtattttttatttcagtgacttttggagtagaaggggtttttggttacatgaatgagttatgtagtggtgaattataaaacttcaatggacccatcacctgagtagtgtatgttacactcaatgtgtagtttttcaccccacacacctccccccctttattttattttttttgagaaggagtctcactctgtcacccaggctagagtgcggtggcatgatcttggctcactgcaacctccgtctcccaggttcaagcaattatcatgcctcagcctcgataatcccagtagctgggattacaggcatgcaccaccatgcccagctaatttttgtacttttagtagagacggggtttcgccatgttggccaggctggtctggaactcctgacctcaaatgatctgcccaccttggcctcccaaagtgctgggattacaggtgtgagccactgtgctcagccccaccctcccccattatttcactctgtatgcctttgcgtattcatagcttagctgcctgtgcctaatttcatatcaccctagatcaggcccaacaaaacttggacctgctcttggttaaaggtatacagcttttgataattttcatgagatactcacatagtcaatatgaattgagttctagttaacaaattccatttggagaaaaccattctctcttttttttttttctttttcttttttttttttaagatagagcctcactctgtcgcccaggctgaagtgcagtggtgccgtctcggctcactgcaacttccgcctctggagttcaagcgattctcctgcctcagcctcccgagtagctgggactacaggcatccgccaccatgccaggctaatttttgtattttcagtagagatggggtttcaccatattggccaggctgggaaaaccattcttttgaaataaattggaactctaatggagagaaatggggatgattgctaagagctgatcaatagtgttggtggctgaggaagcggtcgtgagagagaactatgaggggaagttcggggctgagagctctgtgtgcactgaggacttgcagaactgttcacctgggaggccaaaagttgcaccctaggatgagtcaccagagaatcagctcaagaggagcaaggaagccccaagtgaattccaaaggaatgcactactcacccccttatgagaagatgggcagtggggctgtcaggcttgagtatagttagaatagaataatcatgtcctgaaagctcagcctgggcaacattgcaagacctcatctctaaaaacaaaaattagctggatgtgatgactcatgcctgcagtcccagctacttcaaagactgaggcaggtggattgcttgagcccaggattgcaagtctgcaatgagctatgatcatgtcattgcactccagcctgggcaacagagtgagaccctgtctctaaaacaaacaaacaaaaacaaagaaagcaacttccagccactttgataattcctgcttcgggaattggatggaagcactggaatgcactgcagaatgtatacagagcttttccagctcaagccttagagatgatcttatttaagcacctggcaagttagatgggtagatgaacgtgcttgctggaggtcccacaaccaatgctagtgcctcatcttctgattgtcaccacctcctttgtgttttccttgaggtctgtgaaatattcaaaagcagatgatggagatcgtaccaggaatttactggacctgatgggaatttgcctagccttggagagatgcttctcatctggggatcagccagtgccccttgagctaagtttctactgatgactgccatgtcaccgagcaccacagtgggacctggaagggattctgtcagtcccctgggttccttgctgatgcatgctcactgtctggcagacacaaggaatttggtcttttattgacagcaagtttctgtggtgtaactcaatatgaaagccagtgttttctggcgggcctgggggatatttttcataggtctgcaatgtgactagcagtaaagattgcttgatgccctgccccatgggcacccaggagggaatgtgcccagcaggagagcgggcctattaatggagagttgaagttttatgaggaccaactctgggcaagcaactgtgctgggccctgaaggagacataagtgagagaagattctagtctctcttacttatccactctctgctgaaaggaagcacgttccattttggaattgttagaaggttctttgatttaatgcatattcccatctgcctccaaaacggcttttttcatcaagtatttacttgcaattttaccttttgcctgtgagctggctttctaaatgtccattgaatcgccaatgcataagaagatgatgactaaaaggtttaggcatcagcatcaggtttcaaaagcttgctttgtgccgggcacagtggctcacacctgtaatcccagcactttgggaggccaaggcaggtgaatcacctgagatcaggggttcgagaccagcctggacaacattgtgaaaccccgtctctactaaaaatacaaaaaactagccaggcatggtggtgcacgcttgtaatcccagctacttgggaggctgaggcatgagaatcgtatcaacccgggaggtggaggttgcagtgagccgagatggcgccactgcagtcactgaacctgggcaacaagagcaaaactccatctcaagaaaaaaaaaaaaggtttgctttgggccagagagaggagaaatgcaaagcagtcatttaccaaacattttttttttatgtttttgttatatgttatatgtttttgtttttttatgcttttgtcaattttgtctaagatcagttggctatagatgtatagctttatttctgggttctcttttctgtgttccattaatctatgcaattgtttttataccagtaccatgctgttttggttactacagccttgtaatattatttgaggtcaggtaatatgatgccttcagctttgttctttttccttaggattgttttggctacttggtgatttcatatgaatattaggggtttttttttaattctgtgaaaaatgacattggcattttgaattgcactgaatctgtagattgcagattgcagattgttttgggcagtatggtcattttaacaatattgattcttccaatccattagcatgggatattttttcatttgtttgggtcatctctgatttctttcaggagtgttttgtagttttccttacagagatctttcacctctttggttaaatatatgcctaggtatttttttttttttggtagctattgtaaatgagattgttttcttaatttggttctcagcttgattgttactgatatgaataaatggtactgatttttgtatgtttattttgtatcctgaaactttcctgaattcatttatcaaatgtaggaatttttttggtggagtcttcagggttttctaggtataagaccttatcatcaagcatttttgtactcatctgtgaaacaccctcatccggatttgtgctcagctctctctaggcagggtgtgcagatacaagcgtggacaggagagagaatcacgttcctgttctgttggacaatggtcctcagccccgggagcaacagctgcattttcaacaactggaacttggagtatagattccttcccacattgcctatgtttaacccctttgtgggaaatctgttttgtcacacttcaaaatcacagtgagagatgaccagtcatagccagcacacctaagaacacagcatgcgctgcgtttattttcaaggctgggataaattctgagtacttaaccaatttcgagacatctgcttcaccacatattacagaaccaaaggtgataataattggctatctggctgcctggagcataattgctgattgaatgacatcttgttcatcctggtgactgtacaaggaggccaactggaaatacaaatcaatgcataatcagctaagagcatagcggtctctcattacggctctacaccaaggtaccctgagttggcctagcaattgtatcattatacaaataacattaaagattaggggagatatggaatttccctacaaatgttggctattattattgttttaattcattaatgctaaatgttctttctatgaagcttaatgaaattccgctttatctttcccatatgtatgtagaatttcagacagcatttcattggaacataccttcatactggtccatttataaatctgaataggcttgactcttttcagcctaattaacattcttccaaggcatcaagggagatgagaaggaagaagaatattttcagcaaaaagaggggtaataggcactactgaaagaaggcttggagcttgcagtggagttaacttttggttcattcttgctttttgcaaacgcaccagtgacggtgagcccatcggactgacgctaatggaaagagggctgagaatggtggctcttgcctataaccccagcactttggtaggctcaggcaggaggatcgcttgaggccgggagttcaagaccagcctgggcagcagaaagagaccctgtctctacagaaaataaaataaaaacttagccaggcatggtggcatgtgcctgtagtctgagctacttgggaggctgaggcagaagcttttagcacagaagttcaagggtgcagtgagacatgctcatgccactgcactccagcccgggcaacacagcaagatcctgtctcaaaaaaaaaaaaaaaaaaaaaaatggagagaggctacaggatggcaacagctggcactaggacagtcttttgtcaatgggcttgtgggaaaaggaaatggtgtcaacctcacatacacacacaactcacctcttgctgcctaggtctttcttcttattggaaatttgcatcttgctcaagttttgctcccaataggacagagggctgggagctgattccaagcctaggaggctcccagaatctctcacaacttccctatgtggattaatttgtgatcacttgccagggccagcgagcaataaggcaccaattgcttctatcttaattaagttacttagggaagaaagagaaagaacaaaggaattaattcagattttctcactgaaactgaaagttcttttttttggtctggccagtaagcaagagggaacagaaagatttggctcgtgccttcctcattcgcctcttcagcttgtccctcttcctctatacactcccccacattctatatgccccagttctgttctccagaagcaattgctgctagcaaagatagtctatgcatacacaaacatatgtgattatataatgattatataacactcttctttataagcaacaacaaatgtgcacatggtagcatactttatacatagctctctatattttttttgttttgttttgttttttgagatggagttttgctctttttgcccaggctggagtgcaacctccgccccccaggttaagtgattctcctgcctcagcctcccaagtagctgggattacaggtgcatgccaccatgcccagttaattttgtatttttcagtagagacaaggtttcacagtattggccaggctggtctcgaactcctgactttgtgatctgcctgcctgggcctcccaaagtgatgggattacaggcgtgagccagcatgcccagcccatcttgtttttttgacagactgtttcccaaaaattatgaggaagtatgtaatttaattagatgaattcattcattattatttttttctttttttctttgagacagagtcctgctctgtcgcccaagctggagtgcaatggcacgatctcggcttactgcaacctccacctcctggattcaagcaattctcctgcctcaccctcccaaatagctgggattacaggcgtgcaccaccatgcccagctaatttttgtaattttggtagagacggggtttcacggtgttggccaggctggtcttgaactcctgacctcaagtaatccgcctgccttggcctcccaaagtgctgtaattacaggcttgagccaccacgcctggcccagtttattgtttgagatagggtctcactctgtttcacaggttggcatgcagtgttgcaatcacggctcactgcagcctcaaactcctgggctcaagtgatcctcctgcctcagcttcctgagtagctgggactacaggcatgcacaaccatattcagctaactgttaatttttttgtaaagacagggtcagctgggtatggtggctcacgcttgtaatcccagcactttgggaggccgaggcaggctaatcatgaggccaggagtttgagaccagcctggcccatatggtgaagcctcgtctctactaaaaatacaaaaattagccgggcatggtggcatgctcctgtagtcccagttacccaggaggctgaggcagaagaatcgcttgaacctgggagatggaggttgcagtgagccgagtttgcaccactgcactctagcctaggcgacaaaatgagactctgtctcaaaaaaaaaaaaaaaaagagccttgctatgtggcccagggtggtctggtgtcaaactcctggcctcaagtgatcctcctgcctcggcctcccaaagtgttataaacatgagccaccatgactggcctggaactattttaataagagcaatcccctgatacaagtcttactttgtagacaaagccttttcccaatcatttctgccatgaggttggaagttttcgttaggcttccctcgtgcttcttctctttccttttctggaaaatgagacgtagaacaagatgacttttcaagttgcttccaatcattgattcatcttataggacaggaaattggatggcaacaaacttgttgatttcctgaaagtccaaatgtaattgtctgcagagcaagggtgggaaccaaagtccttgacttctaacctcagggttttgccaccagaccatactgccattgctgcttaccattcctcttctgatgcctacagcctgggaagtcccagagcaaaagtttatacttaggctagcttttgagtgtggggaagtggtaggaattattgggctggatggatcaaatttcctttctattgttaggaagaggctggatcctgtcttaagtcaatgtcatgagatctgatatgggtggatgagaataggctctggggtcaaggatggagggaagaagagactctaggccagatgcggtggctcacgcctgtaatcccagcactttgggaggccgaggcgggcagatcacgaggtcagcagttcgagaccagcctggccaacatggtgaaaccctgtctgtactaaaagtacaaaaattagccaggcgtggtggcagatgcctgtaatcccagctactcgggaagctgagccaggagaatcacttgaacccagaaggcagaggttgcagtgagccgagaccatgccattgcactccagcctgggcaacagagcgagacatcgtctcaaaaaaaaaaaaaaaaaaaaagaagaagaaactgtatgcatgaatgcaaaatcaaggtgatactaaaggagacgaatcaatgaggtttggcgcaagaaaataaagtcacgagctgctcattaaggttaacaatgacatagaatgttgccatacctgtaatgggctcaagaattgtgggatgcagccggacgtggtggctcactcctgtaatcccagcactttgggaggccaaggtgggtggatcacttgaggtcaggagttcaagaccagcctgaccaatatggtgaaaccccatttctactaaaaatacaatacttagctggtcgtggtgacacatgcctgtaattccatctactcaggaggctgaggcaggagaattgcttgaacctgggaggcagaggcttcagtgagccgagactctgccattgcactccggcctgggcgacagagtgagnnnnnnnnnnnnnnnnnnnnnnnnnnnnnnnnnnnnnnnnnnnnnnnnnnnnnnnnnnnnnnnnnnnnnnnnnnnnnnnnnnnnnnnnnnnnnnnnnnnnnnnnnnnnnnnnnnnnnnnnnatagctgggactacaggcgcccaccaccatgcctggctaattttttgtattttttgtagagatggggtttcaccatgttagcctggatggtctcaatctcgtgacctcgtgatccgcctgcctcggcctcccaaagtgctgggattacaggggtgagccaccgcgcccggcccaaactcctttttttttttttgagacgaagtctcactctgtcacccaggctggagtgcaatggcaaaatcttggcttactgcaacctctgcttcccaggttcaagcgattctccacctcaacctactgagtagctaggactacaggcgcgggccactacgcgcagctaatttttgtatttttagtggaaatggggtttcaccttgttggtcagactggtctcgaactcctgacctcgtggtccgcccacctcagcctttcaaagtgctgggattataggtgtgagccaccatgcccagcctcaaactctttttttttttttttttttttgagacggagtttcactatttttgtctaggctggagtgcaatggcgcgatcttggctcactgcaacctccacctcccgggttcaagcaattctcctgcctcagcctatcaagtagctgggattacagtcatgtgccaccatgcccggctaatttttgtatttttagtagagatggggtttcaccatgttggccaggctggtctcgaactcccaacctcaggtgatccacccacagcctcccaaaatgttggaattacaggcgtgtgc

SEQ ID NO: 1388 - DNA, 2763 bp, Homo sapiens
ggatcccagtggcccggcgtgctcggctcccacaggcctgcagccagcatcgcaccgaaccttcggggggccgcggctggagcgctcggccggcgtgggagcgcaaggccgcagatgcaatcttcttaccgcgaagaagccaggggaataggtagccacatcttgtttgcagataagaaaggaagctaacgcagtatctgcaaagccaggagtctgactcagtacttttctcactcatgcatacaagcagctaaaaatgacacagcttatttaccatgcccctgacactgcactgagcactttatgagcttgaactctgttaatctcacgaccacctcatgagactctccagaaagagcaacagtaatggagtacatgagcactggaagtgacaataaagaagagattgatttattaattaaacatttaaatgtgtctgatgtaatagacattatggaaaatctttatgcaagtgaagagccagcagtttatgaacccagtctaatgaccatgtgtcaagacagtaatcaaaacgatgagcgttctaagtctctgctgcttagtggccaagaggtaccatggttgtcatcagtcagatatggaactgtggaggatttgcttgcttttgcaaaccatatatccaacactgcaaagcatttttatggacaacgaccacaggaatctggaattttattaaacatggtcatcactccccaaaatggacgttaccaaatagattccgatgttctcctgatcccctggaagctgacttacaggaatattggttctgattttattcctcggggcgcctttggaaaggtatacttggctcaagatataaagacgaagaaaagaatggcgtgtaaactgatcccagtagatcaatttaagccatctgatgtggaaattcaggcttgcttccggcacgagaacatcgcagagctgtatggcgcagtcctgtggggtgaaactgtccatctctttatggaagcaggcgagggagggtctgttctggagaaactggagagctgtggaccaatgagagaatttgaaattatttgggtgacaaagcatgttctcaagggacttgattttctacactcaaagaaagtgatccatcatgatattaaacctagcaacattgttttcatgtccacaaaagctgttttggtggattttggcctaagtgttcaaatgaccgaagatgtctattttcctaaggacctccgaggaacagagatttacatgagcccagaggtcatcctgtgcaggggccattcaaccaaagcagacatctacagcctgggggccacgctcatccacatgcagacgggcaccccaccctgggtgaagcgctaccctcgctcagcctatccctcctacctgtacataatccacaagcaagcacctccactggaagacattgcagatgactgcagtccagggatgagagagctgatagaagcttccctggagagaaaccccaatcaccgcccaagagccgcagacctactaaaacatgaggccctgaacccgcccagagaggatcagccacgctgtacgagtctggactctgccctcttggagcgcaagaggctgctgagtaggaaggagctggaacttcctgagaacattgctgattcttcgtgcacaggaagcaccgaggaatctgagatgctcaagaggcaacgctctctctacatcgacctcggcgctctggctggctacttcaatcttgttcggggaccaccaacgcttgaatatggctgaaggatgccatgtttgcctctaaattaagacagcattgatctcctggaggctggttctgctgcctctacacaggggcccgttacagtgaatggtgccattttcgaaggagcagtgtgacctcctgtgacccatgaatgtgcctccaagcggccctgtgtgtttgacatgtgaagctatttgatatgcaccaggtctcaaggttctcatttctcaggtgacgtgattctaaggcaggaatttgagagttcacagaaggatcgtgtctgctgactgtttcattcactgtgcactttgctcaaaattttaaaaataccaatcacaaggataatagagtagcctaaaattactattcttggttcttatttaagtatggaatattcattttactcagaatagcctgttttgtgtatattggtgtatattatataactctttgagcctttattggtaaattctggtatacattgaattcattataatttgggtgactagaacaacttgaagattgtagcaataagctggactagtgtcctaaaaatggctaactgatgaattagaagccatctgacagacggccactagtgacagtttcttttgtgttcctatggaaacattttatactgtacatgctatgctgaagacattcaaaacgtgatgttttgaatgtggataaaactgtgtaaaccacataattttgtacatccaaggatgaggtgtgacctttaagaaaaatgaaaacttttgtaaattattgatgattttgtaattcttatgactaaattttcttttaagcatttgtatattaaaatagcatactgtgtatgttttatatcaaatgccttcatgaatctttcatacatatatatatttgtaacatgtaaagtatgtgagtagtcttatgtaaagtatgtttttacattatgcaaataaaacccaatacttttgtccaatgtggttggtcaaatcaactgaataaattcagtattttgcctt

SEQ ID NO: 1389 - DNA, 1404 bp, Homo sapiens
atggagtacatgagcactggaagtgacaataaagaagagattgatttattaattaaacatttaaatgtgtctgatgtaatagacattatggaaaatctttatgcaagtgaagagccagcagtttatgaacccagtctaatgaccatgtgtcaagacagtaatcaaaacgatgagcgttctaagtctctgctgcttagtggccaagaggtaccatggttgtcatcagtcagatatggaactgtggaggatttgcttgcttttgcaaaccatatatccaacactgcaaagcatttttatggacaacgaccacaggaatctggaattttattaaacatggtcatcactccccaaaatggacgttaccaaatagattccgatgttctcctgatcccctggaagctgacttacaggaatattggttctgattttattcctcggggcgcctttggaaaggtatacttggctcaagatataaagacgaagaaaagaatggcgtgtaaactgatcccagtagatcaatttaagccatctgatgtggaaattcaggcttgcttccggcacgagaacatcgcagagctgtatggcgcagtcctgtggggtgaaactgtccatctctttatggaagcaggcgagggagggtctgttctggagaaactggagagctgtggaccaatgagagaatttgaaattatttgggtgacaaagcatgttctcaagggacttgattttctacactcaaagaaagtgatccatcatgatattaaacctagcaacattgttttcatgtccacaaaagctgttttggtggattttggcctaagtgttcaaatgaccgaagatgtctattttcctaaggacctccgaggaacagagatttacatgagcccagaggtcatcctgtgcaggggccattcaaccaaagcagacatctacagcctgggggccacgctcatccacatgcagacgggcaccccaccctgggtgaagcgctaccctcgctcagcctatccctcctacctgtacataatccacaagcaagcacctccactggaagacattgcagatgactgcagtccagggatgagagagctgatagaagcttccctggagagaaaccccaatcaccgcccaagagccgcagacctactaaaacatgaggccctgaacccgcccagagaggatcagccacgctgtacgagtctggactctgccctcttggagcgcaagaggctgctgagtaggaaggagctggaacttcctgagaacattgctgattcttcgtgcacaggaagcaccgaggaatctgagatgctcaagaggcaacgctctctctacatcgacctcggcgctctggctggctacttcaatcttgttcggggaccaccaacgcttgaatatggctga

SEQ ID NO: 1390 - DNA, 33991 bp, Mus musculus
tctctctttgtttctggccagaggttccagggctgagggtagcctgaaggtggatgattgtcattacaatgatccatctgatgacctcagaagtcttcagtcccttagccctctcctcatcctatggtatacacttacttttgtccacattttatttatttttaaaaaagatttatttatttactttacagtacactgtagctgtatagatggttgtgagctttcatgtggttgttgagaattgaatttttaggacttctgctcactccggtccatcctgcttgctccggtcggccccgctcgctcagtccctgcttgctttggtccaaagatttatttactattatacataagtatactgtagctgtcttcagacacaccagaagagggcatcagatctcattacaggtgattgtgggccaccatgtggtggctgggatttgaactcaggacctttgaagagcagtcagtgtgcttacccactgagtcatctcgccagcccccacattttataaattatacttcagaataaacctgcccaagacttctcatgagctgaggccccaggcctaaccaacattgtttaataatgggaagggtaatcaagtggttgtctgctggtggccaagactgaaagctagtagggaccctatcagagcttgtcatcctgcatattagagatgttcaggagcctcccataaggagctggagcatatgacattcagagagccagagtagaggcctgatggggaggggaccctgatggcagggcaggaggtctaacctcaacactgagcacagacgaggcaggtggagttgtcttcaccctccctttcagaacaggaggttcagggcaggcctggagaagctgaatagagaagccttggggagtggcacccatcgagtctccacctgcccaacctgctggtttctggcactaccagttatgtgagcccaacagtagcatgcagtagaatcctttaagcccttaacaaggagaacatggagtgtgtgtgtgtgtgtgtgtgtgtgtgtgtgtgtgtagggaggttgctactctgggatccttaggtctgtgttgcaaggtaacacagggacatgtcattgagagcagatgtggggggtcagagtgataaggagcctcacccctgggcaggtacagcccatgtgtgaatgaagcaagggtcctgggcagagtttctctgccttaggccgggggtgggtaggttcttctatcactgataggtgggtggatgggtgatcatggtttgggaactttccccctctaatgaattcagcaagggggactggggccaacttcatctggtgaggtgtgaagacaggcaggcttaggaaaaccaggtctctgtgaggccagagtgtatcgcagggaaaggagtaggtaatggggaagggtcttgataggggtagctgcaaccctgctccactgcatcctgccttctgtgagccaagccaagttgtcccttgtacaactagaatgaacattgggcaaagagggaaacccctgggtaagactggccccatagctgtgggatagcccttaccgaccctggcatcttctttagggttgccatgggtgaaatgggttttcctgggtgtcccgaaagtccttggatgggaggatatgctatcctaggaggatgtgggatagcttttcctagggcaggcagaaggggtaattcttgatttgctttatgccttggggtaggaggctggctgcccttttaaagactttagattctgcaccaactacttatcttcatctcaaagagctccaggggtgcagagtctcagcagggagttctctcctgagagcagtgatcacttatgctgcccattatattcagattccccaactttttttccaacccggaaagtggaataccctggtctgatcaggctacagctataccaggctacggtaggtaggcacatgtagggctggaggaagcctagagttctagctgaggctcttgtggcttccagatgatcgcacgtgatggcatacaggacagggccaggtgtgctcagatgagtatgggtcccaggttgctgagtgagagttcctgtcttgctgtaggcatgtgttctttctgctgggtgagatgaggcggtgctggcataggggcctgcccagccttgctctgacccagttttccaggcccagcccagttctctgcacccaggcaggcatggagcagtgggagctcacaggactttttttcaggaataccaatgtcctggcccacagtcactttcccgtctggggcatttgactggctggccgtcagtacagttagtcccccaaggacacaggcatccctaggacttgagttgccaatgatcctaccagatcctgctttggaatcatctgttctgtgcctctgcctccagatgaactgatgcattgcccagagatagaccctgtagccctctaactaaagatccagtagtgtttcctgccctcctagaagccagttatggccttcccaaagatggggtcccttaggtgacaggtagcttcagaacaggccacagagtcacaagagtgggtataaagactcaggaaaacattccagggaaggggaggatgggaaggtccttgtggacacggagactggggcagcaaaggctacatgaggcctgttgggaagtggggagggggagggagggtggatgtgactgtgggaatccagctctggtagctgctgggtaagccgctttgatccacattgaggcaacacagaccccagtttaagataacttgggcttgggaacctgggctctggccccaactgcccttctgggtttcatccctgctctgcaccagagagacactagtctgggtggtgactgactctctgggcaggctctcctggatgctggggcatcgttcttttctgttttttttttttttttttggtttgtttgtttgtttgttttgtttttccccaagacaggtttcactgtgtggccctggctatcctggagctcactctgtagagcagactggcctccaactcacagagatccacctgcctctgtcttctgagtgctgggactaaaggtatgtgccatactgtggagctggggcacggttcttaagctgtgctggcaggacaacttgaggcccatcagtttccaaggagaggggtgtggagtgcccacctcaggaacagataggcctccccttgaccctgctcctctgagttaaactttctgtatccctttctaatccgctgttagcatctttgacttgggcttgagaggtcatgggatcctctactccctagctggggccagaaggacagcctagtttgagcagaggtcagcatggacacatatgtggactgttgggggtgtgtacactgcctgggaaccccatatcagactcctaacctttgcctcagccatggtcagtgccttcccaccccagagggctgactcaactcaccctcagtccctatgcaggccaggccagtggacaataaagctgtcagcagccagggcgaggggcaggcaatgggcgtggctaggaggagagggcctccagaagcacagacatctctattaggggatgtagaccctgcctgtccatcctactcaatgctgggaccttggaggctgggagcaagtggtggctcagagagaagaggatgaccagaatagttagcaaggtcaacaaggacttgggagtcatgtggagacaggtgtctaaggagcaactgcctgcccactcctcaggtctattaatgtacctgcaggacatgtgccctctgggtagaaacattccaggtgaacactctgtttagcctataaaaagaccctaagaaaagggtttctcagagaaaagagatagtcacagaacatgccttagctttcccgcctgtgatggggtagagacagacaccactgtgtacctaagcatcagtcagcctccagtggagtccagcagacagtagaagcactttcagatgtggaccgaagagactgaagagggaagtggcctctacctctgtcttcccccgcattcaactctcaggtccactatgcctgctttgtgaactggggcagagacccaggtgataggcacggctcgattctgctggagacttaggagctgagatttaggcctatgacccttagatcttagctgggacactcctggaaagtgaggctcctgaagtggctatgggtcgtgagttggcagcctctatctggtaagttcactgcaaacagctacctcttccaatcagctgtaagcagcctatgtgtttgcatctcctgcatcctccagggtcccccagcatccccagagtcttaccaggctttgtgggtgggctggtccctttcctcaggctaatgaggcacctagctcagggctgctgaggtctccactgctctgagagctccctaaccattgcactcttcccaagctcagttcaaacatctctggaagccatgtggtcacctctggtgactgagtaactgggacagtgcctccttattccccatctgtcaaatggagcttctgtgagggttctttcaggaaccaacaagactaccaacttcacgttctgaacacacaaggacctggattacccaacccaagtcatctgcgggaggactcagaacttaacagcatatgtgcaggtgtttgcgcgcgcacacacatgccgccccagctggctgctctaaacttagagaatagagctgaatgcttggctgaaggtcgcacagggatgatgagtgagagggccaaccagtagagggggacagagcaagactgccataggtgatgccaggaggggccagtgactgagaagggtgcagtgtaatagagagccactggggtggaggaagagggtgtggcaaaggctgctgggccctggggcctagattcctagttctgctggagcctgcagagttagaacttgtttattcttggcaggaaggctagtcctggggggtgggaggggggcaaggccttttcaaaaaaaaataaataaaacattcatttagaaggctcccaaggcatgctgaactgcaaaagggtcctggaaaaaatgccgagagggtttaagtgtaaatggacccaaaacaccataattaaatttcccttaaatttaccagagtttggggtcaaagaaaaaataaaacgtaaggaaaatacacttgaggtttcaggccaagagcttaggaaaatagattttctgaacggctcagcagctaccggcctggccctgccagtccctcgggttgtcgctgcctcacctcctctctgctaggcagtgccctgtgcacatgctgttcctaggggctttcgaggcaccctgattgtccctttgtcagctcttccagctttctgctgtgtagctcgtctttgtcagcttggtagccttgcccttaccccgcatctctccacagctctggtctctgatctttacttgtccaggcacattttccagaccaaaaaaagttaggacctgaggtctagtggtctgaatgaacccaggggcaaaaaggccagcaagtgtggtctggaatatcacagcacacccaggctcccaatgcatgattcatcttattgcccttctcactcaacctgccaggaaggtcacagctaaaattaaggatcttacatagtagctagtattggctgaaggcttttggaatattttctcttcttgttcatgttcttaaaaaatccagccaggcatggtggcgcatgcctttaatcccagcacttgggaggcagaggcaggtggatttctgagttcgaggccagcctggtctacaaagtgagctccaggacagccagggctatacagagaaaccctgtctcgaaaaaccaaaaaaaaaaaaaaaaaaaaaaaaaaaaaaagaatctttgggctggtgagatggctcagcggttaaaagcgctgactgctcttccaaaggtcctgagttcaaatcccagcaaccacatggtggctcacaaccatcgtaacgaaatctgatgccctcttctggagtgtagtgacagctacagtgtacttacatataaaataaataaatattaaaataaataaataaaaatccatttttttggttatattataatgggcaaatcaaatgtacttttattttaatcctcaaattatgagaatgaaattgaaaggcacaaattacccacacactttcacagttgcatcaccattcaaacctgctccctgtttcttctttggggaaagccggtcaggccggtcctctaagacagagttctgagccccttccccatggtgctgcactggctcctgagcctgtgggcacatagtaatggtgtttctcagtagctgaaggaatggggactcctaggaagagacagagcagctctagtctctgaaagtctttggcccttcaagtcaggccatggagtccattggtgctcagtttccctttatccctgcactcagcctcatgggcagctgcccctgttgaaccaggcactctccccgagtgtaaccttagcaggctcccatggctccctctgcctgggttccaggcccactgtggcctatagtagctgccacctgccagaaatcccgtgggtaagaggtaagttgtgatttcaggtctgaccaggagaaccacccccagctcctctctgctgacagtttctcacaaccatctcacagcctcagccctggtctggctgcggaggtcagggaagggcaaatctcagactacctactgccagcctgagggattccattccaggacaggcgcagctggtgcctcaccgcagtctctttccttgttgcttagcagcataggccccagaaagcggaagctactgagctctgagtccctgagctatctatccctagtacgcctgacttggcctctgctctcaactcatgttcactgaagaaggctccatttatgtgagccttggaaagctggtgggtcccctagcagtgggcaggaggtataggcatggaaggggacttgatcattaggaaatgcccagtcatcagcactagctgttggcaggctccaactcttgtcccctggaactctgtcatgggccaaagagaaccacctcctcagatcctcattataacaatagcctggagttcaactgaggggcttgggattaaatagtggccaagtgagaggcagcatcatggagatttaagggctggcaccatcctgcactgatgacagaatggtgggtgggctcagcctcatcttctgtaggtctcagagaagcaggtgaactcctgctgaacctactgacttgggaagaatcacttcatataagaaaatcccactgaaaacagaccatccttccaggaattacatcccggtatcaagggcaaggcaagtgagctgcggctactcgggctgaacacagggatcatgttgacattagctcctgcagaatcagtggagtcttagaaatgctatgcccctttgatgtaagggccaccagacagtggcagccatgttggaaagtctattaacacccaggccatatcaggatgtacatgatgtcaagggaccaggaactgccaggtgtgtagtgggcagaaggtagctcccccaaaggcaggtctctgtgctatctcccggatccacaaatgtgaccttatttggaaaaagagtcttgcaagcataacgatgggaagaggcttgaggtgagaccatcttcactttatgaacaactctaaatccaaccacaagtgtccttatgcaggacaggagacgtggggaggatagaaaaggcacagaagccatgggaagggagaggcagagactagactgagatgaccgtaagccatggatgcctgcaggccccagagttataacaggcaggaagaagcctactcagggcccacagccagcccaacttgacctcagacttctgttgtcctgaattgaaaaagtaaatttaagacaaccagattttaatctggaagtcggctcaatacaggaatacaagttgtagccgggcgtggtagcccacgcctttaatcccagcactcgggaggcagaggcaggcggatttctgagttcaaggtctgcctggtctacaaagtgagtttcaggacagccagggctacagagaaaccctgtctcgaaaaaccaaaaaaaaaaaaaaaaaaaaaaaaggaatacaagttgtgaatagttgtgaacaccacacagctcatttttaatgaagggggctgatttccccccccccccactgctgcagttgagcaggggtctacaagagctggccagtgtaaggccacagggttgggggaggatcagaggagtgggagtaccctgcttagagtcctctttcctgcatgtgtagcccattggaaaacaaggtagcttgaaagagatggtctgttgggccatggggttcaaagaacaaccaacactggcctgagattcctgactgggtatttctaacaaggaggtcatctcagaaataaagaagtattgctgtttggatggatgctcagctcccagttacagagtgtggagggttctggtaaatcctccagacgaagggcgtggaaataggggtcagagctcacattctggttcatttactgataactaatctgccaatagattaggggagaatgtctgctatgaccccctggggtggcatcctgggagaggacctgtgggcagctgcctgggggtgccatgggaacccaggactggattctagccagtctgcagggaggggtccttggccagagcaggagtaacagtaggcagagctgcccagctctagggtggacacacagggatgagagcatgagggttctggggccagggctttccctgctcagctatctgggaaagataagggtgatgagtaagccagtgaaaggtgttcgtaacccacgagccattcccccccccaccccccccatgagcagttttaagttcttcaagccacatacagccagactgggcagaagcactgagccaggtccccatgtatctggctcccataggcttcatcagaccttgtggaacttgtctgaaagtgagacaaggttccctgccttgtgagggtagagaggccatcagtcacagggtggttgctgttacagaagttctgccaggcaggacctacagcttgccagcatgatggggtgaccaggctgatcctccagggaccagctgtcattgtgacactccccagatggaatgtgtcccacatgatgggcgtgctgtgctaggacatccataggttggagttcaggcagccttagggtagggcaggctcccctgctttgtatccccagctcttctcgctattccgagaggctgggtaagtttcttccaaaacctgtgtgttcttggggaagtgtggacatcgttcctgagcaggatgcaggcagctggttagtttgataaatacagcagcgtgtccgtcttttctagggtgcaatccctgggtctttcatcatgtaaactctgctccatccttcactggaagacctgttcacacgtatttgtatttgtcttcctggaactgtcaggctttgtacctgaggatttagtgctctttgcacagggttcattcagctcagggggccagttcactgtgaagacgccctaacacctagacccccaccgaagtcaaccttctgagcccttgagcacagctttattggagggagaagcgtgctggtagacagtcctgagctcggcattgcttcaaggggtcgagcgtgcgacccttgcctcgcctgctccgccccagctgggctcccacgccctctgggaccgcccggcgcccccgcctgaccacgcctcttcggatctcccgccccctggccgccggggaaggggagtgttcggggcgtggcgggagcaccccccaacccccgcccgggctgctgcgcgccgggcagccccagttcagtgcactgtggcagcgggggtggcgggagcagctggcgccgtgcgatccactccggcggggggactcagtggtgggcggccggccactgggacagaggagaccctggaaaagcgggccgagagacggagccgcgcgtggtgagttgggctctagcggccgccaggttagtgtgaaggactcggctggcactcggaggttccgggcgggctcagaagcagtcagggggtgagatatgcgggaagtggagcggttcgtaagtgcggcgaggccggggcaaggcgcgggcttcccgctctggaaagtttgcggctactgcctccgtcctgggagggctctgcggcaaccagggagggaaggaggagggaggaaccgcggctgggaggaggcggccggcgccaggcagcccgggagagagctaggagtcggcgggcggggcggccgggggtcggggttcaggagcgaggccgcgcttccccgctgccctccggagtaactcagtgctctcctcctgtagtctccacagaggcgttctcccaccggcgccggagccgggcgtggggggttgcagcatgcccgcgcgcgctgcttgaggacgccgcggcccccgctctggagccatggtagtcccggcctgcgtgctagtgttctgcgtggcggtcgtggctggagctacttccgagcctcctggtccagagcagcgagttgtgcggagagcggcaggtaaggactgacccaaggtgttcttctgggggccggccctgaatcacaggggctttggcaatggtgaacagcccttgggtgaggaaggggcgtcgggttgattagcaccacaggggctagtgcgccgaggtttgtcccctgccccgcagatcgctgtcagctcggacgcggcagtttataggggtgtctgtaggctgggagccaccacccaagtgcgaggcgtcacgtggaccggtgcccgtgacggtggtcccaggcagaggggcgttgggaaggcgcgcgagctgacttcccacgattcctattgttgcttctcgaatttgagaggaggaaaaatgcctgttattgattcagccgttctcccggaacagttcttcctctgcttcagctaaaggaaggctggacgttgcggggtggatagtagtatcccagccaaagctcagcttcagggtttcgcatgacaaggtgacagcttcagtgcggctgctcccctcttatcctgtaggcggcctgaggggtcggttcccaggggcgcgcacagactgcccttcaggccgcacgctgggagatgaggggcggttgtcccaggatcttggcgccgcctaggtagtcccgctggccaccaaagtccgatgggacacttgaatgccctcaaacggggcccggaggccaaggatgcgaaagggagccacggtccgctctgcgtcccttggttgcccggaggtgcgacgcgcgcggcccccggctgtgcccggtggcagcgtggcaaagcagagcagcggtctggcgggaggccgcgcgaagggaggctttcgctcggtaagttgtcgccccacccgagctgaggcccgaacagccgctcctttgtacctcggcggccacaaaccgcgcattgatggcggcgcggcctctcggggaggtgcgagtgcggcgggcgcagcgggaggaggcagatggcggtgtgcccctcccggcgcccccgcgcccctctctccagcggctgcagcctcctggaacaatgtcattttctttctttctttctttctttctttttttttatgaatgaaagtgggccgggaacttgaatgtgcgtgtctttcagcggcgtgacagaggcggtcgggaggtcagcgcgcgcttttagcgcctgctaggactgccctgcttcccgggtgccgaatggcccgcgaggagaccacattagcatgtgtattcagatgaagatattacttcttgcgtcgggtgtcagtgagctcgggtaggggcggcggggcggagcgcacaccctctctgtgcctcaggcagtgacggtggcctcctggcacgaccctgctgcgggaaccgaagctgagccgggccgcccgggatcggtgggatcgcccgcccctcgcttctgcgtttgagcttgtgagacaggtagggaattgataggccaataaacttaatccggttccttaacgagatgggccgggctgtaaaaatacaaagacctggtgaagtttacagaggtccgggctggcgctttccctaggaacataaattaccaagcaggagctggctggggtcaagggctgtgcggcggggctaggtaccggcctaacctggccacccttggtgaggcaagccctgctggtgtgcttagtgtgggagacagtaacccttaggggatccagaagttgacccccaggccggcttgcagaagcagggccttccaccttccttgtctccccccaaccctaccttgcttgcaaggctggactttgagccctgctggccctcccagtggttcattaacctgggctgatcttagaccctgaagctttggctcctatgctgagcctagaatccccttgtcctccaggtctcaggttttacttgggacctggaactctccccccacccccttttgtagttgggcctagaaggaaaactagttacccagggtgtgttagggggtagatgatgtattggatagaggtggcctgcccggttgagaaattactgagctgtgaacaaagccacttggggttggggcctgcctcggcttgggtcctctcctagaacctaagtctcctcacctgtcctgctacagaggactggtaatggcagggttgttggggggattaaaccagataatccccggtaagccctcattagcccgcccagcctctggagttttctttcattcttcctttcttgacttttataataaactgtggaaactggaatgtctcaaggtgggatggtggggaatggggaggaggaaggcaggcaagagacccttggcttcaaggccccttggggcaggcaccctcctttctcttgggttattttcctcatacacctggccatacctcccacaccagctgtgttcactatcaaagcaggtgtcactcagatctgtgtcctggttttgctccaaagtccaagtcgagttctttagggtgaccaacctcagaccagggttggatttgatgctggttttgtagtgcgcacgtacgtctcaacaacagaacctaggctgtcagctcctccaggcagtggatgcagcccttcctccagctgggcagctgtggtctcactccattgtttgactcagggggcttctgcataggcacccctcattcctacaccccttttacagactttagacacttaaccagggctttctggaccttaggtctgcaagttgggatttgcactttgtgctgtagtggatgaaaccgagacaatctaggaggctctacgcccagcacaacttgattgggatacagtgtcccttagcctgcaacagtgagcctacagtacctaggtccatgttagtaccatatagcaatggggataggtgctatgggatccatgtggtagggacattgtcctcttaaagggcacaacagaagtaccagtgcttgcgtgctgcgtttggctcctttgttgatggggcctagggagttactggtgcacacctggaggctgatggtgtgggagttcctctgaccagggcattgcttctactgcctcagaatacaatattacatattctgcattgtctcaagcactgtccttcccttatccctacctgactcaggtcataatttcctctacgccctgtgaccctagaatggtggttgttggtagatgttgttacccaaggcccccaaagtccaggtgtctggtttcgcctagctcctaatggacaagatggatgggtggatcaaaggttagctctttgagctgactgaacatttcccctccagccatctgcttctccaagggtctggtttgggagctgccatgttcttttccagtccctctttggattcggttaaagcaaatacttgtgtgcatggcttgagcggttgtcttgcccagaccaaattggaaccaactggctgttgcctttgggccaaggcctggactgaggctcttgaccagcctgtccttgcccttctgtggagggagaactcaagtggcttccagcactgggtggtccccataggacatggtagcaggattggagaactggaagtcaagacagttaggcccctggctatgggacctccatagggcagcttaatactgtggggctctgaaggacatgagctttggggatattttagggatattccctctgtctgtcagaatcctggtggactttgagcctgtgggttgtctctgggatggacagaattgggcctaaggactggtgtggccagagtggacagctgggccttgaatctaggccatgcgtcggcggaatgacaagtgacattatagccagtccagctggatctgaggaaggaggtctgcttagcaggaccacccactcctgtcctgggccccaagcccagccgccctgtgatgggcattgtcaggttctggcagggaggcctggaggagatagcccagctggtggtacgtccctgagggtgaagtctttgagccaccgcatgagctgggcagcacctgggcaaggcagaggtgtattatctgtgtccgcctagtggaggagctatgttgcttcagttccttagccctcagggtgggtggctggctctacttggctcacatgcccactcagacagtccccctccccccagtcctcatttgtgaaatgggggtcccatgtcctcagccaacctgtgaactcaggagtctcatagcccactgactagaggcctaagagaccagaatggtgtccatgttttcctagctggctcatctgtgaaatgggtgttgcaaggcgtggactgtccaagcatcccctagctggtatactttggtctcaagaggtgcacaactcctatgaacagcagccctaggggtgtatgccagcaagggctgctcacccatgttcttgtatgacctcatgttgtcttctctctttccatttattttgattttgtttttaagacagtagccaggctggccttgagcttgtagcaattctcctgcttcagacttctgagtgcatgagccaccatacctagctttctcttcctgtttaaagtatgttctgttccctggctctctatccaaactggtttagaagccaagatgagggttgggtgcaaagagggttctgaaagggctccctattctttctctgagctttgagccaaagtccagggaaggacagcctgtctccaacctgcttttgtgcctccctgtgagcttagggctgattttacatttccaaatggtggaaggatcagaggaaggagaattggtgactttttcgtggtgtggggctgagctcagggcttcaggcattctgggtaggtgctgtaccacagagttgtctgaaacccttcttggcactttaaagatgattcaggtatcaggagggctgtgcctctttcagatcatcttgggaagacagcttcctcctgtagggcagagccagaagccttagcccatgattgacagagctgagatgctggggcccactggctcttacgaaaacagttttccacccctggtttgaacattgtctggcaggcccccaggctccaggagcacatccctcacctgcctacatacagcccttgcttgtgtgtttgcaaagtgaagtgctgggtctccagcatgcttctctggagaccctgtttcatagtgtcccatttactccacagaggttccagggcctgaacctagccagcaggagcaggtggccttcggcagtggggacaccgtggagctgagctgccatcctcctggaggtgcccccacagggcccacggtctgggctaaggatggtacaggtctggtggcctcccaccgcatcctggtggggcctcagaggctgcaagtgctaaatgcctcccacgaagatgcaggggtctacagctgccagcaccggctcactcggcgtgtgctgtgccacttcagtgtgcgtgtaacaggtaagtgcttggtgggtggtgctgcaacgtgtgtgaaacagctgtatagccaaggagatcaggacactcctgggctgggtggctgcagcatccctggcctaagatgttgatagctgttgatagaaaggagggggtacccctaagtaggtgccatctgaatgaatggccttgtaaaggcaggatcctaaaggtatgagagtggtggacctcagatatgggaagcagcaggtctttggatataggggtatcacagaacccccacttggaacttgcagatgctccatcctcaggagatgacgaagatggggaggacgtggctgaagacacaggtgagattagagtctatggccactgagctggtcagggccgggatgcctctctggtggttagaagggaacactgctacaggtgggtagaccagaggacagtgctccaggagcagggaggaggcagggctggtctgcagggacattgctattgactctagtaggacggggcaccacaggggtgaggatagccagggatgcagctcagattgttgctgaggaacaatagatccagggatgaagggcactggtggttgttggttcaggccggcaggaggggacagtgcttgtgtgtgctgaggtgtacattgtgaagaggacgtgtgtgtgtgtgtgtgtgtgtgtgtgtgtgtgtctatgcagactgagtacttgggccatttggagacttctggggaagagtggacaaggtgtcctccagtggaataaaaaaaaaattggtgggaaaacaggactgagtctctggtgtgtgggggcaaggagagtgggtacaggggcttgtgtgagattttagagtggaatcgacacaggaacctagcactgacgccaacagaggctcctgtcctggggagtcatttggcttctcatttccctttcccctttggctaccaggttgttgagagcaaaatttctaagccagttttcccctcccctggctcctgcaccagccatgttaccagtggccttgccctgagtttgtgtccacttctgcctccctggttttcccaggctgcatctagtgcttacacaccccacgtgggcttcggctctgaggtgactaaagggtcatcttctggaccttgcctgggcatgggaagcattggctcactgccgtcgctgagtgtgccaagctaatggccgccctgggagcctgggagggcagctcagcatggagggttccctcaccagcgtatgcagacggttctctccccctgtgctgtggctcctccacccacagatgcacatggtcctatggtagagtgtagtgaggtcactgcagaaggggcctgcctccctagtctgtcctggatccttgctctgtccctcagctgtttcaggagtcccagcagggtggcttcctccacccagcccagaggaaccagagcgctcagtggggggaaagcgcgacctaaaggaagcaggccaggccctgggtactgcagaggctggcttggggtttgcagactggtgggatgacctggcctaggccttctaggatctgcatcctactgggatctggggacctccacttgtgggcctgcacccaagggtgaggaggagataaattcagatctgagagtagggcaactggtaatgcagtgtccaggctcaggcaaagcaaaggactctgaatccagaagggtaaacaggctagaggcaggcaggggaggttctggaaggcactggttacagctgttatgggtacttctgccatcaggggctccttattggactcgcccggagcgaatggataagaaactgctggctgtgccagccgcaaacactgtccgcttccgctgcccagctgctggcaaccctaccccctccatctcctggctgaagaatggcaaagaattccgaggggagcatcgcattgggggcatcaaggtaggtctgggaaagaaaggggcctgggggcaggggctggagacaagggatagtctgcatctactcacagactaactacctgcagctccggcaccagcagtggagcttggtcatggaaagtgtggtaccctccgatcgtggcaactatacctgtgtagttgagaacaagtttggcagcatccggcagacatacacactggatgtgctgggtgagggccaggccgggtggctaaggcaaggggcatctctgggtcccttggccctactggccctgacctgactgcctcttgcagagcgctccccacaccggcccatcctgcaggctgggctgccggccaaccagacagccattctaggcagtgacgtggagttccactgcaaggtgtacagcgatgcacagccacacatccagtggctgaagcacgtggaagtgaacggcagcaaggtgggccctgacggcacgccctacgtcactgtactcaaggtaggctctatccccggctggtggctggcagggtgggtggatcagctgggtcagccctggccttggcccatatgtccctcttggctgaaggatatgttgggatttaccaaggtattggaacttctgagaaggggcagcttagttccagtgcatgtcacctgctctgagctctaggcaggctctgtgttacttgtgccctgctgtgggacttgtctgctccgaggactgagcctgcagaagttttctcttgggtaacagttatggtggctcagggcaggaggatgactgctgagttagtaccctctggaccccaggggactggctagacactctccagctggcccggattggctggtgtcatctgcttgcatttagcactggctctgtcctgcccctccctctgcctgtagcaagttccatacccgagttcaggactttgcgatactggaagcccaaagaaaacagctgttgagagacaaggaggtctggttggggaaaggaatagggattgtttggaacaggaaccctggctgttgagaaagaggccactggggtcctgtctgatgcgtctcacactgtgggcgtggatgttcacgagaataagctagttgccctaaaaagatccctggggtgagagtttagaggctgtgggttacaggttttctctctctctcttccccttcccccaacccccgcctcctccgttctctgtgtgtgcgtgtatgtaagcgtgtatgtgtacctgtggtgacagacatggagagaaggcctctttctgaaaccacgcccaccactgccatgacgtgcctcctctccaggcggctttccaggctttgctgcccagcccatctttgggaatctcccttgccctgcctcatcctcacatccttccgtccttccggagctggctcggggtgtgcctgagcccagtctcttgtccccgcagtcctggatcagtgagaatgtggaggcagacgcacgcctccgcctggccaatgtgtcggagcgggacgggggcgagtacctctgtcgagccaccaatttcataggcgtggctgagaaggccttttggctgcgtgttcacgggccccaagcaggtaacgactctgtcccatgcctgcctggcacgctgagctccagcttcaatgcccccagccgtgcacctgcctgcatgccctgcacgaactgccctgcttgaccctgcctgtgactccaactctacttgtgatgcctcaacaatactggtagcccccagttaccactgactgactgtttgcttcagcgccccctccccaaaggcctgtgctgttctcttgcatcccccacttgcatactcagaagatctgtagagcctattaggggccacgtcctgcgttgtgtgtgagcatcgaccttacacccatctccagctggctgatgccttctggcttcctgtccatccatctgtctggcccatcttttcgtctgcatctctcctgtttctgcactaattctgcatgctgcctttgtgtggcaccgtgctgcccacctgcctgttgctcaccttgggacagaggactcgccactggtggagggactggcttcaggctcggttgcctcagtgcaggaggcagagggccctgggcctctgtggctgtggcagggccatggtggtggccgaagatgtggtggtggcggcggcgttttccttgcagcctggctggatcatctccatgtgaactgctatggtacccaaagggaggtgctggcactcgcctatcgcgctctgttctctctttgtagactgcaggcgctaacaccaccgacaaggagctagaggttctgtccttgcacaatgtcacctttgaggacgcgggggagtacacctgcctggcgggcaattctattgggttttcccatcactctgcgtggctggtggtgctgccaggtactggcttctgctgctgctcatgccgcacctgtcctcttagggtgctgtctcaggacatgccaaagctgccagggacttcagggggcccatcctgtgaaactcacccaggctttgtgcttggtgtggaaacatgaatctgccctgcctgtcttggtcctgcaagggcctcttctctagcagggccccccatagtcctgatctgaggctctggcatttcctgggtgcctgggtagcggtgtgggtgcttctggctctgctgggtttctctcctgggcgtgtcccctgctggctctcagatgtgttttgattatactacaaggcgagtgggggggccatcagcccctcttctccaagtatcccaggtcccttccctcccccactggggcctgtggttccggccgggccgggggaaagcttgaaaaggctggatgaggccccaaaatttgtatctttgcagctgaggaggagctgatggaaactgatgaggctggcagcgtgtacgcaggcgtcctcagctacggggtggtcttcttcctcttcatcctggtggtggcagctgtgatactctgccgcctgcgcagtcccccaaagaagggcttgggctcgcccaccgtgcacaaggtctctcgcttcccgcttaagcgacaggtaacagaaagtagataccaggttttgagctccctgtcctgcctcgtgtctcctagagtcccagcagggcctggggcctgcccgggacatagtttctgtggttgggtgggctgatgcctccttatctccatatggagctcaggttttctctgaggtgcaaaacatttttaggagtcttaagtcaccactgtatagaagtccgagcagctagcccttttcttggctccacaccttgcctcataggcttgaccttgccatcctggaggctctaccaccccaccccttttacaatgcccagcccacccacgttgtatggtaccaatttgtcctgatgacccaagcaggtgtccttggaatctaactcctctatgaactccaacacaccccttgtccggattgcccggctgtcctcaggagaaggtcctgttctggccaatgtttctgaacttgagctgcctgctgaccccaagtgggagctatccaggacccggtcagtggtggtgagggacagtatgtacttggtggggtttagtatatacctggtgggggttctgcggttgggggctaggtagctactaggcagggccttgttggaggtatccccgagatactccagggtgaggtttgaggggtcattctttgtcttcatgagcaaatgcccctagggtttctgagatacagtggtacatgacccatgagggctgggggtgctgggcacacactcactgcctctgtttccatggtcaggctgacacttggtaagcctcttggagaaggctgctttggacaggtggtcatggcagaagctattggcatcgacaaggaccgtactgccaagcctgtcaccgtggccgtgaagatgctgaaaggtgaggagggagggaagtagaggggcctttgagggctgtggggctgtcagctgacacctctgttcccggcacagatgatgcgactgacaaggacctgtcggacctggtatctgagatggagatgatgaaaatgattggcaagcacaagaacatcattaacctgctgggggcgtgcacacagggtggtaggtcaggtggttggtgggcccactggtggatggcgctctggagattgacagcatctctaaggtgcctgtgcttccagggcccctgtatgtgctggtggagtacgcagccaagggcaatctccgggagttccttcgggcgcggcggcctccaggcatggactactcctttgatgcctgcaggctgccagaggaacagctcacctgcaaggatctagtgtcctgtgcctaccaggtggcacggggcatggaatacttggcttctcagaaggtgggcagagacagggaccaggccaggtggagcctctctgagtggaagaccgggtgatcgtttgcctgagctagggaatggtcatctcaggttccttttgtctcttcagtgtattcacagagacttggctgccagaaacgtcctggtgaccgaggacaatgtgatgaagattgcggactttggcctggctcgagatgtgcacaacctggactactacaagaagaccacaaatgtgagccctggtcctgcatggtgggggtgaagggtccctccaggaggccccacccgagagccaacacctctccctctgcccagggccggctacctgtgaagtggatggcaccagaggccctttttgaccgagtctacacccaccagagtgatgtgtatgtgtccctacataggatgggggtagggagatctgaagagagaagagatacaaattgcacttttgcagtcttcagggtcctggtccgctcattgggccaccagcacagccctggcttctctttatcctagtgccctgctttgcccatcagtggtatgtcctggtacagggctgctgcagtaacaggccaggggtaacaggccttctatcctcaattccctgcagttggtcttttggtgtcctcctctgggagatctttacgctggggggctcaccgtatcctggcatcccagtggaagagcttttcaagctgttgaaagagggccaccgcatggacaagccagccagctgcacacatgacctgtgagccttgttcattcctctacagtccagtccctggggtggcaggattcctaccagggcccttggaatgtgtaggagactggtggcctggagggaggttggggtgggcaggaggccagggagccatagctatacttgccgcaggtacatgatcatgcgggaatgttggcatgcggtgccttcacagaggcccaccttcaagcagttggtagaggatttagaccgcatcctcactgtgacatcaaccgacgtaagtgtccctcagtcctgccccctctgtggctgccttgcttattttaagtgttgctctttggagctccagtggcggggctggcctttagggggcatagcctgaacacagatggcgtgggataaaagggggtgaatgcaaagggacagtcctgacaaccatgtccaccaaacaggagtacttggacctctccgtgccgtttgagcagtactcgccaggtggccaggacacgcctagctccagctcgtccggagatgactcggtgttcacccatgacctgctacccccaggtccacccagtaacgggggacctcggacgtgaagggccaacagtcccacagaccaagccccaggcaatgtttacgcggaccctagcccgccctgctactgctggtgtgcagtggaccctagccagcccagtgcaatgggccaacagtagacaagacttcctgcgtgtttatccttggctcctgggtgcagaggccccttgggaacatgcactgctgtagagtaatctcctgactggccagggccaggagcaccaaacaagaatgtaagaggcccaccctgtgcaaccctggggttctggccctctcatttcccactgctaccttccagggaccattgtggagagggctagactccatgtccagagtgggccttggccttcttggtgccccaagctgagcctacagggaggctctgctctgtgtggcaaacctctctcctacatggcaccttgtgcctgggggtgtcatagctcgacatctccaggctgcctgctttccaccctgcccctcagagacaaattacgggtacctgaagggggggcataatgtctatcagaaaggtttattccagaggaaaatgtacatttatataaatagatgttgtgtatgatataaatatatacatacatatatataagaatatctatatggaaaaaggcaaagttgaggcccaagggagcaagatactccatgggtctcactaggaaactggcaagagcaggctgagaagcaaggggcttttctggcacggcagttttgtttgtactggacctgtatatttgtaaagctatttatcaacccccagagcgccagtccccgaccccaggttcatagcgtttagtcccagggtattgcagccatcttaagttgtaacttattaacagcggaagaggttcatgctggatttagggaattgctgagaacgtgcgtctggcctccaccaggctggccgtggccccttggcgcttgaatggctctcctagtcagagctggctccagggagcattttctgttgcctttggccctcttttgtgggggattagatttatataggaactttctttaggagatgtttaaaaattttaaggtgaactggtatttttcatacagattattctaattgctatgtattccaggcaggagcctgtgcccagggaagggctggccctgcaagaaggttcagatgttaatagttatctgttacaagtttatctatctataatttattgagtttttacaagttgttttgctgtaggcttaacacttcctatgcagtgcttctagacttttatagcctagactgctacctttcaaagcttgggagacagtggtgaatgcaattttgttacttttgtactgtcactgggccctaggcttgggtggctgtcccttgcctgtcaaccagcagggtcaggacagtggctcagggtgactttcttggggcctagcacatggtttgtcagcccacactggcagatgtggttttgttaacacaaccaacttactttccaaaaaataaagagataactggttccatgagtgcctcgatttctgttctgagacgggtacagctgtgtccttgttgcctgtggggacaggtggggaggtgggataatagcacctggggaatgagcagcctctggctggtccctggaagaaggtactggtcccaggctccaagggaccttgcttttctttctcagggcaaggacagctggactgcggggtgcctttctgtggcctaaagtggcagattggtccgggttatcagagtctagaggtgccaaggacaggattcaagcaagttgtgtccataggaggggactgtggatatgtatgtggaggaagtgttttgggtctcttcggtcccctggctgtcctgacagggaagggatctcatgaggacagaaggtgcttaattatatttgaaagttctctggggaaaaggcaggtagccaaaccccctggtttaagcaatctgcattgggccaggcaatctctgagtttaaggcaaagctggtctacacaatgagtcccaggacaacatagaacttagggtttctttcctatatccattttgtctgtcatactttctaaccttgggagatgacctggggactgaataaatgtccattctaggttcccttcttaggatcaggcccaccttataggtgagggcatttttttttttttttttagtaagtcaagatggctggagtcttggttctagactgaaataggagcttgaggatcttcaggtgaggtgtactgggttttaggggaaactataggccttggcactgttggctactcacaggaacttcttgaagggcaccagatagtttcagggactcagagccacacagacacatgatgatagtgaccaggcagaaggcagctaaaggatctgactaaagcctacagaacagcgtgtgtgcatatacgagcacgtgtgtgcaagtatgtgtaggggcgtggcaccaggaggatatattcttttttttaggaggatgcatttttatccctgaaacaagctcaattacccaagagagctgtgtgccagcctgtagcgccctctagtgccatgctgagcatagctttgtatggtaatctggacgcccttttcaagtccagggctcttgttagatctagggaaagctagcaccaaggggttggtccacagggacaggagtggtcctgagagagtcaggggccaggtcaggctgctgcaccaccagggtttcctgggcggccactgcatagggaggatatagtatgtgtggctctatgtcatcaaacacctgctgctgtctagtcttctctggaggactctgctccactgccttgccttttcaacatggttggtaatgatggtggatggtttcttggcctgctttggctagtaccaggaacaggctggctcccaggacactcctgtttactgccactggcctgtggctggctattattctgggttggggtagatcctagtgttcagaggaccagcaacaagaattatcttctgagtaggagagatgactcagtgatctatttagagtacttgctgcttttggagaggacctggctttattcccagcacccacataatggtcacaactatccataactccagttttaggggctatcaccttctggactgtgggcactggacatacacatgttacacatgcatactttcaggccaaacagataaaaaagagaattatcttcccaagaagggaagaaaccagttgtgtgtcaagtgtcctgttttttcagtgaaactcgggcacacaaagctttcctcaagagtgacttagggacagggcttgagtttattgtgtaagtctacctcatccgaacattagctttgttctcaatacagcaagtgggcgtgctgtgctcttttttttttttttttttttaagatttatttatttattatatgtaagtacactgtagctgtcttcagacgcaccagaagagggcatcagatctcattacaagtggttgtgagccaccatgtggttgctgggatttgaacttcggaccttcggaagagcagtcgggtgctcttacccactgagccatctcaccagcccccgtgctgtgccctttaaatggctgtccttcctcaccaacaagcagttcctacccttgccctgagacttgtacttcttgagcctggggacgaatgtgacctcaatcaagcattctagaaggcaccaagaatggctccaggaggccacacactacattctggtgtcctgggctgggcagcagtcactgatgagctcagaaggggatactgtgactttatcctaacacccagacccccctcccagctaaggtcccaaagcaagtaccatggcgggacctggggaattgctcccaccaggcacactgtcctcctcaagtcccatggctggatcctgtctctggactgaatagtagatgttgtgtgggcatagaccacatttccctgggattcctcagccaaggtcctagctcctgtccaccccgcacagctcctaaggaaaggttcggccctgaggtgatgttctgtggttgtctgagcgctggcaggccaagagagcctggttaggtgtgggaacacccaacctggacacaccactgtacagcagacaagtcatcagtggcactttattcagtcagttcttacatcaaggtgtttagaaaacatcatgctgcctgctagccccgcagggccctgggttagcctagggtctaagaagtccttccttgtcagcttctataaaacagggctgtagcacaggatgggggtacatgggcttcctcagataggtcccacaggtcatgagcctggaaccaaggcttgagcccccaaatgcgagctggcactcacctaggggctgaggggagagtcaagacccactaaaatccgaaaacacacctggtgaccacagcacaatcattagagctcaaggtggtctgagtttccactcaatgtcttgaatagattgctcagggctcagaagtatcactttgcgctgttacatgaacatgggagatgtctacacatgatctagctggaggcactgggacccctggaagacagaagagggtatagaacttgctcccctaccatggtactaggaggcgcagcctaagaccatgagaatggcttttaagaactgtatggtacccttcacatttgagatgttaataggccaaaaggagcctggaatttaggtgccagctctccagatcctggtgggaaggtggttcagagtggagagaggaaacgccaggctcctgggttgaacccttaatttaacaggtgcagacatgtcagctcctgaacgtacaccctgggcaagtgctgaggtacaggacagaatgacagttgaaatacagccagctttcaaatgctcagtctgagtacaggtctcagtcctggatcctccatttcttttttttaagggggtggtggtggtggtagtggtttgagacagggtttctctgtgtagccctgcttgtccacctgcctttgccttccaagtgctgggattaaaggcgcacactgctatcactgcctggtggatctgctatttctaaccctgacccaggtcagttaagcaaacagatgtgaggacaactccaaaaaccaagggaagcatccactggcagacctagcacgtgtgtttgctaaggtcctgcagtgaggtgatggcgtgacctgcaaggacagagtccagagtggagggtagaggtacagtagggaattcctgaggcagcagcagacagtacaggccactgacagtacccagtaatacactaaaggatgaagacgatgggcagacacaggacagctccagactgctggtcataggagataccctctactgtggggacacacctggcaaccataatcttgtcctcgtagggacaccaggattcagatttaaccacggagccactaggctccttctgctgttactatgcacaggtttacatgcaagaatcaccttattcctgcttagcataatgtttcctttaacagttaagaaagaagtttcaagaaactgagaatgtcccattctgctcactgcttctctgtacatgttccagatcctgtctggagtcaaggattttttttcccctggacagggacttgctaagtagcctaagctgaacttaagatcttcctcccgttgcgctccaaggatggggttacaatgtgaaggtggtggtgaggccacaggacacccagccctggcctgtccatggagccatttccaaatgagaaaggcaaagagctctagactgtccacttagaggggtgccagtgaactgttggcgggcagggaacaccattctgaaagctttgtggcatcacagtacaacttcctcacttcttggtggctggagcacagccatgaacatttgtgctaaagaagctggagccttgagcctacaacatacagagattcccttgtgaagccccatcttgcacattgccctgtgggttaggacttgaattttctgttacaagccacacaaagcctcaggtatattcaagttgcagatgtcagttctatccccaaggcctgctcagcaatgtgaatgcccaacagaaaagatttcattttcaaaggcttcttcaatgtatgtcacccactatttaggaattactcatgaattaggcagacggtcatgtatgaaaagtcagtactagtcagttaaagaattattaagtggtgaccaatggtgaactcaagagagcgctagtcaacatgtctcggaatccatacaggatacagacactgctgtcagggacctgcagttatgacaactgtgaaggcgtgagcagacacatctatgtacatgggcaatcgggaatctcaatcccttggactgacggcagtgtcctcagagcagagtggcctgcatctgtgttatctaactcctagcccaaggcctatgaggacacatagcagacacatgctctgggctccacacaggtgctgaggtccagctggttctccctcgcctctcacaggctggaggctcgctcagatcctgatccaggaaggacacatacagagaaatgccttcctactgagcctggccagagccatgtctgaagctagggatcagtgtagggctatgatcctattggcagctgtaccttaacccaaggcttagggccgttcagtaccacaccagagcatgagtccacagagccaccctctccggctccagccagactgaatcttcgtggaatgatgaaaattaaaaattgcttcattatggaagtttctgatttattccagacaaaatattagatttgccactaagaatcacctcaaagcaatcactcttgtgtgtcatgcccctgtggctggcacggcatgatgaaggcagacctgtgggccagaagctggcagctctaattcttcacttctgcggcctctttctcagccttctccttggccttctctttctcttctatcttttcttctttctctagtgtggccacaatttcagctacctgggtggtagagatctgaacatcttctttgttcaccaagtcgattacctacacacagaggagggagacttaggaggggctccaccaccgcagtcacctgctgtccctcaacagctccgggagactccccctctgagccatcctctaggttggacacttgccattttactgcatgctatgggtatctggttctttctgctgctcagacctccaagagttatagacttcacagcgagggtgcggcaccagttcccatagcacatgcatgtttgatagtgcctgttttaaaatggaactaaaggaaattaacctatagttctggctatataaagaaaaatcacaagctggccaggtgtactgagaaccaagatgacagtggcaaacttttttccctcaagaccataacatataatttcagtaggttcatgacagtttgcaggctggagcccaggcttcccttagaggctggatctggactcaggtcttctcggctgacatccctggagcttagctactattcctactaactctacctactcagtatctttcaggcagccccaaagggatcctggcagaggtgttgaccctgttcctcagatccaatagggatgcaaggtcccacagtacatgtggaaagattccaaggcggcatgcaggggcattttcttatctcaccggtatgtctggaactttagtaacttaattccagcgtgatttcaaatgagagcaaagggctaagacacttgggcttgcaaacttgacttcccaacagtcttccttttgaaaggatttgttgatttttactatgtacattgttgttttgccccttggcgtgtctgtgaaggtgtcagatcctctgcacctatagttacagactgttgtgagctgctctgtgggggtaggaattgaaccttattcctttggaagagcagctagtacctgtaaccaatgactaagccatttccccaggcccttcctgatcgccgtacagctctgaataagcagcccccccacaaacccctgggccctagaacaggaaagcagccgggctggcctggcgcagccgcactgactcaccttgacaaggtcatcgatgttgatattgccgtccttattatcatccagggctgaggtcaaactgatgagcttgtgctctggaatgtgcttgatttgcttcatggcgctgatgagctcagtgatgctgatgacactctccctggggagtgcaatctgcatgtgacattggccaggtacctgctctcatgccttacccacagctctttccataaggtctgacactggagccatgcatgaactggaaatatcagcatgacttctcccacagtgagatcctaagccgctttcccttcaagatgcaaggctagcatgggcgcttacagaaagcatccttggatgctggggaggttgcttagtggctgtcagtgttctactatgtgaggacctgagttcaaatcctcagaacccatgtaaaaacctggtagtgatcacacatgtgtctattaccacagtgctattgggtgggggcaggcataggaagatcatgggcttgaaggctgacggcctccatgtacacataagcatgtataccagcacacacacacacttataacatagcacatatgcaaataccacactcacacacatgctcatgcataccacacacacacacacacacacacacacacacacacacacctgaaaaaagttttgaggctggagaaatggctcaatcgtaaaaagcaattattgcacctgcagaggcttgagttcagttcccagaacccatgttgggtggctcacagttgtctataattccagctctaggggatctgacactttcttttggcctccatgggcaccacacacatgtgcatctccccacagtggggagcaccacgtcttccagtctgtcagcaaccaattccaggacttagagtagaagccacgctgtagccatctgcctcactgtggagtctatggtcaggacactgtttgctggtgtctgctcaggaaggcagactgtccacaatggtgttataccagggttagaaaagtggggaagcagctgggcagtggtggccagcacttgggaggcagaggcaagcagatttctgaattcgaggccagcctggtctacagagtgagttccaggacagccagggccacacagagaaaagtgatgaatcaggagaaggcctgacagtttgaagaaccaggaaccaagttcaaaaagctcaaaaggatgggaattcagggaagaggcaggtctgatctacctaggtaaaacaagcatggagatacagaaactgagctgtgaagggaggaaaaatgagagcagagatctcttgtaatcctggctgcccctggccctaagtgaggtgggcaggtagaggtcaaggagatacactttgggactagaggcccactcaccctgttggagtgctctggctggggcccagcttgccatcctgttgagtggtctccagctgtgtgatcaggccatcgatctgcccgatcatctgctgcactcgctttgacagcctcttgctcgctgcagattcttctatgtacttctcctcacccgtctttgaaagttccttcttgatctcctgtaagtcctaatttaaaaagtttaccccccaaaagagggagggctctacattaatttgaacttaaacattaagtcgttaatttgaactgggacggggctcagtggtacaaggtactatgcaccaggtcctgtgcttgacccccagctccacaaaacagaaagcaaccaaacagaagaattaaattcagcctcaggaactgcagagtcttatttctctcatgcaaacttattcttttttgttgttgtttgtttgtttgtttttcgagacagggtttctctgtgtagccctggctgtcctggaactcactttgtagatcaggctggcctccaactcagaaatccgcctgcctctgcctcccgagtgctgggattaaaggagtgtgccaccactgcccggcacaaacttattcttattaatttatttttgtaagttcaaacttttaaaatctattctgaatttcaacttcctttgtagttagcaatgaataaatacaaaggctcaaggatgcctaagcactgccttctttatatgggtcagaggtcacagggctaaaagcagggtgaggagcagagggaataaggcactgccttgtctggtgaaaaatgtggtttctggtggacaagtcacataacccag

SEQ ID NO: 1391 - DNA, 2887 bp, Mus musculus
ccggcggggggactcagtggtgggcggccggcactgggacagaggagaccctggaaaagcgggccgagagacggagccgcgcgtggtgagttgggctctagcggccgccagtctccacagaggcgttctcccaccggcgccggagccgcgtggggggttgcagcatgcccgcgcgcgctgcttgaggacgccgcggcccccgctctggagccatggtagtcccggcctgcgtgctagtgttctgcgtggcggtcgtggctggagctacttccgagcctcctggtccagagcagcgagttgtgcggagagcggcagaggttccagggcctgaacctagccagcaggagcaggtggccttcggcagtggggacaccgtggagctgagctgccatcctcctggaggtgcccccacagggcccacggtctgggctaaggatggtacaggtctggtggcctcccaccgcatcctggtggggcctcagaggctgcaagtgctaaatgcctcccacgaagatgcaggggtctacagctgccagcaccggctcactcggcgtgtgctgtgccacttcagtgtgcgtgtaacagatgctccatcctcaggagatgacgaagatggggaggacgtggctgaagacacaggggctccttattggactcgcccggagcgaatggataagaaactgctggctgtgccagccgcaaacactgtccgcttccgctgcccagctgctggcaaccctaccccctccatctcctggctgaagaatggcaaagaattccgagggcagcatcgcattgggggcatcaagctccggcaccagcagtggagcttggtcatggaaagtgtggtaccctccgatcgtggcaactatacctgtgtagttgagaacaagtttggcagcatccggcagacatacacactggatgtgctggagcgctccccacaccggcccatcctgcaggctgggctgccggccaaccagacagccattctaggcagtgacgtggagttccactgcaaggtgtacagcgatgcacagccacacatccagtggctgaagcacgtggaagtgaacggcagcaaggtgggccctgacggcacgccctacgacactgtactcaagactgcaggcgctaacaccaccgacaaggagctagaggttctgtccttgcacaatgtcacctttgaggacgcgggggagtacacctgcctggcgggcaattctattgggttttcccatcactctgcgtggctggtggtgctgccagctgaggaggagctgatggaaactgatgaggctggcagcgtgtacgcaggcgtcctcagctacggggtggtcttcttcctcttcatcctggtggtggcagctgtgatactctgccgcctgcgcagtcccccaaagaagggcttgggctcgcccaccgtgcacaaggtctctcgcttcccgcttaagcgacaggtgtccttggaatctaactcctctatgaactccaacacaccccttgtccggattgcccggctgtcctcaggagaaggtcctgttctggccaatgtttctgaacttgagctgcctgctgaccccaagtgggagctatccaggacccggctgacacttggtaagcctcttggagaaggctgctttggacaggtggtcatggcagaagctattggcatcgacaaggaccgtactgccaagcctgtcaccgtggccgtgaagatgctgaaagatgatgcgactgacaaggacctgtcggacctggtatctgagatggagatgatgaaaatgattggcaagcacaagaacatcattaacctgctgggggcgtgcacacagggtgggcccctgtatgtgctggtggagtacgcagccaagggcaatctccgggagttccttcgggcgcggcggcctccaggcatggactactcctttgatgcctgcaggctgccagaggaacagctcacctgcaaggatctagtgtcctgtgcctaccaggtggcacggggcatggaatacttggcttctcagaagtgtattcacagagacttggctgccagaaacgtcctggtgaccgaggacaatgtgatgaagattgcggactttggcctggctcgagatgtgcacaacctggactactacaagaagaccacaaatggccggctacctgtgaagtggatggcaccagaggccctttttgaccgagtctacacccaccagagtgatgtttggtcttttggtgtcctcctctgggagatctttacgctggggggctcaccgtaccctggcatcccagtggaagagcttttcaagctgttgaaagagggccaccgcatggacaagccagccagctgcacacatgacctgtacatgatcatgcgggaatgttggcatgcggtgccttcacagaggcccaccttcaagcagttggtagaggatttagaccgcatcctcactgtgacatcaaccgacgagtacttggacctctccgtgccgtttgagcagtactcgccaggtggccaggacacgcctagctccagctcgtccggagatgactcggtgttcacccatgacctgctacccccaggtccacccagtaacgggggacctcggacgtgaagggccaacagtcccacagaccaagccccaggcaatgtttaccggaccctagcccgccctgctactgctggtgtgcagtggaccctagccagcccagtgcaatgggccaacagtagacaagacttcctgcgtgtttatccttggctcctgggtgcagaggcccttgggaacatgcactgctgtagagtaatctcctgactggccagggccaggagcaccaaacaagaatgtaagaggcccaccctgtgcaaccctggggttctggcccctct

SEQ ID NO: 1392 - DNA, 2403 bp, Mus musculus
atggtagtcccggcctgcgtgctagtgttctgcgtggcggtcgtggctggagctacttccgagcctcctggtccagagcagcgagttgtgcggagagcggcagaggttccagggcctgaacctagccagcaggagcaggtggccttcggcagtggggacaccgtggagctgagctgccatcctcctggaggtgcccccacagggcccacggtctgggctaaggatggtacaggtctggtggcctcccaccgcatcctggtggggcctcagaggctgcaagtgctaaatgcctcccacgaagatgcaggggtctacagctgccagcaccggctcactcggcgtgtgctgtgccacttcagtgtgcgtgtaacagatgctccatcctcaggagatgacgaagatggggaggacgtggctgaagacacaggggctccttattggactcgcccggagcgaatggataagaaactgctggctgtgccagccgcaaacactgtccgcttccgctgcccagctgctggcaaccctaccccctccatctcctggctgaagaatggcaaagaattccgagggcagcatcgcattgggggcatcaagctccggcaccagcagtggagcttggtcatggaaagtgtggtaccctccgatcgtggcaactatacctgtgtagttgagaacaagtttggcagcatccggcagacatacacactggatgtgctggagcgctccccacaccggcccatcctgcaggctgggctgccggccaaccagacagccattctaggcagtgacgtggagttccactgcaaggtgtacagcgatgcacagccacacatccagtggctgaagcacgtggaagtgaacggcagcaaggtgggccctgacggcacgccctacgacactgtactcaagactgcaggcgctaacaccaccgacaaggagctagaggttctgtccttgcacaatgtcacctttgaggacgcgggggagtacacctgcctggcgggcaattctattgggttttcccatcactctgcgtggctggtggtgctgccagctgaggaggagctgatggaaactgatgaggctggcagcgtgtacgcaggcgtcctcagctacggggtggtcttcttcctcttcatcctggtggtggcagctgtgatactctgccgcctgcgcagtcccccaaagaagggcttgggctcgcccaccgtgcacaaggtctctcgcttcccgcttaagcgacaggtgtccttggaatctaactcctctatgaactccaacacaccccttgtccggattgcccggctgtcctcaggagaaggtcctgttctggccaatgtttctgaacttgagctgcctgctgaccccaagtgggagctatccaggacccggctgacacttggtaagcctcttggagaaggctgctttggacaggtggtcatggcagaagctattggcatcgacaaggaccgtactgccaagcctgtcaccgtggccgtgaagatgctgaaagatgatgcgactgacaaggacctgtcggacctggtatctgagatggagatgatgaaaatgattggcaagcacaagaacatcattaacctgctgggggcgtgcacacagggtgggcccctgtatgtgctggtggagtacgcagccaagggcaatctccgggagttccttcgggcgcggcggcctccaggcatggactactcctttgatgcctgcaggctgccagaggaacagctcacctgcaaggatctagtgtcctgtgcctaccaggtggcacggggcatggaatacttggcttctcagaagtgtattcacagagacttggctgccagaaacgtcctggtgaccgaggacaatgtgatgaagattgcggactttggcctggctcgagatgtgcacaacctggactactacaagaagaccacaaatggccggctacctgtgaagtggatggcaccagaggccctttttgaccgagtctacacccaccagagtgatgtttggtcttttggtgtcctcctctgggagatctttacgctggggggctcaccgtaccctggcatcccagtggaagagcttttcaagctgttgaaagagggccaccgcatggacaagccagccagctgcacacatgacctgtacatgatcatgcgggaatgttggcatgcggtgccttcacagaggcccaccttcaagcagttggtagaggatttagaccgcatcctcactgtgacatcaaccgacgagtacttggacctctccgtgccgtttgagcagtactcgccaggtggccaggacacgcctagctccagctcgtccggagatgactcggtgttcacccatgacctgctacccccaggtccacccagtaacgggggacctcggacgtga

SEQ ID NO: 1393 - DNA, 33352 bp, Homo sapiens
  misc_feature (8632)..(9859): n = a, g, c, or t.
ccgaagctgagcttcttcacctgtcttctgactcacttatctccccgagccccggagatacaaggatcacaggcaggggccttctcctgagctggccagagctgggcaggacacttggggcacgcagcttttgtgggctagcctggaaactcggctatcctggacaccacactggcaacaggttgtctggagccaggtcggggcatgtggggcctgagccaaggctgtcagctgaagcctctgacattacttgtgtccctaggacaatcacacgtgagagcacatgcacacgtgaccatgtgagcacacaggcacgggttcgggccccaggctgtgctgccacctgaagcccctgccctggctgtggatgcccatttggctgggcacagcaaggcggcggccttggcacagggagcctgcccagccttgctctgacccagttttccatgcccaggcaggcgggtggcactggtgtagtggctcccagagcttctctttggcaacaccaatcccctgggcccaaagcagctccacaggggcacctggatggctccatgtgccctgggcatgtcctctgagagggtgggtgcccccctgggatgtggccacccagccccagcggtttcacaccctagaaccagtgccttctgcctgtggtccctaggcacacagctgccgctgcctgaatgcgctctgcctgccctgccttctgcctccagatgaacggacctgtcatccagggagcgatccctgtggccctccactctagacctgcaggctgcttccttgcccactcctgggggtcagtcatggcctggctgtagaccagatccttgaggggtgaatctggggataagcctcagagccacagggcctgggcaggcctcagaaggcatcccagagaagggagggtggaaggtccccatgggcagggaggcgcagggagcaaaggctgctgggagcagggaggggagctgggcgggcggaagggcggccgtgggaagccagccctggcctggctggcctgataagctgcccctttgatccacactgaggcaacacagacccccatcctgagataaccccgggcctgggacccaaggctctggtcaacccgccctcccgagtgtgcgctgccctgcccctccggccctgacagtgaccggtccttgctcagctgcaagctgggtgggtgcagtctgagcccaggcctggcgggcactccatgtgcccccaccccaggacctgctggtcctcaccctgccttcaaagcctccccagccccagcctctgtgtccagctctctgtcccctttggttgggaaggggcacctcccccgccccccagttcccatccccttcactgtgcccctgggaggcccctgaggccctcactccccagctggggctcagcaggtttgaggccctttgggcagccctgtctgaccagggctatagtgtggcacaggtgtgggcacaggtgtggcataggcgtgggcaccagctatgtgtggcttgggtgcacactgcgtaggcaccttctcccgggcgcctgcctctgcctggcgccggtcagcacccccatgccctcggtccctcccctgcccaggtcagtggacaatgaagctgtcagcagactggggccgggggaggcaggcaggcgtggcggggaagggaggcctcaggaggcgaagatgtctctattaggggctgcagaccttgcttccactgtcctgcccagccctggggactccgagagctggaggcagaggtggccccaagcttggggcagaaagggtcgtcttgtccatcagggccccagtcagccttgggactgggtccctggaaaggcaggcccatagatggaggagcccagagcgtggggctggccacaggtggtcagggagggtggaagcgtggctgggagctgcacagggatgaggtgtcgacggcgctgacatcccagccctgccagcctcctaaggcacccacggcccacatctccctgctgagcggaagcactgggggacgctctacccagtgcctcagcagaccctcagccaacggctgttagaatatacctcgtgtgaggtgcgtcacgatacccagctgtaaaatggggcaaccctgtggcttcaacagactccccttcccagtgcctgcggctgagctggagtggcaggagggcttctgtgggagcaggtggcaggaagcataagggctgggggacctgcagaagctccgtacccccgggaggctggggccagagcaggcttcttgcaggggcgctggtttcggccctcaccctgactgccctgccggatccgggcagacgaggccccacgcacaccgcagcaaggggcccaagacgccagccaggccctcaccttggcaagaggtggcttctgtttctgacaggtcaacagctgggctaggggaggtctccagggaccagccacgccccacttcctgagggctggagagggctggggagggtggcccaggtctgcgatcatcagggcctggccagggccttctttcccagattcccccagagctggagtccccagagccacgccccttccctggcatgccctggcgcccgggccatctcctcctgggcacttgcggaggttgcccctgctctccccactgccctctcagcaggcgtgaatagagtccctcatagcttgggagactgaggcccccagcaggtgcctcttacccaagaccttggaactgggtgaggtcctccgggcccaccaggacccgcctcagacatcaggctttgcacttgcagcccggagcctcccgaccccactcccaggccaagggcctctggccgcagcctccgccatcatctgccggcttctggggccgagcatcagggccctgtgcccctgctgagcgtgccgggtgggggccgggctgaaggctgcacctggaggcagggctcccgaggaagccgcccagggggtcagagccaaacagctgcctcctctagtcagccccatgcagccttacgggggcagcgccctgcagtggctgcgggtggggccgggtggggcagggctgccctccctcatgccgctgggcacctggcctggggcagggggctctggcccactctcgggtctccctaaatactgtggcgaacaccccacccttcccaagctcagctgaaacctccctggggcagggctgtcagatcaggccactgagcgcctcctgctgcctgtggctctgtgcctcagtttccccacctgtcaagtgggtgttggtgatgtggctggcatgaagtttctgtcaggagccaccagcactccgcaccttgccatccacaggttctcagccacacagggtgtggggttgccccaagccaacccatttgtgggggtggggccgccccacaccccggctgggctggacgggatctccatcctctcgtgggcagctgcctgctgggcccagttggccactctggactcttgggccctggccggaagcacgactgaggttgtccatggtttggggacgggcaggcagagggtggccaggcgaggccctgagaaggggctctggccgaggctggccaggtgacacccggagtggcgggcagggctgagaggaaggggcatcctgaagagggcggaggccgcggagggaggagggtgtgacgtggggttggaccggcggccccgaggcctggattcctaattcagccggagcctgtggagtcggggcttgtttattcttggcaggaaggctggtgctgggggggcagaagtggggagtgaagccttttcaaaaaataataataataaaaacgctcatttagaaggctcccaaggcgtgctgaactccaaaagggtcttggaaaaaatgctgagagggtttaagtgtaaatggacccaaaacaccataattaaatttcctttaaatttaccagagtttggggtcaaagaaaaaataaaacttagggaaaatacacttgaggtttcaggcaaatgccaagtgcttaggaaaatagattctgagctgctcagcggctaccggcctggcccccgccatcctgggagctgcccagccttaacccctccctggccagccctccactgcccgccccacccacccctgtgggggaccccaccaccacctcctgctgcttccgcacggttcgagccgccctcctgtgccagactccaggcagggagctgggcctcccccactcccaggctggggcaggagcccagggggagcctgaacattcacccccgcccccatctctacagctctctcttgtgtctgcagacagctctggtttcctttctttgctcatctgggagcagccacattttccaaaccaaagtcagaacttgaggtctagtggtctgagtgaaccaaacggtaaaaaggccagaatgtttgaactgggactgtcctgccatatccaagacgacaggctcccagcagctcatgactcacggtgttaccctttttcctcagcctgccaggaagctcagagctaaaattaagggtcttgctagctgcgttggcttagggattttggaatattttttcttcttcttcacgttctttaaaatttcatttctgttataatgagcaaatcaaggtttgtttttttattttaatacttttcaaattttgtgagaataaatttaaaaggcaaagtcaggcatggtggcacatgcctgtatttgggaggctgagacgggaagattgtttgagcccaggagttcaagaccagcctggacagcatagtaagaccctgtctcaaaaataaaatagaaggcagaaactacccataaactataatagctatagccccactaacagcccagtccagttcagcagggctacccaggggcccttcttcctccatcccatggtggcctgccctgatccctggcacccaaccctgtgccctgacagtgtggaagggcactagtggttcctggggaaggtggtaggagatggggagctccgaggggagatcgcatggctcccagggggtcccatgggcagaagggacttgatacccactccggacctccgtgtcccctgtccttccactcagcctcatggcagggccgagggaagctccccgcagcagccccagccctaggccaggttctgatcccagaggggagctgggcaggaggctctctctggcagctcgcctgccctgggttccaggtctccaagcctcggcctccctgcccacctccctgtcgggaaaggcggcagctgcctgcccggagtgctgtggggaacaggcggtgtggatctgagactgtgctgggaatgtcctctctgccgaaggcgcctctgccattttccgagtacctgcaagggagacgcaggagacgcgggtgtgagcggggccatgggcaacctgcggaggccctgcacccaggatgggcctccctcccaggcaccctctgccactcacccacacaggccccagcaagccaggctgcccagctctgagtcaccgccagggctgggctgggccgggccgtcagccgcacgcgccgcttgtctcggcccctgcctcccatactcaccttcaggggggacccctgggtatgggcctcaggaggtgggtgggggtgcagggggagtgggtagggaggtgtaaaccggagtccagcagatgggaagttcctgtccggccggcacctgcttggagcctcctgcacatgcggaccctcaacaggctccccgagtcctcgcctgccctccctgcctcaaaggccccagaagggcctacttcatcaggtgccacgaggatgaagccaggtaatattgcaaagggtctgtggaaacgcttgagcaagggcactgtgatgaaattgtggctactgacagctaatgtgcagagtcaccgaaattcaggagtcaagcagccggcctggcctcacctcagtgtcgggggaatgccatctgcacctgtgggcttggaagtgatccatttgaacaatacaattattcagacaatactaaaccgagctttcaggcaagacctcccgtggccctgacagtcctggggcagagtgggcagcaactccttgctggtggccgtggcggcactaggacccttttgaaaccaatttggcaaaattagcggcaccacggaaatgctcctgccctttgacctaactgctcccagacagtgccactggagaagccattcagaatgtggagggcgccagaggaggcagctgccacgcagtgcgtagtgggcagaacggcggcctccaaaagacatagtcatgtcctcaccccttgcagcctgtgaacgtgaccgtatttggaaaaggatctttgcaaatgtaattaaggtgagaatcttgagatgggggatcctcttggattatccaagtgggccctatatccaacgacaagtgtctgtataagagatggaagagaagatggcagagtgggaagcagaggctggagcaatgaggctgcgagccaagggacttggagccctgggacacttggagcccccaggagctggaaaaggcaggaaagatcttccctggagccttcagaggcagtgcagccctgcctacaccttgattccagacatctgctcttccagactatgagaaagtaaatttaagtcaattagtgtgcagtaatttgtgagggcaacctagaaatacaagatgctactgaactaaggaatccccggctgctactggagggagaggtggtgggcctgggccagggctgcggggacaaagggagggagtgggttgtgaaagtgcctggtccccagtccctcctcctgccagcactgcccactggtcaaacccacccagaagctggagagcaagggaccctcagagatagggtctgtaggatcaggctttcaaggacaaatgggagaggggctggggaagggacacatggggaccagacccctactgggcatttctgccaaggagaggatcctggtgaggaagaaagcagaaagctatgtgttcacagatgcacggatgctcccctcccagagacccgtggccgtgggtgcagagggagtcagtccttcttggaggtactgggaaaggagcctacagctccactgagcccttctgcctacaggaggggccccactcagcagctgttccctgagggagacctgtccacgcgtgagctccttcccacagtcccatccagtcccccaggggaaggggcaagacggtcaggtcaggacccacacgcatgctggtgctttcagaacctgatgacttagttggttaagagagctcacacctgcaatcccagcactttgggaggctgaggcaggtggatcagttgaggtcaggagttcaagaccagcctggccaacatggtgaagccccgtctctactaacaatacaaaaattagccgagtgtggtggtgcacacctgtaatcctagctacttgggaggctgagacaggagaatcacttcaatcagggaggcagagattgcttgagctgagactgtgccactgcactccagcctgggtgacagagcgagactccctctcaaaaaaaaaaaaaaaaaaaaaaaaagagcagggccaatgtgctgctgtgccttggggaacggtgtcctgggagcggacctggctggcagtgacctggggctgtgcactggagggggctggacagtgcacttggaggtgggtgagcctgggccccaagacggtctggggacatgggcttggccagagcaggaaatgagggtggccaaggacaggtgctgagccaccgagtcggcacagaggggtgggcatgagggcttcctgggagcagggcccttccaagtccctgaggtcagcccagggacaccctggcctctgggagattcatggtggagctgtgcatgggctgggtggggtcagcaggcagccagtcactgaggggctttcagcgcccattttcctgatgagcacctccagtcctggaagccacaagccaggcacgcagcccacccggccggccctcccggccagctcactggctcccatgggccccggacctccttgggctttgcctgaaggtgggagcagatggccttttccttgtgagggtggacacagaagccaacagtcatgtggggtgaggggacccaggcacctccagcgtcccccgcagggcagcaccttcccctcctgggaacccacccctcttcagctggactctgagcccaccccgtggagcccagaacctcgggccagctcaggctctgccaccagctctctgtcatcctccctcagagccgggctgtgctccccaagccaggggtatccagcccccgctcttcatcctaggccgggcaggcagccagccccaggcctgtgtcctccttggggggcggggggtagggacccctcgcgcggggctctcaggcggcttagctgcgtgcggccccaggtcagtcaacgcagcctctgcacctcgccggtcaggtacgcaggccgcgccgggctgccccagacctgcggcgcacacgggaggctcagcctggaatgccgtcctgccctcctccacctgaggaattgccgctcacaccacagggttcagctccgcggcatctcggcgaagcctcctgannnnnnnnnnnnnnnnnnnnnnnnnnnnnnnnnnnnnnnnnnnnnnnnnnnnnnnnnnnnnnnnnnnnnnnnnnnnnnnnnnnnnnnnnnnnnnnnnnnnnnnnnnnnnnnnnnnnnnnnnnnnnnnnnnnnnnnnnnnnnnnnnnnnnnnnnnnnnnnnnnnnnnnnnnnnnnnnnnnnnnnnnnnnnnnnnnnnnnnnnnnnnnnnnnnnnnnnnnnnnnnnnnnnnnnnnnnnnnnnnnnnnnnnnnnnnnnnnnnnnnnnnnnnnnnnnnnnnnnnnnnnnnnnnnnnnnnnnnnnnnnnnnnnnnnnnnnnnnnnnnnnnnnnnnnnnnnnnnnnnnnnnnnnnnnnnnnnnnnnnnnnnnnnnnnnnnnnnnnnnnnnnnnnnnnnnnnnnnnnnnnnnnnnnnnnnnnnnnnnnnnnnnnnnnnnnnnnnnnnnnnnnnnnnnnnnnnnnnnnnnnnnnnnnnnnnnnnnnnnnnnnnnnnnnnnnnnnnnnnnnnnnnnnnnnnnnnnnnnnnnnnnnnnnnnnnnnnnnnnnnnnnnnnnnnnnnnnnnnnnnnnnnnnnnnnnnnnnnnnnnnnnnnnnnnnnnnnnnnnnnnnnnnnnnnnnnnnnnnnnnnnnnnnnnnnnnnnnnnnnnnnnnnnnnnnnnnnnnnnnnnnnnnnnnnnnnnnnnnnnnnnnnnnnnnnnnnnnnnnnnnnnnnnnnnnnnnnnnnnnnnnnnnnnnnnnnnnnnnnnnnnnnnnnnnnnnnnnnnnnnnnnnnnnnnnnnnnnnnnnnnnnnnnnnnnnnnnnnnnnnnnnnnnnnnnnnnnnnnnnnnnnnnnnnnnnnnnnnnnnnnnnnnnnnnnnnnnnnnnnnnnnnnnnnnnnnnnnnnnnnnnnnnnnnnnnnnnnnnnnnnnnnnnnnnnnnnnnnnnnnnnnnnnnnnnnnnnnnnnnnnnnnnnnnnnnnnnnnnnnnnnnnnnnnnnnnnnnnnnnnnnnnnnnnnnnnnnnnnnnnnnnnnnnnnnnnnnnnnnnnnnnnnnnnnnnnnnnnnnnnnnnnnnnnnnnnnnnnnnnnnnnnnnnnnnnnnnnnnnnnnnnnnnnnnnnnnnnnnnnnnnnnnnnnnnnnnnnnnnnnnnnnnnnnnnnnnnnnnnnnnnnnnnnnnnnnnnnnnnnnnnnnnnnnnnnnnnnnnnnnnnnnnnnnnnnnnnnnnnnnnnnnnnnnnnnnnnnnnnnnnnnnnntcctgcagtctcccgacggcgcccgcctcccgccggtgcccgcgccgggccgtggggggcagcatgcccgcgcgcgctgcctgaggacgccgcggcccccgcccccgccatgggcgcccctgcctgcgccctcgcgctctgcgtggccgtggccatcgtggccggcgcctcctcggagtccttggggacggagcagcgcgtcgtggggcgagcggcaggtaagaagggacccactaggcacgggagaggccggcccgtgcgggcagaggcgttggggacgggaaccggccccgggtcggaggggccgccgggtgtgagtgacgccccggggttagagcccggattccgctgcctccttgccggagagcgcggccagagctagcgcggcgacttgtggtgcgcccggagccgcagctaccctccaagtgcgaggccaccacggggagccaggctgggggttggcgtccgcagccccgatcccctgcgactccctagccctggcctgtcgggagggcgcggggggccccatttccacgattcccgctgttgttattcgggttctgcgcagacggaaagttcccattgttggcgtccccctcccccgggccccagtttgtggccagcttcagccaaggcgagagaccggacttctaagggtgggtgtgcgcgtcagcgaagcccggcccctgcccgcccgaagaggcagcagcctccagcgtccccgctgccgaccctgcccctgcctgggggccgagggcgcttccccgtgggtgcgcgccgagctccaggcaagcgaggggcgcgtgtcccagcgtcgcgggccctagactgggctggcggtccaggtcccgcgggacgtcgagggtctgaagggaggtcccaaggggcgaggggaggggaaggggcgcccggccggacctgcacacgcgccgcggttcctcgtgggccgggccgagagctccggtgccgccgccgcgtacacccgctgccggctccggacgggcgaggggggcgcgcacagctcagcccggcggccgcgcggagggaggccttggcccggtgagctcgcgccccacccgggcccaggcccgaacagccgcttctttgtacctcgacgcggccacagaccgcgcattgatggcggctcggcggctcgcggggaggtgtgagcgaccgcgggcgcggcgggccggggagggcgcctggagggccgaggcagatggcgtccgccccgcccgcgcccccgcgcccctttctccgtcggcggctgcagcctcccggaacaatgtcattttttttatgaatgaaagtggcccggcgcttgaatgtgcgtgtcattcagcggcgtgacaggggccgtcgggaggtcagcgcgcgcttttagcgtctgctcgggcggccccgcttccaggggtgccggaggggcggccgcggggggagcttggctttcgcattctcattcagataaagatattactccctacggcccgggaatgtcagccagccccggggaagggcggcggccaggctgcggagcctctcctggaccccctgcgggcgcgcggggcctcccccagtcgctcctggaacgccccgcccacccctcccccggggcggcgcccccgcccgcactggagctggtgaaacaggtagtgagttgatcggtcaataaacttaatccggttccttaacaagatgggccgggcagtaaaaatacaaagacctcgtgaaatggactgaggtctaggctggcgcttgcccgggaacataaattatggagccttggctcgcaggggtcaagggcggtgggaaaggttttggccactggactgccctggccaccccaggccctgccaggacagcccccatctccccagggggccgtattcctggttgggacctggagtgaccccccagggtgcagggaggtacacaaggtcggctctcccacagtcccaccccacccagcaggggtctgggggtgcagggcctttcccgaaggtgctggctgcaacctcccccactcctcctctgcagggctggactttgagccgcgtgggcctctgggtggttcattaacctgggctgagcctggcctccaggtccttgtgtgagcctaggaaccccttgttacccaccccccagctccccagccctcaggtctcacttggggctagatctggggctgtggcaccccttgttacagctgagcttgagtgggagcccaggggcttggggtctcctggaggacggggatctaaagtcacctcatctagggaggcatgcagccctcacctgagtgattcaggagtgaatgagccaggagtggagccacctttggtggggtaggggtcagcctggacctctaggctgccagctcaggctcgggtgccctcttcgaacctcagtttccttacctgtccaagagaaccgataatggcaggctgtttgaaggattaggccagataaccctggcaagccctctttagcctgcccagcctccagatcccttttttccggactttattgtgaaactccaggtggggagacagggaggctggacttttgggggccccctcctcttaggctattttatagctcctacctggcaatacctcctgtaccccagagagctgcagagaacttcatgtgcatccgaaaccagaatgtgttgtttcctgaccccaggccctcatctcaccccaaaacccaaataaacccctggggcagccagctccggaagcgagtctggatttgatccttgttctctggggtcaacccgaggggcttatgatggagcaaggctcccccatcctctcagccatgctccctcacatgcactgggcctccactgcagagacccagagcctggagaaaggttccccaggccagagtttggccgtccccagcaccctgcctaatggacatcagtcttggggccagagacccagggcagggagcgcctctcacccctaccctcactcctgcagccatttcagggcctggtgccctccctgagctcctgggcctgtggggtgggatttttactttgtgccacagtgggggaaactgaggtacaggaccagtgagtggcagagttgtggagactctgggacacagcagagggctgtcgttggcatgtggagcccaagttgaggtcggcactgtgtggggttggggcgccggcaggagcacgtgttgtgggatccatagaagggtgggaggtgggacgcgttgcctcctaccccgccttgggtacagcaggagttttgtctccaacgtgtttgggcaccagtgtctgtgtggtgtcagtggggcctcccttttgtggatcaagaaagaaagaacccttcctagggctgctggggggctatagctctccccatgcctggcagctgggtggggtatgggggctccacccaactgctgacttcccagtgggagtcagaccctgaacttatagcacccactcatgccccgtgtcacactgtccttcacctggtgctcgccacccagcccctgctggggtaccctggcctctgctggcacctagcaggcaggcagtggggggggcagtcagggctgcaccctccccaccacacacgggcagatggccactggtgtggctggcctggggctgctgtgtcccccgtccccccgtgctggaccaggctgaagcaaatacttgtgtggatggcttgacctgttgtcgccactcagaccaaaccggaaccaaccggctgttgcccttgggccagggcctgcagctgaggctgccataaccagcctgttctcggccttctggggggcctcgagcagctcccagctctgggtggtccccacaagacactggccaggaccggagggctggaggtcaggccaggagcccccctgactgcggggtccctacaggggcagtccttgagctgtgggtcccggtggggcgagggctccttcggatgcttcaggggatgagtgtgggcccttctggctggcagggtcaccctgggcactaggcgtgtgtggctggatcaggtgggttgggcagaagagggcctggccgggcagccagggactggtgtggccagagtgggcagctgggcccccgaatctaggccacgcgtctgcagaatgacaagtgatggcgcaacccgcccagctgggtctgaagaaggaggctgcctgggggaccacccacccccgtcccggccccaagcccgggacgcctgcctgcatgcattgtctggccctggcagggaagcctaggggcgattgtccccccagccctgcccatggtgtgtccttgggtcacaggctttggtggctctggggagctgggcagctactggggagggacccaggggccacctgcacatctgcccctgtgggtgggcccccaccccagcttctcagcccccagggaggggccagggctgctgacctgccctggctctcacagcttcctgcccccagcctggtcgtcctctgtgagggggccccagtccccctgcaggcagcaggactccaccccccggcccccttgagggcccgcctgggcctccccactccccggcctgtgagacccacttggccggacccagcgccgtgtttgtactttgctcttctcggtatgttttccgtcatgaccgccgtgtggagcttccataggagctgcaggatacagaaccttgcccaccccaaggagcccccacccccgccccggccccctcgcgctgctccggcctgtgctctgaccggtgaacccgcgcatcgccccccagaccgtccacacggccacgtgaccctgcacctccttccttctcgcctgttctgttccctggctgtccatctgaactgcttttcaggctcatatggggtgcgggggctactgaggacggacccctcctggggtgaatctgcaccacgagggggctggctggccaaccctggcaccccctctgagctccatttcagtcagaggccagcaaagggcagcctgtcccctttgcccgcagcacctgcccgtcgtggtgccgcctgtgagacaagcatggattttatgtttccaagcaattgaacaaattaaaagaacgaagagtcacattttgtgacactttgagatttgaattctccgtgtccatgagtgaagcatcatggggccactgctgtggggttggctgcaggttgtgtggggaaggcggctgtcacaccgaggcagaccggagtccttgggacagactggttggcaaagctgaagatagagacctttggcccttttgggacacagtttccagcccctggtctggtgggaccctggatctgggtcagagccttcctcactcagggccgccgaggcttccactgctgtgtctgtaaacggtgccgggtttgggggtgcctgcctcatggttgcccatcttccccacagaagtcccgggcccagagcccggccagcaggagcagttggtcttcggcagcggggatgctgtggagctgagctgtcccccgcccgggggtggtcccatggggcccactgtctgggtcaaggatggcacagggctggtgccctcggagcgtgtcctggtggggccccagcggctgcaggtgctgaatgcctcccacgaggactccggggcctacagctgccggcagcggctcacgcagcgcgtactgtgccacttcagtgtgcgggtgacaggtgagctctggggccacgccagctacagaaaggagccgagtgccgggctccctgagtccctgcgtgggtcaggagcggctgggggtctctctggtcattggtggagaggagggcaccccagaagtgctgcccaaatgggggaccctgctccatctgggaggggcacctgggggctcctggggcaggttgggcattggttgcggccatctctgccttgcagacgctccatcctcgggagatgacgaagacggggaggacgaggctgaggacacaggtgtggacacaggtaggagcagggtccagggttcaggccagccggggtggggcccgctgccaccgccaagccctgcccttcacaggcagctgagggactaaggccccggaacaacctccctggggtcaccccgaaggtctggtcccctcaggatacaggaggggctgggtcactgacatggctctagatgccccaccctggtggcagggctggggtgcaaggggacaccgtgttgctgatggggagactgaggcacagggccctgggggttccaggagcaggaggaggccagggctggcctgtggggctctggtgttggctataggtgaggtggaccccgcagacattagcgcagcagggcagggcactcaggtggctgccgtggggtggatggacccggggtgagggcgccggggcacctgccacaaccagtggcgggcagggtggctggcaggagggtggctggtgggtgggctgcggctgtgagagagcagtcggggacgatgcctggcgtcccggcctggaacggtggcaggtggactttgccaagttgtagggtggggaggtggggcttctggttttggagggagctctgaggggagtgcgtgcaggtgagggtcatcgtggcacagacatggggggcagttacgacttgcggactgatggtgtgtgcgctgggtccctgggccagtggggtaagcaggtgaggaagggaggctgagtccatgagagaaacagctgggggaactcaccctgggggtctccaggaggcctgggagggagctcagcaccgtggggtgcctctttccagcctgtgtccacactgctgcttgctgggcctcagtgcccctgatgggcgtgtgcctggagggggctggcagtgagctcactgaggggagggctgcttccctcctggggaatgccagcccatccttgcctggagtcccggcaggaaggcagcaccagccctgaggaaggagaaaaaccagttgggctgtgagaggggtggtgggagccctggacatcgagatgggaggaggcagggcctccagggtgccaccgtctctgggtgcccgccagacttggagctctgcagagggtggtgtagggtcttgatttccgtgggcccatgctgcccagctgcctccaaggctcctggctctgcaggcgactgggctcctctcctggtaaactgctcccaggtcctggcttgtccactagatgggcctgccccctgggtcttcagtctccccgttggtgggcctggccctggcacgcctctctgggcaggtgggctcccctggacaatgccctgtgccctgtgacttcacaggtccgggcagagcaccctggaggggaggggaggggacacacggcccagctctgagaaagccccggggaggggacaagatgtggaggctcctgggaacctcatcccgccctcttcctacacaggacgggaaactgaggctggggatgggcaggggcagctctgggaagggggttgttcagaggggcctctgctcccactcgggtcatggccttcacacgcacctcggcccgcaggggccccttactggacacggcccgagcggatggacaagaagctgctggccgtgccggccgccaacaccgtccgcttccgctgcccagccgctggcaaccccactccctccatctcctggctgaagaacggcagggagttccgcggcgagcaccgcattggaggcatcaaggtgggcgcggcggggtggctctgggcctggcaggcgcggtggttgctgcctccgctcactcacccgcccgcgtcccggtgcagctgcggcatcagcagtggagcctggtcatggaaagcgtggtgccctcggaccgcggcaactacacctgcgtcgtggagaacaagtttggcagcatccggcagacgtacacgctggacgtgctgggtgagggccctggggcggcgcgggggtgggggcggcagtggcggtggtggtgagggagggggtggcccctgagcgtcatctgcccccacagagcgctccccgcaccggcccatcctgcaggcggggctgccggccaaccagacggcggtgctgggcagcgacgtggagttccactgcaaggtgtacagtgacgcacagccccacatccagtggctcaagcacgtggaggtgaatggcagcaaggtgggcccggacggcacaccctacgttaccgtgctcaaggtgggccaccgtgtgcacgtgggtgccgccgctggggctcctgggctggccccaagggtgccccttggctgcgggttgcgtgaggatttgggtctaggggttggagcttcgggggcagaagctgtgggggtgcttgtggggccaagtctcagccaccccacacctcagggccataggcagctgcgttgggacccgtttccgtgtctgcagagggccagcctcagccactgaagtccctgacatggagctgcccacgggcttcttgggggtgggtgcggcttgggcagcagtggtgccccaggacaggagggcagtgtggccaagccctccaggccccctctgggcctcagaggcggtggctgagccccgacctggccgattggctctcgtcagctgtgtgcagtggggcccgagctcactgtctgcccgcctcctgaagcccttagctttgttcccatggctgccgggtgggggccactgaattgggacggttgcgacactcaaagcccaaagagaaacatctattcagagagaagacggtctcttgggggcggggagcaggcgcagggcgagggtggagtccagaccccgcccagagaggccgcctcgggccctgtccagggtgcaggttctgcaagagcccgggggagggcaggccagtgaccagaggttgtctgagggtctgggctgggttgttggggtggaggcagagacgtgcatcctgtgaaaccacagccaccgtgaagtgcctccacgcctcctccaggcagcctttggggctgacgcagcccagcctcgatctgtaccttgggggtctcccacatcctgcctcgtgcccggcggggctgcctcgggggcgtgcctgagccgggtctcttgtccccgcagtcctggatcagtgagagtgtggaggccgacgtgcgcctccgcctggccaatgtgtcggagcgggacgggggcgagtacctctgtcgagccaccaatttcataggcgtggccgagaagccttttggctgagcgttcacgggccccgagcaggtaacgactctgtcccatgccggccggcacaagagctccagctccaaggccctggccgcgcgccctgcacgccccgcacgcccagccctgctcgctcccgccccggctcgcgctccactcggggccgcctcggcaaggctggcagctccagcctccacggtgaccgcccgcttcgagccctgtggcctgcgccgacccttcccgcacgcctgcgacccccacaggaggtgcccggtgcccaccgggccggctccgtgccgtctgtgagcacccctttgcgcctctctccacccctgcccgctgcctgctcgcttccgcagcctgtgtgtccctgtgtccatcctccacctgcacccgcccggctctgcgctaacccgcatgctgcctgcccgcctgccgctcacctgggacagaggactcgccggtggaggggcctggcttcgggctcagtaccggtgtaccaggcggagggccctcagccgcgtggcggtgaccaagttggcgatggctgaggagttggtggtggcggcgttttccttgcagcggctggatcctgccgtgtggactctgtgcggtgcccgcagggcggtgctggcgctcgcctatcgctctgctctctctttgtagacggcgggcgctaacaccaccgacaaggagctagaggttctctccttgcacaacgtcacctttgaggacgccggggagtacacctgcctggcgggcaattctattgggttttctcatcactctgcgtggctggtggtgctgccaggtaccggcttctgctgctgctgctgctccgcactgtctgggggacgctggctcgggacacgccaaagctgccaggacggacgggaatcctgtgacttacggccgtcccgcttcttgagccctcactcctggccctgtgcccagtgtggggacaaagttggcctggcccggtcctggtcccagaggggccccctcagccccctcgagcccacttcccatctgggtccccaaaggcctctcctgtggctctggtgtctcccgggcgcctggtggcggtgtgggactggctggctctgctgggctccttctctccagggtctggccctctagactcactggcgttactgactgcgagaccctccagacaaggcgcgtgctgaggttctgagcccccttccgctcccagtggtgcctgcggctctgggccaggggcatccatgggagccccgtgggggggggggccaggccaggcctcaacgcccatgtctttgcagccgaggaggagctggtggaggctgacgaggcgggcagtgtgtatgcaggcatcctcagctacggggtgggcttcttcctgttcatcctggtggtggcggctgtgacgctctgccgcctgcgcagcccccccaagaaaggcctgggctcccccaccgtgcacaagatctcccgcttcccgctcaagcgacaggtaacagaaagtagataccaggttctgagctgcctgcccgccaggcctcctggagccccacctcggcccacgctggtcctgggctgtgtgagccctctctgcagccaggcgggctcccctctcctcgtctctgctcaccatgtagagcctagggtactttggggcacgaaacattctaaaaatcttcattcaatgctggtggaagtcagaacgcccccccttctggcccagcactgacccccggctgtacctccacgccctgtcgcccacgcggcgccaacctgcccctgctgacccaagcaggtgtccctggagtccaacgcgtccatgagctccaacacaccactggtgcgcatcgcaaggctgtcctcaggggagggccccacgctggccaatgtctccgagctcgagctgcctgccgaccccaaatgggagctgtctcgggcccggtcagtggtgctgagggccagcgttggctgtagggggcttggtggtgggggtgaaacagccaccagtcagaggcccggctgggtttaggggccgtcagggatgtggcggatgttgggtgtggctggggttctgtggacatgctcctgggacgggtgtatggcagggactgcccctctcaaggtgccctgtctggaggggcagcaagggcgggaggctgtgggtgacactcttcgtccttacgagcaggctgtagggggagcatggagggcttcctggaggtggtggctctgggcctcaagggctgggccaggctggggtggggaccgtggtgggctgagagtgggcgagtttgcacactcatggtccctctgcctccactgccaggctgaccctgggcaagccccttggggagggctgcttcggccaggtggtcatggcggaggccatcggcattgacaaggaccgggccgccaagcctgtcaccgtagccgtgaagatgctgaaaggtgaggagggggcggccaggggtgcagagcagggctgggggcgccgccgccgcctgacacaggccccccgctccgtgcacagacgatgccactgacaaggacctgtcggacctggtgtctgagatggagatgatgaagatgatcgggaaacacaaaaacatcatcaacctgctgggcgcctgcacgcagggcggtaggtgcggtagcggcggtggtgccggctgggcggccctcctgggcctggcagcccgtctgaggagcccgtgtccccagggcccctgtacgtgctggtggagtacgcggccaagggtaacctgcgggagtttctgcgggcgcggcggcccccgggcctggactactccttcgacacctgcaagccgcccgaggagcagctcaccttcaaggacctggtgtcctgtgcctaccaggtggcccggggcatggagtacttggcctcccagaaggtgggcagggcggcaggtgtgggtggagtaggctgggccctgccctgagatgctgggagcagcggggagaggtggagaggcttcagccctgcctcccaccccttccccagtgcatccacagggacctggctgcccgcaatgtgctggtgaccgaggacaacgtgatgaagatcgcagacttcgggctggcccgggacgtgcacaacctcgactactacaagaagacaaccaacgtgagcccggccctggggtgcgggggtgggggtcatgccagtaggacgcctggcgccaacaccgccttcccacaccctcccagggccggctgcccgtgaagtggatggcgcctgaggccttgtttgaccgagtctacactcaccagagtgacgtgtacgtgtcctgcagagctcaggcttcaggggtggaggcgggaactgggcagagccaggaccccagctgcagtccccaggcctgtgccctggagctcctgggtgtggtttctacccctccctgggggcagcagcgcagccctggcctattcccctggtgcccgcccaggtgtctgtcctgggagtctcaggacagcctgacctcaccttcccctgcagctggtcctttggggtcctgctctgggagatcttcacgctggggggctccccgtaccccggcatccctgtggaggagctcttcaagctgctgaaggagggccaccgcatggacaagcccgccaactgcacacacgacctgtgagtggcatccctggccctccactgggtcctcaggggtgggggtccctccggggctgggcgggggagggactggcagcccttcaggctgttcccgaataaggcgggaagcggcggggctcactcctgagcgccctgcccgcaggtacatgatcatgcgggagtgctggcatgccgcgccctcccagaggcccaccttcaagcagctggtggaggacctggaccgtgtccttaccgtgacgtccaccgacgtgagtgctggctctggcctggtgccacccgcctatgcccctccccctgccgtccccggccatcctgccccccagagtgctgaggtgtggggcgggccttctggggcacagcctgggcacagaggtggctgtgcgaagaggggctcggtggcacagcgctcaccccgcctcccgccagcaggagtacctggacctgtcggcgcctttcgagcagtactccccgggtggccaggacacccccagctccagctcctcaggggacgactccgtgtttgcccacgacctgctgcccccggccccacccagcagtgggggctcgcggacgtgaagggccactggtccccaacaatgtgaggggtccctagcagcccaccctgctgctggtgcacagccactccccggcatgagactcagtgcagatggagagacagctacacagagctttggtctgtgtgtgtgtgtgtgcgtgtgtgtgtgtgtgtgcacatccgcgtgtgcctgtgtgcgtgcgcatcttgcctccaggtgcagaggtaccctgggtgtccccgctgctgtgcaacggtctcctgactggtgctgcagcaccgaggggcctttgttctggggggacccagtgcagaatgtaagtgggcccacccggtgggacccccgtggggcagggagctgggcccgacatggctccggcctctgcctttgcaccacgggacatcacagggtgggcctcggcccctcccacacccaaagctgagcctgcagggaagccccacatgtccagcaccttgtgcctggggtgttagtggcaccgcctccccacctccaggctttcccacttcccaccctgcccctcagagactgaaattacgggtacctgaagatgggagcctttaccttttatgcaaaaggtttattccggaaactagtgtacatttctataaatagatgctgtgtatatggtatatatacatatatatatataacatatatggaagaggaaaaggctggtacaacggaggcctgcgaccctgggggcacaggaggcaggcatggccctgggcggggcgtgggggggcgtggagggaggccccagggggtctcacccatgcaagcagaggaccagggctttttctggcaccgcagttttgttttaaaactggacctgtatatttgtaaagctatttatgggcccctggcactcttgttcccacaccccaacacttccagcatttagctggccacatggcggagagttttaatttttaacttattgacaaccgagaaggtttatcccgccgatagagggacggccaagaatgtacgtccagcctgccccggagctggaggatcccctccaagcctaaaaggttgttaatagttggaggtgattccagtgaagatattttatttcctttgtcctttttcaggagaattagatttctataggatttttctttaggagatttattttttggacttcaaagcaagctggtattttcatacaaattcttctaattgctgtgtgtcccaggcagggagacggtttccagggaggggccggccctgtgtgcaggttccgatgttattagatgttacaagtttatatatatctatatatataatttattgagtttttacaagatgtatttgttgtagacttaacacttcttacgcaatgcttctagagttttatagcctggactgctacctttcaaagcttggagggaagccgtgaattcagttggttcgttctgtactgttactgggccctgagtctgggcagctgtcccttgcttgcctgcagggccatggctcagggtggtctcttcttggggcccagtgcatggtggccagaggtgtcacccaaaccggcaggtgcgattttgttaacccagcgacgaactttccgaaaaataaagacacctggttgctaacctggccctgtgctttctgtctccagttctgggataggggagggaggggtcactttgccaggtggtcccagttgcgcgggatggatgctggcagcagcaccgaaagtcactggtgggctgggagccccaagagcaaggaatgtttatgggaggggcctggcggaagggagcagggtgcctgggggtgcactgccctggctgctcccagcttgtgggttcctgaggtggtggtggtggtggggagggtcctttctcactagctctgaggcagaccttctctcatcaccccactcctggcatccgccttcccagtcagctggggagctttctgggcatccctctatggagccaaaagcaagcaaagccctcatggggccctgggggctacacaggcggtcactctcctccagatcagctctctgccctcccaggccgggcaaccagtgcccccactgccttgggctccatcagggtcccctacagtgataaagcacctttgggcagatgaggtgctgagaacccagagatggaaccaggcccttgcccaagttcatagccctagcagggtgggaggacaacatggtgagagcaagtctgggaaggcttcctggaggaggtgtgccgtctctcctgactccccaccaccctctttgctgtcctcccttctgctatcctccctctcttgtcctcccgtttttcccatctctgctgtccccacctctgtcgtcctccttctgctctcctccccccatcccctctgctctccctacctctgctgtcccctctgccgtcctccctctgctctcctcccctctgctggctcaagagcagggtttcccaaccatgagctgcatgaactctagcttctaaaatgctctggctacaaactcacctttcaggtcagggggtactgctggcccgtttcctgggcaggcaagggtttaactcaaccccattcagggaagcacgtgtgggcgcaggcctggtggaagtggccttacaagggactctgcatccctaatgcccccacttgcccagaaaccctatgctgggccccagaggcaggcctggccatgggacgcctggtgacagtggcaggatggggaggcccacatgggcctgaaggctgaggcctgcagggcagtggggggaccaggccaacaggcaggcagtgccagcatccacaccaaggcaggcagagcatggggctcgaagcgcgggccgggagcgccccctagcgctggctgggcagtgtccctgctacaaacccaaggcccctctcctgtcagggctctggtggacctctggtgggcacagtgggatcctgaatgggtgctggggaccaaagggctgggccaccgggagaacagtggcccatgaaggtgctggtgggccagccccctcctcctcagcgtgcttccttagcgaccccagatggcagggcacagtccctgaagctgccccaccaggggctccctggctgcctccccgtcccataaggtgagcccatgagagaccccagctgtcagcacaactgaacctccgccatcagggtgccctctagtggttgggtgtgctctaggctggcagggtccccgcccttgctgtctgctgatggctgagggggacatgtctcatgggaggcccagcttccaggacacaactggtggctcctggggtcaccaagggcacctggtttgttcacagctctttgggctgctgtccccatgagggagcacctcccaccccagctgtgggtccatcatttcctctgattaattagggcctaggggtcaagggaggccccgagggaggactctcagtgtgaacaaaccagcagccagggccgcagagaagcctgtgaggtgcccacagggcctggtcccagtgtgggcagagcacctaagggatggcttctgtccactgagaagggtcgggagccaagacaccacactgctatcctggcgctggaaccatccacgcactcctgcagccaggccacgctgaggcaggtaggcacccagaggtccgggctgggggctgctctccatggccccaggccatcacacatccctcagggcgtctgggccctgcctgtgggctggactgcaggctgaaggccctgcctcatccaggactccctagggcagtactcggtgctctttcccctcagcggcctgaggagtctttcagaagagctggccctcctgggtgacacctcggcgagggtcccagcccctaaccccaggactcccaagaagtcactgaggtccccagagcagggagagcatgaccaggtggcagggccactggcctggagaacgtcccacactgttccatgagcagctcacgctgtcacaggacctggggacgtgggtctcctgaccctgcaggcccatcctgcagagcaggaagcgtgaagccaagggctgaacccatggagggcagcccagcactcaaacccccagggatggtgaggctccttctggaactggcctcacagccacacgcgccccaaggcccagcccctgcagccacgtggacagctctgccggcttccactcgctcctgtgtgcccaacggttcagaaatattattactctgcactgttacaggaacacagatttgatgttttaataaaaatacgatttctacaaaaggtgcttaacacggcccaggacgggctgtccggtggagtcagccgtaggacccctgaaggatttacaaagacagagccggctcaccagcacactcctgccagcaccgggacccactgcgaacaaagacagagccggctccccagcacgctcctgctagccctgggacccactgtgagccactgcggggtgtccttcatttaaaaaaagtctggactgtgacactgcagaaggagtctgaaagcccaattcctgaatccctgcgttagaactgagagttcaggccgggcgcggtggctcatgcctgtaatcccagcactttgggaggctgaggcgggtggatcacctgaggtcaggagttgaagaccagcctgaccaacatgatgaaaccccatctctaataaaaacttgcccgtaatcccagcactttgggaggccgaggtgagtagatcacgaagtcaggagatcgagaccatcctggctaacacggtaaaacactgtctctaataaaaatacaaaaaaattagccaggtgtggtggcgggtgcttgtagtcctggctactcgggaggctgaggcaggagaatggcgtgaacccaggaagcggagctggcagtgagccgagatcacgccattgcactccagcctgggagacagagcaagactctgtctcaaaaaaaaaaaaaaaaaattagctgggcatggtggcgcatgcctgtaatcccaattactcaggaggctgaggcagaagaatcgcttgaacccgggaggtggagcttgcagtgagccgagatcgcaccactgcactccagcctgggtgacagagcgagactctgtatcaaaaaaaaaaaaaaaaaaaaaaaaagtgagtgcttagctggagtgaggaggaaacactgaattcctaaatcaggaattcgtttcattttcaccaggcgcagatatcctagctcctgaaaaaggccaagaccgagggtctggccctgggcaggtgtaagaaaggactgttttaagaagcttattacacaaagctcatatttctggatccaccactgcttacatttgcacccagacaccacttttaggtgcaagaagaaaggtcaggacatagagaaaaatgcacacagaacgatgagggagaatgacgagggagaatgacgagggagcaagcctgcatcagagcacggctgatgtcacggaagccaccaaaggcacccaccagagccttccccacctgcaaagcccctgcagcacccggagggcaagctggcttttggaggccatgcggagtccagggcagaggggacagtgggatgggctgcctgttgcagtggctgttcacgtcaacagtgctcagccaaggcagtgaggacgaggatgagagccggggcagctgactgggcccgcgatgccgctcacaggagaggcgtctgcacacacctggcaactgcaagacttgttctcaagggtaagtacacttggacaaacgaacaccaggctacttacacagggtgagagaattcataaatattagttaaggatctaaaacaaacttctcaaataactgaaagctgaaagcctctggaagccaactgtccctgcacaaaggtttacaattgagaaatatctcctgttcctattttgtcaagtttctttaatggctgaacagaaagaagcttcaagtaatggagaaggcattgtctgagtgcagctgctttcctggacgcctgtgccgttcctgtcttccaaatcctatgcttggaggcccctggaggtacatttttgccaggaaccaacctgaccttaaaaagatgagtgtgacacagccggctgggcaggaggatggaggtgccacaggacaccacctgcccacgccctggccagcctggccatgctgccgagtgcggggaggccaccccacccagagggcacagggcaaaccctaagcacgggggtattgcccttgaagccccaggggatgccctgtgccggatcctcatgcctcattgactagcctgcttgctgaaggagcccaggggcctgagcctgcaacactgcaaggggtgagaagggcatgctgctgtgggcgcactggactcaaacctcacattagaagctacaaagaaccccaaatgcgcttcagagccccaccaacccccaagccaggctcatccctgacacagtgaatccactgcagcccccgtgggaaactctgtgccaattgactgcttaaagaactgggggaaatagaaagccgagaaagagctccgatacacaagggaaaccgcacgtgagaaccagcactcccagcagggagacgtcactctccagaggccacagagatggcagacacctctgtctccacaatgacccacatccaactgaaagtgtgcaggaagacaggtctattgacactgaaatctagaaatcaaggtccacaggcgaatggaggcatcttcagccctgaggaggccaggctgtgtctcctgacgcccctgagggtgggcacagcagccagctctgtgtgggcggagtccacgtggtcctcattctcttccctggggacagggcagcacagtcagatgctgagactgaggccacacacatgggggcgccttcctgccttggcccggcccagctgcctctggagccaggaggccgtggcagccacaccacagtgtggatccagacacgattctgtggaggggttccgggattccagacagactgaatctccatggaatgatgaaaattaaaatttacttgattatggaagtctctgatttattccagccaaaatattagatgagccactgagaatcaccacaaagcaatcgccctcacggcccttgccagggtgacggcacagcaggaggacaggtgcccaggccagtggttctagctcttcacctctgcgacctccttctctgccttctctttggccttctccttctcctccaccttctcctctttttccagtgttgctacaatctcagccacctggctggtggagatgtgaacatcttctttgtccaccagctcaatcacctacacacgtgggaaagggagaggctcaggtggctgcgccctacagcacagtgaggcagaggcggggccagcgccgtcagtcgccccagctggggtggcagcagcatgcacgcaatcactgcctgcgggccccagggtcctcagagcaccaattcccccaaggggtgccacagaccctggggaaggggctcagagtgggaggacaaaggagccagggggctgccttgacaggtggcagacagcacaatggggctgccagggtcaagttcctgctctggccaggaacctgggccatggcttcccagggcagagtggggtgacatgcagggaccttgtccccactctgccacccagactagcagggaagggaagggcagctgtgcagtagacacatgatccttgcttccaaactgaactgcaagaaaccagccaacacttctgttagacgtctggaaaatcactaacctgatgcatgcaccgggagccacgaggcagcttcccctcagagatgtcagtgattgggaaaattggtgtgcgcactcaggctagagccctgccttccctccagagactggatcctgggccagggtctccggggctaccctggaacctgagtggctgcacttgggagctcagcccagcagtcacctctcagccttggggcggtgcccaagctgccccgcggctcccctgtgtagttgcctctcagctttgggggcccccggcaggtgtgaagtgcccccaggctccctgtgcagtcgcccctcagcgtcgggggcccctgagaggtgtttgctgcacccccccggctccccagtgccaccagctgggggcggggtccagggacatgcgtagccactaggtgcgttttctctctcaacacttgagttgtaacttcaataatttctcacttctgatgtttcaaatgagagcagcggcttaaaggagcagtcgcagtgacagacccaaacccctgacaggagggggtagctgcccaggagggtgccggacatgcaatgaacagtccccctgccccaccccactccagagcaggtggcggatggcctgcgtggtccccagcgaggcccaccttgacgaggtcgtcgatgttgaccttgccatccttgttttcatccagtgctgcggccaggctggtgagcttgctttcgggaatgtgcttgacttgcttcatggcgttgatgagctcagcgacactgatgacgttctccctgtggaagcacagcctgcatgtggccacgggcaggcgtcctgccacacagggcctcactgcccacacctgtggctgcaagtggtcagcactgacacaggcggctccgcgtgagccaggcaacctccagcacggacccccaaggtatgatcccatcctgcatacaatgccaagagctcccagggccagcgtggacacaaacacagaaacaccaccaggtccagggtttccacgggcatgtctgcccctcagtggctgcccctctggggccatggctgctgggctgttgtcctcaggcctgtggccacttggcaatacgttcacgatcatgggggctgtggtgccctgggcagatgagggcctccaagagcagggacgagagcatgagcagggtgccacgtgcagcccacctacaacactgtgggtgtggaggtggagatttgaacctgcagggcaccagcagtcacccaacagctgtttcattcgcccagaagggactcacaaaacggcagctccctcagccactgctgcgcaggaatctgggacatgtcgggcacagagaaggccgactgcccgagctggtgtcattactgagcgtgggtggggtcaggaagagggagaggcaagagagagcctggtaattagaggaaacagaagccaacagaggtggaggttggagcgggaggagagggggctgtgggaagaggaagaggggccaggaagggacgaactgctctcggagaggcagagactgacatgccagagggttcctggctgggactgctggtcaaaggtggagaggcagccaggcagaggctacaatgtgccctttggagccagaagggcccagctcggatccagcaaagggaccagcctccctatgtgagtctccgatccctctcccgcgcccaccaccccactcaccccgtgggcatgccgttggccggggccagcttgccagcctgctggtccatctccagctgcgagatcaagccatcgatctgcccgatcatttgctgcaccctttttgtcaatctcttgctggctttagattcttccacgtatttttcttcaccagtctttgaaagttccttcttgatctcctgcaagtcctaataaaattattttggttgtaaaaagtttgtcttaaaagaaaaagggggtcaggtgtagtggctcacgcctgtaatcccagtactttgcaaggccaaggcgggcggatcacctgaggttaggagttcgagaccagcctggccaatgtggtgaaaccccgcctctactaaaaatacaaaaattagctgggcatgatggcaggcacctgtaatccagttacttgggaggctgaggcaggagaatcgcttgaacccaggaggcagaggctgcagtgagccaagaccatgccaacgcactccagcctgggcaacagagcgagactctgtctccaaaaaaaaaaaaaaaaaaaaaagaatctggttgggcacagtgactcatgcctgtaatcccagaactttgggaggccaaggca

SEQ ID NO: 1394 - DNA, 4093 bp, Homo sapiens
cgcgcgctgcctgaggacgccgcggcccccgcccccgccatgggcgcccctgcctgcgccctcgcgctctgcgtggccgtggccatcgtggccggcgcctcctcggagtccttggggacggagcagcgcgtcgtggggcgagcggcagaagtcccgggcccagagcccggccagcaggagcagttggtcttcggcagcggggatgctgtggagctgagctgtcccccgcccgggggtggtcccatggggcccactgtctgggtcaaggatggcacagggctggtgccctcggagcgtgtcctggtggggccccagcggctgcaggtgctgaatgcctcccacgaggactccggggcctacagctgccggcagcggctcacgcagcgcgtactgtgccacttcagtgtgcgggtgacagacgctccatcctcgggagatgacgaagacggggaggacgaggctgaggacacaggtgtggacacaggggccccttactggacacggcccgagcggatggacaagaagctgctggccgtgccggccgccaacaccgtccgcttccgctgcccagccgctggcaaccccactccctccatctcctggctgaagaacggcagggagttccgcggcgagcaccgcattggaggcatcaagctgcggcatcagcagtggagcctggtcatggaaagcgtggtgccctcggaccgcggcaactacacctgcgtcgtggagaacaagtttggcagcatccggcagacgtacacgctggacgtgctggagcgctccccgcaccggcccatcctgcaggcggggctgccggccaaccagacggcggtgctgggcagcgacgtggagttccactgcaaggtgtacagtgacgcacagccccacatccagtggctcaagcacgtggaggtgaacggcagcaaggtgggcccggacggcacaccctacgttaccgtgctcaagacggcgggcgctaacaccaccgacaaggagctagaggttctctccttgcacaacgtcacctttgaggacgccggggagtacacctgcctggcgggcaattctattgggttttctcatcactctgcgtggctggtggtgctgccagccgaggaggagctggtggaggctgacgaggcgggcagtgtgtatgcaggcatcctcagctacggggtgggcttcttcctgttcatcctggtggtggcggctgtgacgctctgccgcctgcgcagcccccccaagaaaggcctgggctcccccaccgtgcacaagatctcccgcttcccgctcaagcgacaggtgtccctggagtccaacgcgtccatgagctccaacacaccactggtgcgcatcgcaaggctgtcctcaggggagggccccacgctggccaatgtctccgagctcgagctgcctgccgaccccaaatgggagctgtctcgggcccggctgaccctgggcaagccccttggggagggctgcttcggccaggtggtcatggcggaggccatcggcattgacaaggaccgggccgccaagcctgtcaccgtagccgtgaagatgctgaaagacgatgccactgacaaggacctgtcggacctggtgtctgagatggagatgatgaagatgatcgggaaacacaaaaacatcatcaacctgctgggcgcctgcacgcagggcgggcccctgtacgtgctggtggagtacgcggccaagggtaacctgcgggagtttctgcgggcgcggcggcccccgggcctggactactccttcgacacctgcaagccgcccgaggagcagctcaccttcaaggacctggtgtcctgtgcctaccaggtggcccggggcatggagtacttggcctcccagaagtgcatccacagggacctggctgcccgcaatgtgctggtgaccgaggacaacgtgatgaagatcgcagacttcgggctggcccgggacgtgcacaacctcgactactacaagaagacaaccaacggccggctgcccgtgaagtggatggcgcctgaggccttgtttgaccgagtctacactcaccagagtgacgtctggtcctttggggtcctgctctgggagatcttcacgctggggggctccccgtaccccggcatccctgtggaggagctcttcaagctgctgaaggagggccaccgcatggacaagcccgccaactgcacacacgacctgtacatgatcatgcgggagtgctggcatgccgcgccctcccagaggcccaccttcaagcagctggtggaggacctggaccgtgtccttaccgtgacgtccaccgacgagtacctggacctgtcggcgcctttcgagcagtactccccgggtggccaggacacccccagctccagctcctcaggggacgactccgtgtttgcccacgacctgctgcccccggccccacccagcagtgggggctcgcggacgtgaagggccactggtccccaacaatgtgaggggtccctagcagccctccctgctgctggtgcacagccactccccggcatgagactcagtgcagatggagagacagctacacagagctttggtctgtgtgtgtgtgtgtgcgtgtgtgtgtgtgtgtgcacatccgcgtgtgcctgtgtgcgtgcgcatcttgcctccaggtgcagaggtaccctgggtgtccccgctgctgtgcaacggtctcctgactggtgctgcagcaccgaggggcctttgttctggggggacccagtgcagaatgtaagtgggcccacccggtgggaccccgtggggcagggagctgggcccgacatggctcggcctctgcctttgcaccacgggacatcacagggtgcgctcggcccctcccacacccaaagctgagcctgcagggaagccccacatgtccagcaccttgtgcctggggtgttagtggcaccgcctccccacctccaggctttcccacttcccaccctgcccctcagagactgaaattacgggtacctgaagatgggagcctttaccttttatgcaaaaggtttattccggaaactagtgtacatttctataaatagatgctgtgtatatggtatatatacatatatatatataacatatatggaagaggaaaaggctggtacaacggaggcctgcgaccctgggggcacaggaggcaggcatggccctgggcggggcgtgggggggcgtggagggaggccccaggggtctcacccatgcaagcagaggaccagggctttttctggcaccgcagttttgttttaaaactggacctgtatatttgtaaagctatttatgggcccctggcactcttgttcccacaccccaacacttccagcatttagctggccacatggcggagagttttaatttttaacttattgacaaccgagaaggtttatcccgccgatagagggacggccaagaatgtacgtccagcctgccccggagctggaggatcccctccaagcctaaaaggttgttaatagttggaggtgattccagtgaagatattttatttgctttgtcctttttcaggagaattagatttctataggatttttctttaggagatttattttttggacttcaaagcaagctggtattttcatacaaattcttctaattgctgtgtgtcccaggcagggagacggtttccagggaggggccggccctgtgtgcaggttccgatgttattagatgttacaagtttatatatatctatatatataatttattgagtttttacaagatgtatttgttgtagacttaacacttcttacgcaatgcttctagagttttatagcctggactgctacctttcaaagcttggagggaagccgtgaattcagttggttcgttctgtactgttactgggccctgagtctgggcagctgtcccttgcttgcctgcagggccatggctcagggtggtctcttcttggggcccagtgcatggtggccagaggtgtcacccaaaccggcaggtgcgattttgttaacccagcgacgaactttccgaaaaataaagacacctggttgctaacctgaaaaaaaaaaaaaaaaaaaaaaaaaaaaaa

SEQ ID NO: 1395 - DNA, 2421 bp, Homo sapiens
atgggcgcccctgcctgcgccctcgcgctctgcgtggccgtggccatcgtggccggcgcctcctcggagtccttggggacggagcagcgcgtcgtggggcgagcggcagaagtcccgggcccagagcccggccagcaggagcagttggtcttcggcagcggggatgctgtggagctgagctgtcccccgcccgggggtggtcccatggggcccactgtctgggtcaaggatggcacagggctggtgccctcggagcgtgtcctggtggggccccagcggctgcaggtgctgaatgcctcccacgaggactccggggcctacagctgccggcagcggctcacgcagcgcgtactgtgccacttcagtgtgcgggtgacagacgctccatcctcgggagatgacgaagacggggaggacgaggctgaggacacaggtgtggacacaggggccccttactggacacggcccgagcggatggacaagaagctgctggccgtgccggccgccaacaccgtccgcttccgctgcccagccgctggcaaccccactccctccatctcctggctgaagaacggcagggagttccgcggcgagcaccgcattggaggcatcaagctgcggcatcagcagtggagcctggtcatggaaagcgtggtgccctcggaccgcggcaactacacctgcgtcgtggagaacaagtttggcagcatccggcagacgtacacgctggacgtgctggagcgctccccgcaccggcccatcctgcaggcggggctgccggccaaccagacggcggtgctgggcagcgacgtggagttccactgcaaggtgtacagtgacgcacagccccacatccagtggctcaagcacgtggaggtgaacggcagcaaggtgggcccggacggcacaccctacgttaccgtgctcaagacggcgggcgctaacaccaccgacaaggagctagaggttctctccttgcacaacgtcacctttgaggacgccggggagtacacctgcctggcgggcaattctattgggttttctcatcactctgcgtggctggtggtgctgccagccgaggaggagctggtggaggctgacgaggcgggcagtgtgtatgcaggcatcctcagctacggggtgggcttcttcctgttcatcctggtggtggcggctgtgacgctctgccgcctgcgcagcccccccaagaaaggcctgggctcccccaccgtgcacaagatctcccgcttcccgctcaagcgacaggtgtccctggagtccaacgcgtccatgagctccaacacaccactggtgcgcatcgcaaggctgtcctcaggggagggccccacgctggccaatgtctccgagctcgagctgcctgccgaccccaaatgggagctgtctcgggcccggctgaccctgggcaagccccttggggagggctgcttcggccaggtggtcatggcggaggccatcggcattgacaaggaccgggccgccaagcctgtcaccgtagccgtgaagatgctgaaagacgatgccactgacaaggacctgtcggacctggtgtctgagatggagatgatgaagatgatcgggaaacacaaaaacatcatcaacctgctgggcgcctgcacgcagggcgggcccctgtacgtgctggtggagtacgcggccaagggtaacctgcgggagtttctgcgggcgcggcggcccccgggcctggactactccttcgacacctgcaagccgcccgaggagcagctcaccttcaaggacctggtgtcctgtgcctaccaggtggcccggggcatggagtacttggcctcccagaagtgcatccacagggacctggctgcccgcaatgtgctggtgaccgaggacaacgtgatgaagatcgcagacttcgggctggcccgggacgtgcacaacctcgactactacaagaagacaaccaacggccggctgcccgtgaagtggatggcgcctgaggccttgtttgaccgagtctacactcaccagagtgacgtctggtcctttggggtcctgctctgggagatcttcacgctggggggctccccgtaccccggcatccctgtggaggagctcttcaagctgctgaaggagggccaccgcatggacaagcccgccaactgcacacacgacctgtacatgatcatgcgggagtgctggcatgccgcgccctcccagaggcccaccttcaagcagctggtggaggacctggaccgtgtccttaccgtgacgtccaccgacgagtacctggacctgtcggcgcctttcgagcagtactccccgggtggccaggacacccccagctccagctcctcaggggacgactccgtgtttgcccacgacctgctgcccccggccccacccagcagtgggggctcgcggacgtga

SEQ ID NO: 1396 - DNA, 22478 bp, Mus musculus
tgagaggtagcagcaaccttgttgttttaggactccgagcttgggaccctttggctcagctttggaacgtacaggtgtgtgcatgaaaggtccagagttcctgtgattcaaagcacttatatccagatgtggaggaggcccatcccagcagcagtgggaaagagtctgctggtcttagaggtgggaacttgacccagtgaacctaagagcttcctggatcctgttgagctttgaaccccacaattaggaggggcccctaatctgcagagagtactctgggagagttctcgggctagcaggttgacttacagactcagagagatctcagtgacacactgacaggggtagaggaagtggcttcgtcttgctccccacctccacaacacacacacacacacacacacacacacacacactttggtgtcttttacttctgttatcaaagctaccactctttgtcctggaatctcatggcttgtctgtgagcccccatggctactggatgccccttctttccaagaaagagcaccttgaaagggcagccagatccagccactgccaacccttgtatgcgtttttcttctctgctggacatcgctggctgcagaccaaacttgagcagagttgagcacaaacttttctcctgacaggactccgggatttgtttttaacagtcctcggctgctaaaaagaaagcataccaacccaactgccttctttgggacctgcagagagaactggtgttgatgccttctagcccctagccccacagtacccttcagtggatcaatctttggtctccccacttcccaggtgcagtgctctttcttttccttggactggggtctgagttagctccttttcaggggcaaacaaaccccttgccctggtccttccaggttgggcagcacccacagacaaggacagggtcagtccttgggctcagcttgatagaggtagggaagatagttctggaagctctaggaacattcagctaagagaactaggttgtgtgctgatgtggtcctgcaccccgagagaagtttctggtgccctgcaaaactcttctgtctcccaactctgctgctaattctgcgtagtttcctctacaatgtggagacactgaagctgaaatcctgtagaccatctagttcactcagcacttttctgggtaggtcaagacttggtggtagcttggagttttacttccccaaggatactgctactctcaaggaaactgtggtaatgtgccttagtaatctctctctctctctctctctcctcctccctccctctctctctcctctaccccaccatacctaagctagggctttgccagccaagcaggcatcaagacgtcaccacaaagatgtcctaagctgtcagataccaggttggcagccccatttttttccttgggcttacttgctctgcatatgacctttgcacggtcccttctgccactcaaaaggctcatcctccccacgggcctcatgtcctctgcccacttccctcctgcctcccatctcaccctgcactgcttccctccttccaagaataatgtcctcggcttactcccaagaggaagttaagaattatctctgatttcttatttccaagcttgtgggcattcccttcattaaacagtagaagtaggggatcaggaggcaaaatgactcttcagctctttttcccttcccagtatttactgcaaaggggaagacagtgactgtgagggaacatgttccacaaaggggggaaaaatcccttggcgcctagaatcgtccaaagtggccctaattacaattctggtccaaattcatttaccagaatacagaataaattctgtatttatttacagatttcacctcctacccgtcttcatatttagaaagatcaagaagggttttaatgtgtaaaagatggttttttttcccataatgcccccatcatcgcccacacacccgtttactctgctttgagtctataaagttatgctgccacggggggggggcggggggggaagagttaaaggagtgttctgacccactgttcaaagactgggtagggaactgaactcggtccctacacaccgccttcatctttccctgaccggtgtcaggtccgtcccccacctccaccccccactaggccgtcttcatgctaagtgtctaattaggacacctcaacccacccacccatcgacaaagcagctaaccaggttttgggaccacaccaggattagaaacttccaccttagaaggggcgatgaacaggggtcataggcagctcttacagtggctccgcccttcaccgtttgtctccggagtaactgagcgttgtaaggtaaaaccttgaaaaatcctgaaccttgcttctaaacttctctttctggtcctaagaacccgacagaacccgacatcctctataaaatcagcctttctagccctaagcctggttccagaatctcacggatgagtcgaagaaaaaattaatttgcctgtttggtgtgttgttccagataagccattaatatgcaaatcagggagttgggctcacggagtgaatggaagcagtgcgggtaggcacgcaggacagccccagatgtttgcataattacttctgccccaacttcgggagtgcaaaatgtcaagggaggagtctgtgagcgtaaattcagtgttatcccctggatctgagcgtgtggaggaaccaggcttcctttgcttagagaagaagcgaggcatcggggcgtctctgcctatggcctcttgtcaagtgggatcttgtgggtctttctcggaggaacgaatcactgggagcggtcgggaaaggtgcggacgaagccatcgctggccccacgagtcctggcagccccggaacttgcttctgggcatgttccaagcagtagagcgcagacctcgacgcccgccagtgcccccttcttttaggacaatgcttggggccgaccaagggaaaccctgttcccaggtgcaggcaaggacgctaactagagtttcggatgctgaggttttgtgaagccctctgggggatcattggatttttttttttttcctgtggactccggcactgctgtctcgggggttgccgccagcagtgtacacccggagttgctgctccatgcgtcctcgggaaaaccgaacctgtgcttctccgagtgacgtgttccagcacctcggggttttctaaaacaggaaaccggactagggctgtctgcgcaaaccacttctggaggcagtgacacttgcctggaattaactggatggaggtctccgacgtctgggaagcggggcgtgtgtgtgtgtgtgtgtgtgtgtgtgtgtgtgtgtgtgtgtgtctgtgtgtctgtgtgtggtggtggtggtggtggtggtggagcccagggggcgggggtaagagaagtcacttcaattccttccgcttgggggcgggataggaagagagaaaacctgaagctgcagaccgccgcatccatctctgaagcttctgggactacacacagctcgtgtggggactgagagtggatgggggtggtatttgaactgcaccgtccagcgtagttagcgaccgaagtgtcaccctggccgaactccagctttagtaggttctgagggctaggagtcttgactgagctcaagctctgacggcgcccgccacccctttccaggcttccaactctgtttttcccatgggatggtagtgctttcctaccttccgaaggggcacagtcaccgggcataaagggcgcgcactggtcgtgacgcataccaggactttgcaactttacatttggggtgcctagagcaataggctgcggccaaagggttgtgcagtcccggacagcctaagagaccttatcttatcgcaggcagagaaagcggcttcgaatacatccctgatcttagatgggactcctaagcactatatttctactaggccacccatttatcacgaactgttttgtcacctcgcctcactgccccaccccctcctcgcttcacggttctgccctggacttggccctgcagtgccgcgtctaagcgtccttcctagcacgtgggtggtggtgcagccatttcactctcgggctcacagcccagccgcctccccttctaggccaagagagcctccgacgtcccagggacggctttcgcaaccacaccagccagccaggctgctttcccgggaaaaggctggggaagaggggagagggtccgccccacgtcgcgcatgcgtgctggtttagccgctgtgcgcgtgctccagccaccaggcactgggcgcgcgctgggcaggcactcgaggagagaagtttctctgggctagccaccagcccgggcgaatctaaaccacgtccaagaggtgcgcagacagatttccaggaaaggtgggtgcccctcattagcatctagctgctacactggccttagaaaagcagtaacagccacagttgtaacataaacatttctcattgtatttccctgctctcttcagtgtaatcctgcctttacattgcttgtaacccgtcccgtggactctgttcagcaagcatgctaatattccttttaaaaccttagtgaaaaccatgatgtattggcgcaggcctttaatctcagcacttgggagacagaagcaggaggatctctatgagttcgaggacagcctagtacatacatacaatgaggactataaaaggagacctcatctcaagaaacaaaactttagtgagagtctataaacagtgacacacacctgtaatccctgtatttgggaagctgaggcaggaggaccacaattttgattacagactgaacagtagcagagccctgtctccagaggtaactaactgttagaagttcaaacagatcaaataacttgcccatacaggcatacagctagcgagtgggctagtctcggagcccacaatagttgtaactatgaagatttccacccacatccagcttccaactccaaatggcttcctagaacctttcaactttcttgctgagggctctgtgaaggggtttgtgctaccagcctaggacccaaccccaagtcctttcttaccctcaattcttccttataagaccaaaggaaaactgaaatgtacccagagtttttaagcccctgctgtgaaaggcctgggaaccctgacttgggagttctcaggcagagcctttgctgtctgctttgcttgtccccagttttacctacagctagggactggatagttgaccttgcctggctgtccagagcaactgttgtacagatgagcttaatccggtgctttcttccatggaagtgtgtgtgtgtgtgtgtgtgtgtgtgtgtgcgtgtgtgtgtgtgtgtgtgtgtgtgtgtgtgtgtgtgtgcactcgtgtgctaagaggagatatcaaatgctatgtggcttctggtgtgtggaggtcccggtctacaggtggtcagcccttcttgtctgttactgcccattctttgtccctaggaaggagtgagaggaggccgtagaacggaaaagctgggaatgttctgagaacaactagatactacagtcagcctgcacaggccagaccttcggacttctgtccagagtattgcgtcgccgctaccactttccagcggcaggcggcaatccactcagcggactttcagtcctgctgtggagtcgcgaggcaggagtggatggtgcaggcagatccagctccaagacggcaggagattagccacgggccacaggccctgcagaggccatggtacacatggccacgcctcagaaccgctcacttaacagctccaaatcagcccgcgtgcgtggccaagattgggcaggtccgacgcccgccaagccgcgcagttgaaacgtacccaaagaactagccgaggcctggcctcagcctcaagctggaggacgcgctggggcttgctggtctggccggatatccaggatccaagcacccagctaggcgcgctcatcttccctggactgcgccagtctcaggctcctcctctcccaagaggttgagtccatgggcagcggacctatccaggcctaagtggcctcagactcaggcatgccgtgaaagtcgggctcccggacagtctaggcaccttcggctgtctggggcagaaggagggcaggcaggcgccctgctctaagtaagagctcttgtcagataagagcagtggggagccccatgccctggtcacctaaaccggccaggaatcggcccggggtgtggggaaaggtggggggttgcggtagcaggtgtcccccaggcaagagggtgcctgcatttccgtaaacaaagaaaccgggtagtttgtgtgtgtgggggggggggcggggggtgtttaggagaatcgcagacaatctccttcataaaaatgtgatctaagagcatttgatttccactttcactccccccacccacccgtgtacccctccccgcccctacacactcactgtctccaaagacactcaaattgcagccatatgggctaaagtaataggaagcagttaccttatttactgcagaggcggcgcaagcaaacctggcagcgtggctgctagaagtgggatgaacaaacagcctggggtcttgttcttggaaacttttgttttgtttagttttgggaggtgcacaagggaacagccgattatataacttcaaagtgggggaggtcttgtgtggaagaggtgtggagaactgagctggtgggcaggggaggtttcaaaaataaaggtgggctgtgggcaagcctcctttcattggtttcaaggactgagagctgaacagcccaaatccgctccagacttggttggaatgagggcagttgctagtgccccctcctggaacacacaggcatcttcccattctgacctaaccggaccccagctctgggcctgtgggactgcaaacccattcctcagatgtccactcccctctcaatgtgtctaacctgtccaggggagagaccactgggaggtctgagttaacacctctgcaacactgttctagtttctgtaagcttggtagcactttgggtatgtgcaaaggtaacatcccacctcctcccagccgatctactgaaggactaaactcttctgagacaggaaccaagttctggacctctgaacgttctgaatctcctgaatccagcttcaactttgcaatgggctccacgggaactcccggcctttgaaactcagagagcccccaagcactgatcttgtcttgagctagctattagagaagaattaccatcaggcacaaaggcaggaaaatacagctagaaagcagagactaccactaactaacggttccttcagaagtactaagcgcggggactgcctctctttacgtaaaacttctccagttaattgggcaaagaagtaaaatttaggaactgaacagaagaagagaaaaggaaggaaggaaagaaggaagggaggaaggaaggaaggaaggaagggaggaaggaaggaagggaggaaagaaaggacgatggtggggcaggagtggaagagagctggattttttcggtgaaattgaaaccagcagttgatgaccctcgtccaaaaccccctggtccatgaagacacacaacttagggacagagttctcctcaaaacccaagctgaagggaaaccaccatcttttacttgatcggcaaacttcccagggataagaaagagaggaagagctgatgcccaccaccaccaccaccagcagccactccacgcagttccctgccactggcttcaaggtggccctgaagccggcttgcagagccgcggcccccgctaagctccgggtggcccgacagccaacgcccgcggcgggcaacagattccaagcgcgggcaggcggagcaactagagcgacccgggcggagggctagggtgggctttctctgggcggggaaaccagacacttataggcggctgagaccgactttatttttactgcccaaactgttggaaagtatttaagcttaaacagaaacagctgtatcgctggcaccggccgacgaaactatttgttaccaggaatgactttttatgattaaggacccagccgtcggcggtctcttgaaggcggcgggcgaaggtcgccggggcgatgtgggcatcctggatccgctgttcgttgagaaccgagaggactcctcacctggagcacaccttactatgtctaggagtgaagccaaaaactggaacctgcgactgttgatgcaagaggaggcctggggagtaccggcgcagcgggcccaactcggagctagccccaaggccagcactggcgcgtgcagtgtgtagcgccttggacccgaggccagctttgcgctctgggcttcctgcctttcgaaacagactccttagctcgctgttttccgggcttcgtcgttttttctttttctctctccccttttcccagcctcttcttggccaagggaaacttttttcagccaagttgatatcgcgatttaaataaattgtgtgttccgaggtcgggctctgtgatctggagcttgggtagtaaaagggcaatgtggggatagctgctgttgaacccccccccccccgcgcctcaacaggggttaccacgaggggaggaaagagagcctaggagcaaaaggtcattgagtgtactcaggtgtgtaaaagggactgaggcatctctgcgcgaccctcgtcccctacctgggacttgccatcttcgcgtcgggggtgggggtgggggtgtctcttccaggccgcactagataccgccacacccctcaaagtccatactgatgtttgtcgggaatcccccgcttacgcttacgtcgtctagaagagcccgagacagaaagtgcactagctctgcacccaggtctggagcagagccgcggcgcctccagagctagccaggctctaggctctgcctcgatggtcataggctccttaaacccacccaggccgggacagatgtggtcagggttgacttctctcaggactgaggagtggattggacggaaactgcaggctgggtcaggaatagaggctggggcagggcagctgagacttggggacaatgagggtgggaagaggaggctcgcgacccctcctgcagggtctcgcttcaggatggattcaggcggtaaacactggcttgtgccagtctgctttgggcttctgagcccggagaagcgcccacgccagctcgcaggacccggagggtggacgcgggcagcgctatgcgactggagaccaagagcaggctcattgatttgttagctggatgggactggtgaagaagggaggagggggcgttgccatggagacccagggtgcgcggccgcaagggaggggtcagggaattagtaggttcggcgcaagcgacgtaggtccgggggttcgggcgcggctcgatgcgccccagcacctgtgcattgtgcatcaacggcggctggcgaccaggatggcgccagctagggcatgggcaggtggggagggcctgggtctgcagaggggcagcgcctggctggcacctacgcagggagccctaatagctcggcggggcaagccacgcacccggggaaacgctgggcaatcaggcaggggggccaggggcgggagcctagggcagcggcccccctgtccagccgtgcagactgacagcagccgggcccgccccgcttggcgtcacttccgctgacggctcgctccccctccctctgggtctctggagtggacagagaccccgcctcctggctattggaacgcgggtcacgtagcaacgcaggggagacggggagaggggcgtggccgggcgctagtccaatcagcgcccgcagaacgggcccaggacgcttggctttagcaacgtcgttagcaacacgtggggcgggaggaagcgctgggagggggtggagggagggagagtgcgcgggggagggaggagaactgacgtcagcgggagagtattatgggctgtcgagggctggctgctgcttttctgctcctggaagcggctgaggggggaagcggcgagtcaacatggagctctcggcggtgggggagcgggtgttcgcggccgaagccctcctgaagcggcgcattcgcaaagtaggtgaaggggaaggcgggcggcgacgcgaactctccctcaccagggcccaggctccctccccttgctgcagcccagcctcccttcccccaggtcccagcagcggccgcggccgtggcggcggcggcggcggctcagccccagcgctctccttagacttgcagccctgcacagattgcatggatggggggtggggtgggggatgaatgccggtgcatgcactttgtgcagcgtttctgcaggggtgctgcagtggactggttcctttggcggtagtgtttggagcattcatttggtgcatgcattttcgtgtgtatttcttgtgtcctcgtcatgcatttctccccacgcacacacatacacaagcattttcccttttgcatctgcagggacgcatggaatatctcgtgaaatggaagggctggtcgcagaagtaagtaggttatatgcaatcgctaccccacactgatatcgaggagggttctttcttcctcttttccccttcacattgaaatacaacacaaggcagccggaaaagttgcacacacatacacgccctccactctgtcctctctctcctgctccagggactgatgctccattcttcctggtttcctttaggtacagcacgtgggagcccgaagaaaatattctggatgctcgcctccttgcagcctttgaggaaaggtacagacccttagcctagccactcactagaacccatacacgctgacttcggtgcagccaggacacacccccttctctctcttttctttctttagggaacgggagatggagctctatggccccaaaaagcgaggacccaagcctaaaaccttccttctcaaggtatgttgcgatctccagaggtggagtgtgccgttcagggaggatctgcagggcttgtaaatcaatgggtgcccttgccttgtgtgtatttgtaatctggacttctgtcagaggccccatcacggagttctagaggcaggacttagctgcaccagaaggccttcattcccaccccccctccagccatcccaagtagacctctgttacacaaggagtctgttggttgcaaatggcttcttccagacaaaccctcattcccctcccccagactattactaagagcccacctccccactcaattagaatttcccaggcatccagggaaagttgggcagtcaaggctagaggtcgtgggggggtggggtgggcgggggcggggcttttttctcctcacaacaacttccttctgcaggcccaggccaaggcaaaggccaaaacctatgaattcagaagtgactctaccagaggcatccggatcccttacccaggccgctcaccccaggatttggcgtctacttccagggcccgagagggcctgcggaacacggggctacccccaccagggagcagcaccagtacctgcagggcagacccacctcgggaccgggaccgagagagggacaggggtaccagccgtgtagacgacaagcccagctcaccgggggacagctccaagaaacgaggaccgaaacccaggaaggagcccctggacccttcacagagacctttgggagagcccagtgccggccttggagagtacctgaaaggcaggaagctggatgagacctcttctgggacaggaaagttcccagctggccacagtgtgatccagcttgctcgaaggcaggactcagacctggtgcaatatggtgtgaccagtcctagctcagcagaggcctcgagcaagttggctgtggacacctttccagccagggtaataaagcacagggctgctttcctggaggccaaaggccaaggtgccctggaccctggtggtgccagggttcgacatagttcaggcaccccagcctcagtgggaagcctgtatcgggacatgggggcgcaagggggaaggccctccctcatcgccaggatcccagtggccaggatcctgggggacccagaggaagagtcctggagcccctctctgactaacctggagaaagtggtcgttacagatgtgacctcaaactttttgaccgtcaccattaaggagagcaacacggaccaaggattctttaaggaaaaaagatgaattgccggggtgggagcccaggaccagtgcaggggagagtgagctcaaatggcttagtgctttttatttctgggtgactgtggcctctggctggtcctgtccttcttcacacccctcttccctttcattcctccgtcctcagttctggctggaaaattatctctagagttctattttctattagatgtaaatatgttatttaagagaaaaatatctaaatatatatatttcaactcttgaagttcttttatttaaacgaggagagagagagagagaaagagagagagactgtggtttggtaggggagatagactgagctggcacaggaggggcccctgtccctgcagggcaccagcaaagttgggggcctgggccctgggattttggagggtgtgtggagggactcagccggcccacctcctccctccaccgccggattcccaaccctcctggcaccgcagaagatttttgctctcctccccattggccagctaggccaacaaaaggttggcttcccaatcagaaaaaggggggtggggtcagaccagttttcttttttctattttctttctgtctttttttttttttcttaagatgaggagggttactagggggggaaagtaacaactcgaataactttctcacgtgtgttgttaaaggtagaaaaaggtcgcgagtgagtgggccgcagttctccccgaccacagcaggagggtgcactttatggaggtgtgagtgccgtacacgcggactgtgtgtgcgtgtcctgtggacaaaaatctccccgttacctcgattccttcccttacttttgcaaagagaaaagaaatccagcgaatttgtttacattcccgaaatgccaggataaattgggaggattgcgtgtcagtgcccagagcgccagacagttgttttacaagaaaaatattcgggtggactttttctttttgcgtcctctagattcgccagaagacagggcggccccacctcccaggaagactcggacaagcctggctcgacggggggagggtgggtcctgcttttagaggagcgagcggccgccaagccaccctgcggggcgggcagcgggctgcgcaccaggccggtcgggctgggcacgggggtcgcagcccgagttggaacttggtcaggtggagctcatggccgaaggggctcggcagggtttccatccaagaatgcgcagtagaactttagtgttttccttcttccccctttcttaaaagcaaaagctgtaatttatagtccttttcgattctgggagtgctctccacgtgaactcgacgttcagactccgccgcagggggcgggggagcgcgaggtggagcgggagcggccggggaccagtgtgccccgagaccatctgcgtccctggtcccggcccactccggaccgcgccgcgcgcagctcggactcaaaagcacaaatctgtccccgagcctacagtcgccgcttccagcagggatcctgcggcctctccaccctccccgcccttaaagggccagcagacgctctaacttccagggcttttggagggaggggctctaagctctgctcgcgggacaaagcacagacttcaggggctctgggctgggctgaaggagcttggtgatggggagggactgagagggacgtcagcctcgtcatctgcactcccggcttcccatctccagactctcggtctctctttcctccagacaattttttttttttttttgcctttaaagagagggagaaagggaaaacggtgtattctacgtgtttttattatttttttattttttggagaatcaaactgcgcctaaagagaagcccctagaatggggatttttatctgctcatatttgtaaaactagtattttcgactttgtataaagaagctctgttgcctgtgtctgtctagatgtcgaccctattttcagatgaacctgttttgaagggtgcatctgtgaccgagtggatgtaactccggaacaggagctccctatctggctaccgactccctttctcttctctccttcctcgtttgtatcttccttccctccaaccttcctgattctgccctcactgccctcgtcgtcctgccgtctgtccatggccgtcgtgtgtgtctccttagctcgctcttgagaggctgacttgggggtgggggtgggggtgggcaggggtcgggggccacgcggctcagagtctgtggagcctgggtgttgggtttatgagttctcagctatgtataaatctccaactgatctctgcctcggctcaagagtgaacccttggtacctatcttgggttgtgaatgtgtctgtatccagtatcactttttacgtgtttaaatatatgctttgtaaatagacacgtgtcttggcttcattattttatttatttcccagaacagggaagaggtagcctggaaaggcaggatacttgcctttctgacttgatgtccctcactccactctcatactctcaaaaaggtctggattcccgacaaaggccggttcccaactaggacacccctcagtgagagtgaggggagctgggttggggagggagcgagtcgtgacctttctgagcttttccgcgagctgtcttcattgccggcttaacttctttgggatgccggcagaattggagactcctgagatgaagtgtgcgcgacctctgggctctactcactctgagggaggattccccccagcgctaaacacccttccataccaaacttccatagctcctgacaaccaggagccatgctgactccctcactgcccttgacccgagcctgctcctcaatgctgtcacaggacttgtgccccagacccctccaacctcaccagtgctccccgaaatgcagagtctccgtctattgattgaggaattgaattcgcggctattgctaggcaactgcctgcttggagccggcgcagagcgcgctgatgtgattagtgagctgggagccgccgaccctcagccccgcgctcccaccaccagtccctacggcttcttggaccctagtgttctttcgggtagataccacaaggttggatgaggggctgccgatggagaacatagcatggggtgatgatggtgggtgttctcagtcttctaggctgcagacttctcagcagagaggcggggtcctgaggctgcaaaggcgacccatactccggattcccaaagaggaccttaccagtactgaacctagttccacctccatattcctgggtagacgtcgctcccttgcagaaaaagctgtaatccgtgcgaacacgcagagcccaaggggagggaggggggaatacggaccaggtcacatcttttgcccttggccccaccttcctcctccagctcagtgacctgcgtgggaggctgtgggtcaacgtctgtggtccggggttgccagagcaggtcattgagtgtccagttgagcggtcagcttgtctcagtcgccaagaggtccaaggtctgtttcttaggccacctcaaggtgctctgggtcgagcaagctctttactgggccctctggagggcgatggccatcagggagacaagaaggcactgtgactgtgcctggtgacttcagcagtagcccctccctcaaatataggttggaatcccgcaccgacccttagggatttctccgcttctttggtcaccaccaacttcaacctgggttcagggcttcctcagagaattttctgggtgtattctccttaagagcaaagcacgggtgtgaggacccctggctccagacagccttcgttcagacagatctccctccgtccgttctctttggcaggacgtgttagagccgctgtcggagctgagccttgcccaacacaaacacggattgaatggaatacttatggctctacttagagccggttttttttttttttttttttttttttccctgactcttggatgctcacagcgcgcggctctgacgaaggcccggtgctgtgcccaggacgacagtggtatgcaagcctgctccactctctgcggatgcatccacggcttttttcttttcaccaaaaagtccttcaagccaggggcggctcggattcaacgggatcccaaggtaggagcgaataggatcacgaacgggtgccatcaaggatggaaatttagctgacagcagggagaagcagtaggcagaggcctggactttctttctgcggccgcagacggttcggcgggtggttactctgagcagcaggggtgtagacagtgcaactgagtttaccacagcacgggacagcgggggattccgccctcctccccatcatcatttaaagtccagcgacacgaacttcgtggggagcgcgcgccctctacaggcaacggcgtcagcccctgtcccaagtacacccctccccctctctggttcacgtctgatagacgtgaagaaaagccttctttcctcttaaccggcttctcccagcatcacctttgtgcctttgtgaatcggcctcgacccacgcaggctggacaggagggaggtggtgttcactggcctagaacccagctgcaccaatcgtaccaggtgccctccacttggtgtcagtggtgcctactctaggatggaggtggattgattaggtggtcagactaggaacacagaaattaataaacatcaatgtaggccagccccgccccctcaactttggtctggagaccttgtccctgtagacatagattttcagagagcctagctggccaatggggccagcacttgttcctgtcctgacctgaggtctatgatctaactgcccctatccaccttttcaaaaagaaaagaaacaaaaggcactgaagacaacaaaagggaaatcaaatcgtcagctgcctgctttgcaagaaacaaggaatgggtttccctggctggagagatggctcagatggctcagctattaagacctgcgttcgatccacaacatccacctggaagctcaaaacccgtaactccagtcccagaggattcaccatcctcacagacattcatgcagggaaaacaccaatgcacaaaaataaaaagacatacgttttttttaaagtcgtatctctgcaacaaggtgtttctatctgtagtgttgacgcctccccacagcctgacatccaggcctgagtcccaagcagcctttctgccaggagtggcccatcttcccctacacttcagaggaactctattctcctgggaggccaaaggaaatttatgaataaaattaatgttgaagagagtaacacaagtcttgggctggggaaggttgtgtaacagcctgtcttcccttcatcagttgtggggggagagtcaaggtggcccctgaccagatgtttcctgcccttctcagagcttcccaacatggtactgtggaggtgagagtgttggttttacttttatgtactctgtaaggggggaaaagtgagttactgtgtatctcagaagctcggtggtggctggaggcctgtaaacatcccacttgcccagtaattagccatcattgtcccataatgaaggttactaccagcatctaacaactgcttctcactgctgtcagacaaatataaacatccttgatgggagtgtgtgtgtgtatatgtatgtatatgtgtatatatgtgtgtgtgtgtatatatatacatctacatgtacatatacatatatatgtgtgtgtatatacacacacatgtatacacacatatatgtatatgtcaaatatatatcttgatggatatatatatttgatggatattcttgatgtgtatatatatgtatcagatatatatgagtatatatctgactatgaacatgaatatattatattatatatgtatatatatatatataatatatatctttcccattaagccagtttttctcaaacttggcttcttggatattctgggatggtggacttttgtatggtggactgccttgtgtggttctgtggcactcttggtctctgctacatgctggtagtaaccttcatcatgagacaaccttctccagacactctttatgcctcccactcatcagcactctctctctctctctctctctctctcagctacttccaatgttcccccccaccttgtttggtgctgcagctaggcccatgtccacagagtgctgtgccccatgacaggggaagtgaaaactattttgtttatatgtattagttacaatgcacaccaagctaacaagtttaaaaatacatttgatactgagagtagcaaaaagaaaagtgtcccccctgcagatttactgcctttcccctgcaacacaaagtaacaccagtctaaaggtcctgcactctaggctagtgtcactagaaacccctgaactgtgagattcatgtgtgtaaacacagctgtcgctgtcttattctaaacctttccccagtccaacatgggcttcctgggcagtcattcccctgagagctggactgttctgttccaacagattctaagcttttctggggtggtaacatgcccactcttgctaaccctctatgagggcaaaagtttccagtttaaagaggtatacatcaccgggtagtggtggcacatgcctttaatacctgcacttgggaggcagaggcaggtggatttctgagttcgaggccacccttggtctacagagtgaaatccaggacagccagggctgcagagagaaaccagtctcaaagaagggggtggggcatacatcagtgactggcttaaaaacagataaaccaagccaaatgactgatgctggctcaaagttgaacatttccttctggataaaaccttggggtcagagctctctaatcaaggtcaggatttgtagtatacccaaacaaggggcactctttttggcaccaaagattttttttttttaaagtcaatgcttctgaggaaaagtacataatggtcgcttttcctattagttgttgaagcagacaaaagggggcttgtaattgtaatactaggaaagctgaggcaggacggccagaagttcaaggctagaagacacccttatcctgaaatccacttggcatgaaaatgtaacacctaacacctggaacccttatgaaacgaacctagtcaggtgcctaactacccatgtgtgtgtgtttgtgtgctcgcatatgcgcatgcacacccacctacccacccaagaaaatggggaagaggggctggtgagatggctcagtgggtaagagcacccgactgctcttccgaaggttcggagttcaaatcccagcaaccacatggtggctcacaactatccgtaacgagatctgactccctcttctggagtgtctgaagacagctacagtgtacttacatataataaataaataaatctttaaaaaaaaaaaggggaagagaacagcaaacataaaaaccaactactttatttatcggtaaacacgagaacttgactcagagcgaatggcgctgctccagtggggctcgcgctggcgcactacacacatgtgctttgtgacatagaccactggggtcacagcaccaggaaaaacacacaagaaggcaaagtggctgagaggaaaggatttgtagatttcaactttgggactgacgtaaccagtaaaataaaaggcaccaaattgggatttggagactggcagcaggggacaaaggccagtcaacccagatccccaaacagggtcacttctccaacagctcatgggaccccaaagagacggggaggtgtttgtaaaggcagtgtctggtacaaaggttgcagaccctggctgagggcagggagggacattgataatgcagtaggcaaccctttcccctttgttacccacttcctggccctgaattcttcccagtacgtagctcctgctgccagtaacatggtcccctggcacatcacaggcatctctcaggagctgtggatatgggtctgccccaaaaggcacagcattgaggttggtttggttacacaaagaccatcttatttggtgtgcagggtgagctactggggtgggggtggggtgcactttgaaagtgtggcaggtcccagacacctcagcccactgtctgactggttttagaaggggaaacatttcccttcaaggcaactggagtgaagagcccacacctgctggctgatcagtcaatggcagaagcagaaccagggtttcatagcacccctactttttggcatcacagactcactgaccagattgtcacggcccaccgtgatatcccaggacagaaaatcctgtcatcggccagcaatctgacaaggtagtttcaagacagttacccgggatgggggacaggggagaaggcatttagaaaggggctcagcactagacttatctcctaggatgggaaagaaattaggggccccctgccaggtgggctcctaaacgaccccaccacacaaatggcatagggctattgcttctcagcgagggaggaaacacaagctcccaaatgtgggagaggattgtcagggaatatgggacccaagagtggcccactcaccaggcggagctctgcaccaagactgactatagaaaatgcttccacagtagtttagagatgtctagacaggcagcagggtgacaggcccccacaaaacacctgcattcccacactggtgccaccatggtgacttatggggtcctagtaataaaagtccaacatgaaggaagattgcttgcccaggactccaagtgcctacatcagcttgctctgggtgtctagcctgctccttccccaagcccaggagtgtcagacctcagaactagggtgcaatttagtgggccaaagcaggggtatgggtccagacccagagaggaacagggtcacttctcactggggcttgagcctgcttgaaggaggcaataaggacatggctctctctattcccaagtccagaagcacccaggtacaccttagtgccaggactccaaaccctgactgggctttgggactacaattgcaactagaggggacaccacaccacggatagagactgaagatttccgcagggtccctgagcccaaccacacaactaattagccttttaaaactgaagttatagccttacttgcaaagcatagagtgtctccctcaccagaaagaccctgccgtggctggatgtgggagaaggccctaccagccccacccctctcctcaacggcctggggagggagctgtatcagtgcccccccctccccaatccacctcacagtagttggccagggaggggagggtctcactaggttaaggagggatgtgtagaaaggatgctatgtccaagcaggtagcttttaagtcagtggccacccggctttcctgagatgacaggacagactgaagtggaggcccagagaggtagaatcagcaggaagccatttcccagccctgagtctcaggacagggcagagttggcccccaggtcaggcatcaaagcaaaaccagagactggaaggcaggtctggctcgggcaatggtctcaataatgcctcaagttgaagaagcccacgctggtgggcgactccttcacggtgacagtgatgaggttggctgtgacatccgtgacaaagacgtgttcgatgagactgcgggtaggtttccagtcctggctggtctggatagctacagataggttctgcgcagcactgggaagcgaggtcgagtcagggtccgagtcagagctactattctcctctcccgtgctcagctcagacagcgcaggtggctttcggccttctcccggggctgtgtggccctcctgcccgccggaggcagcgacgcttttaacggtgtcccgcttgacggaaggggcaggcagagccgttgccttgcaagtcagcttttcccctttgttgttgtctgtgggagcgttggtcatgtttgctcctgtggggccgctcccaggacctttccctgtggctgggttggtagcaggaatagccttggctggggcatggcgagcaagcaggcccacaccaggcacaccgttcttgacgctttgcaagtcaaggacctgaaggctcaactcctgagtgggtgccagctgagcacctgggctccccgaatggttccctctctgctgctctgcagctccgccaccgggggccttcgggaccttgcctcctgcggggctcccccctagctcaccccccttctgcgtcctcactttcaggtctagcccgagaccgcacttgttggtggcctgggccttg

SEQ ID NO: 1397 - DNA, 1413 bp, Mus musculus
tcgagggctggctgctgcttttctgctcctggaagcggctgaggggggaagcggcgagtcaacatggagctctcggcggtgggggagcgggtgttcgcggccgaagccctcctgaagcggcgcattcgcaaaggacgcatggaatatctcgtgaaatggaagggctggtcgcagaagtacagcacgtgggagcccgaagaaaatattctggatgctcgcctccttgcagcctttgaggaaagggaacgggagatggagctctatggccccaaaaagcgaggacccaagcctaaaaccttccttctcaaggcccaggccaaggcaaaggccaaaacctatgaattcagaagtgactctaccagaggcatccggatcccttacccaggccgctcaccccaggatttggcgtctacttccagggcccgagagggcctgcggaacacggggctacccccaccagggagcagcaccagtacctgcagggcagacccacctcgggaccgggaccgagagagggacaggggtaccagccgtgtagacgacaagcccagctcaccgggggacagctccaagaaacgaggaccgaaacccaggaaggagcccctggacccttcacagagacctttgggagagcccagtgccggccttggagagtacctgaaaggcaggaagctggatgagacctcttctgggacaggaaagttcccagctggccacagtgtgatccagcttgctcgaaggcaggactcagacctggtgcaatatggtgtgaccagtcctagctcagcagaggcctcgagcaagttggctgtggacacctttccagccagggtaataaagcacagggctgctttcctggaggccaaaggccaaggtgccctggaccctggtggtgccagggttcgacatagttcaggcaccccagcctcagtgggaagcctgtatcgggacatgggggcgcaagggggaaggccctccctcatcgccaggatcccagtggccaggatcctgggggacccagaggaagagtcctggagcccctctctgactaacctggagaaagtggtcgttacagatgtgacctcaaactttttgaccgtcaccattaaggagagcaacacggaccaaggattctttaaggaaaaaagatgaattgccggggtgggagcccaggaccagtgcaggggagagtgagctcaaatggcttagtgctttttatttctgggtgactgtggcctctggctggtcctgtccttcttcacacccctcttccctttcattcctccgtcctcagttctggctggaaaattatctctagagttctattttctattagatgtaaatatgttatttaagagaaaaatatctaaatatatatatttcaactcttgaaaaaaaaaaaaaaaaaaaaaa

SEQ ID NO: 1398 - DNA, 1089 bp, Mus Musculus
atggagctctcggcggtgggggagcgggtgttcgcggccgaagccctcctgaagcggcgcattcgcaaaggacgcatggaatatctcgtgaaatggaagggctggtcgcagaagtacagcacgtgggagcccgaagaaaatattctggatgctcgcctccttgcagcctttgaggaaagggaacgggagatggagctctatggccccaaaaagcgaggacccaagcctaaaaccttccttctcaaggcccaggccaaggcaaaggccaaaacctatgaattcagaagtgactctaccagaggcatccggatcccttacccaggccgctcaccccaggatttggcgtctacttccagggcccgagagggcctgcggaacacggggctacccccaccagggagcagcaccagtacctgcagggcagacccacctcgggaccgggaccgagagagggacaggggtaccagccgtgtagacgacaagcccagctcaccgggggacagctccaagaaacgaggaccgaaacccaggaaggagcccctggacccttcacagagacctttgggagagcccagtgccggccttggagagtacctgaaaggcaggaagctggatgagacctcttctgggacaggaaagttcccagctggccacagtgtgatccagcttgctcgaaggcaggactcagacctggtgcaatatggtgtgaccagtcctagctcagcagaggcctcgagcaagttggctgtggacacctttccagccagggtaataaagcacagggctgctttcctggaggccaaaggccaaggtgccctggaccctggtggtgccagggttcgacatagttcaggcaccccagcctcagtgggaagcctgtatcgggacatgggggcgcaagggggaaggccctccctcatcgccaggatcccagtggccaggatcctgggggacccagaggaagagtcctggagcccctctctgactaacctggagaaagtggtcgttacagatgtgacctcaaactttttgaccgtcaccattaaggagagcaacacggaccaaggattctttaaggaaaaaagatga

SEQ ID NO: 1399 - DNA, 22715 bp, Homo sapiens
cgggcagtcagtgttgagagaggcagctggtgaggcacctgggttagactgcaggtgccgaaggacccaacaggagctgtgggagaaagtgactcagtcttgccctgtcttgccgtggcaaatcatctcccccaacatccactcctgtctttctccccttttctttccctacactcgatgccctcactctgggaacgacatctctgtgatctctgccagcgatggccccacctgctcctgaagaccctcgactcccccatgcccacctgtgcccaccttcttcatttcggctggacaccactgcacaccagacttgtgcaaagtgagggtcagacttggggatatgctcttagatgttcccgactcctgagagggacctgtacccaccccgctgtccctcactggggagctgtaagaccactccaaggctgaagcccagtgtcctgcacccctatccagtggacacccttcccattgctcaggcccttccaggctgaatggcgcccccctcaagaggagaggtccaacccctcccctcagcttgggacagagtgggggtggggtagagaggacagttccccaagggactgcccacccccatcccagagctcgtataatgcctggagcaggctggagaatgaggtccgccagagatcctgtcttgcagacctaagaaaaggtttcagggaacagaagaattggtaacccctgcaggcctccctgctggccacttcctcttctattcatcccaggtcctccctactctccaaaagggagaaactgagggagaaacctgggactgaatggaaggcctggaatcccaactccccctgaggtttttggctgggaaaatacctggggacagctggagtcttcgggtatcctggggcgcccctcccccagagcgcccccttcccctagggaaactttgatctctctctcgctctgtctctctctctctctctctctctctctctctctctctctctcacacacacacacacacacacaggcacacacacacacgaacacacacacattggaaaggagatgatacctctaaagtcaggctgcaccgtcggggtggtgtaaaaaagttagagactgcctcaaaagggcagtgggaatgaccgcaaagggaagaggaaggagataaaatgaggcctatccctcccaacccagcagcccggctctccagagacactcccttttccaggccctacagtcccttggcaccctcctcccttcccaccaatacagcatctgaaggtgtcactgagatcttccacccatttttcctccccctacccatctcacccacaggttgctctactcacagcaattccttcctaggcttcctcctgtaaccctgaactatttaaaagctcattttaaaaaagaacttaagactgataccaaacttcttagttgcaagcctgaactgtgggcaccttctcattaaacgtaaaacctgcatcttttccaagagagaggacgttcttgtccgtagaggggtgacgggaggtgctgcagagcccttttgagctcctctcactctctgctctgtgactgcaaaagtgagaatggtgccctcggaggaaacacgttttactgcaaaaattgtctggagcccggaattgccctgaaagtggccctgcaattacaattctggtccaaattcatttaccatatttatttgtggattttctcctcccactcctctgcgtattaaaaaagatcaagaagattttttaatgtataaaagatgtttcctccacttaaggcaccccaccgccacccacgcacccctttattctgctttgaattcaacgacttctgctgtctcggtggctgaggcgaccatcccagagcaaggaagtgctctgtcttgatctgttcaaagggtgcggaactgagtccctggaaggtccggacccagaccccggagctggtttgcaggacacccctttaatcctcagtaggctgccaatctaccctctccacaccccaacacattgaacatctgcccccaataccccagccacagtccatgtctctgcctcgagggccaccgaacctcccaggatggatggggcgatggtgggggtatctgctgggacttccacggtggcttaccccttcatccgtttggccaaaaagtaagctctgaggttgaaactagaaaaatacagaaactcagcgtgaacatcacatttccactgctttaaactttctctctccttggtcctggtcaggaaccctacaccctctgctaaaccggcttttcttgccataagcctcctctgtttttaggatctcaaggactagctgaagaaaattaattttgcctctgattgctgtgttattctagataagccattattatgcaaatgagggagtgcggctctcaggatgaataagacggtgccggtagcggcgcgggacagccccagatgtttgcataattacttctgccccaacttcgagagtgcaaaatgtcaagggaggaagttgtgcgggtaaatacggtaccatgttccctgaatttgatttcctacagaagggcggggaaaccgatcggaggcttcagctgcagagagaaaaggcatcacggctcccgggccgacggtgtcccggccgagtggccgtctgcgtccgcccccgcgatgctgagccacccctcggcccagggcggccggagagagcaaggtcccgcccgggtagcgaggcgcttgcgcgggcacagagcagcagcttggccccacgctttccggcagccccggaaccggcaacacggcttctgggcgtgcgcggagccgccgcgctctggccgcggagcctcgacgccagccgagccccttcgtgtcccagacggcgcctcctcccggggcaacggctaggggtgcaccgaggaagccctgtaccggggctgcgaggaaaggcgtcgaccacagtggaggacgccgaggcttcgcccagaacctcgccggcaccgtcgcgttttctcggtcagctcccaaacgtctgccctcgggtttgccgcccgcgtggcccactcttgcggagggtaggcggcccggcagacgcctctgttccccgaggttctgcgagaggccccagactggcctccgcagcttgtgccttctcgaatgacccggcaggccctgcacttaggattttctgatctctaaaaggggaagctggactgtggctcttggcgttaacaatctcgcaagggaacggcaccggctgagagactcccactttggaactgacttgaggtcccgacgtcccagcaaaaaagtcacttcaattccttctgcatgggggtggggtaggaaatgaaaaaacgggaagcgccaggcggagtccgaggagtccctggagcttccctgggactctggagagccgcgtgtggtccaggaggaggcgggaggactgtggcacccagcatcgctggaggcagaagtgcccaccctggcggagctccggctcaagggagcccaggaggtccagctgcctctctgcgcccaggctctggtgccaccattccttgactcgcccagcctctccccgtgttttcccgtgggagggttggtgctccccgcctttctcatgagctgggtcacgggaggaggggcgctcatcaaccgtggctcgtaaccgccaggccaagcctgtcagtgcaggcagaatctggggtcaaactctccactcggggtatctggaaccacaggctgctcacgcgttgagccagggcccggggtgatgcgagaacagagtcagcgcgccccgggcatctccaggcaggggttggggctggaggtttctgataacgtcctgctctcggacgggactccaaggccttgatctctaggccgctcacttgtcccgggctgctctgccgccacaccctgccggcctcccctcgcctctcgcagtccccgcccctggctgtgcctagtccgtcccgtctgagccccttctccccagaccgtgagaactgagcgcccagacccaaggactcccggactccttccaggttgcggttgtccggcccaactctggaccgcctctttctgctccccaagggcgcctggggctcctaggaatgggtctcacaagcagcaccagcgagcagtccggggattgggtgtgcgtgtgatgggggggcgcgtgggggggggcggaaatggggccggcccgcggcgcgcatgcgtgctggttcgggcgctgtgcgcgtgctccagcggcaccgcaccctcagctcgcccggcctcggcgctccgaggggacgccggcgcgttttcccagcgagcccacgtggcccaaccggtccagatgcccaaggaatgaatcaaaactgcctctaagcagcatacggtccgtttcccagggaaggatgggtgtgtgctgagcaccctctctgggcttgcccctcatggagaagaagggacagccgaggctgatactggagttcctggggaaagtcagaacagaatcactaggtcctatgagtttgttctggtctcagaacaccaataacagcaacaacagtaactaataatgaacatttattgagcatttgcctgtgcctgacagtgtgggggtgcttccatatctcattgaaccccccatgggctctgttgggaaaacgtgctaatattccttttcttatagttatggaagctgaaacacagagaggttaagtaacttgcacaagggcacacagccagcaagtgcattggaacccaggcaggctggccccagagcccaccttttttagccactgtgctctagcattaaaaaaaaaaaaaagcgaaaacgcccaccaacatccagcttccagttgacttaaatcggcccctagaactccctcctgtctctattgttccagtctcatccttgttgccgagggctctgagggtcctcctgctggagcactgctctgcgcttccacgaggctccactggacctttcttgaattctttcctcaagccttggaggagctgaaattcacaaggatccaaagcccctgctgcggagctttagggacgtgagcttacggcttctcaggcagaacccctgctgcgtgcccctgagcaagtgacttggccccgcggtgcctcgctttcctcatctagaaaatgggggtaagggaactgatgttacctggctgttgtgaatgttaactgggataacgcaggccctagatatagggcaactagttaagcaatagatgttgcttaactctgaggggatattttcttcctgtggaggggaagaaagggggcctgatttcagtttccggggtttaaggcagaaatgtggcttctagaatgtgtgcagccttgtgggagattcctgtagagtgggcagccccttcttatcctttgcagcctgttccagtgcttctctaacaaggaggatgtgtggatgtctcctagggaggagaaagtgggacaggaaaggtgggagcttcttgctcttgggaacaactagcggcgggaaccaaggccagaaacctggacaacctcacttccagtcacccaggctgggccttgggaccagtttccagaatgtcgggtcaccctgcggcattcccgcagcaggcggcaggcgcccagccctagctcggcgtctaggaagcagcgctgcgggacgcccgcccggctccgggaccgcgggaggtaagccactggccacaaggccacgcctcggagccgcccgcgctcatttcactgccggcccgcccgaggcaaacggttggcttccaaatctgcccgcgtccgcggccaagaccgggcaggtccgacgcccgccaagccgcgaagttgaaacgctcccaaagaaccgggccggcctcatcctcaagctagaggacgcgctagggcttgccggcctggcccaagacccaggagcccagcgccccgctggggcccgtccgcccctctccttggagtgctccagcctccaccctccctcccggaggacgagtccgtggtccgcgggcccagggaggcctaagagggcccccaaactccgggctctcaggaggctgcagcatcgagggcagagtcctggcaccttttagaggctggggccaagggtagggcgggctcccgggagcaggtcgcagaccctttgtcgggaagggcagtcgcgggccgtgcgcccaggtcgccagaagagtgcggaacagggccggagacctaggggtttgggaagcaggtgtccctaggagggcgggcgcccgcatttccgtaaacaaagaaacggggcagctcatctcaggagagggggtggctgttaagagaatcgccgacaatttccttcataaaaatgcgatctgagagcatttgatttccactttcactccccccatcccccgccccaacacacgcaccgtctctaaagacactcaaattgcagccatatggggctaaagtaataggaagcagttaccttatttactgcagaggcggcgcacgccaacctggcagccgcagcctgagcagcggaccgccgagcaatgggattaagagtagcgtgtcttgtcttttacaactttgttttgtttgctcctgggacgtgtaggtgggaaaggcaattatctaactttgaaacaggaaagcggttgtatggagaaaagggaggtggcgagaattgagtcggttggggaagggggttgataagaaaggtggggagcaaggatcctctttctgtgggttcctaagaccatgccaccagctgacctgtcctctcggtctggatctgacccggctggaatgactgcaaacctcctccccctccacgcccacgcatgctagcaccctctcccggaacacagggcttcctcccgcgcccacccagccagagcccgggaggtgggctcccatttctcagaccgccacctcccgctttgtctccaaactgtcgaggaatgaggttgcccggtgacctgttttcacaccccctgcaacgctgctctctcacgggttggggggcaggggttgcgccaggcagggatgagacacactctgccccgttggggattgccttccttggcgggactgagcgcgtctgctactgacaagagccaggctccctgccctcagatcattctatacctcttccttccttctgaatcgagttccacctttgccacaagctttgcaggattccccgacgtttgcaaactcagacttttcgcaagcgatagttttgtttagagcaagcatttccgaaataatcgccatcaggcacaaagacaggtggaaaattgggtggggaagctaagataattacctaagaccctatccagaggagggggccgcacctgccagcatcaggggttccatttcttcaagtttcagaggtatttaggcaaagaagggagaatggggcagaaagagagggagacggaaggaaggaaggatgggaggaaggaagggaggaagaaggaaggaaggaaggaaaatggaaagaacgcatggaggaacgactacagctatcttttttggggagaaactgaaaccatcgccctctgcacgcctagcgcaaaccccatgatcagtaaaggcatcaagggcaagcacaactccgggaagcgggttccagaaaccctatctgaaggaaaatcaccgctcttcgcgggtgcgggagagcttgccaggggtgggggtagggcgcgaggccaggcgggtcaggtccccccggcccactctgggaaggccccctccctcccacttccacagtggccctggagccagctcgaggggctgaggcggccggtgcggggctggggcgctgttgtccttggcgggcagcggattccaagaggaggcgggcgggacaggcagagggacccgggcccagggcggagggtgggctttctctgggcggggaaaccagacacttacaggcggctgaggccgactttatttttactgcccaaactgttggaaagtatttaagcttaaacagaaacagctgtatcgctggcaccggccgacgaaactatttgttaccgggaatgactttttatgattaaggacgcggccgtcggcggcctcccacgggcggcccgcgagggtcactgggagatctgagcgtcctcgacgcgctgttcgttcagacagaacggccggagagatgggactgttcgacaagcggccaccttgtgaagtttaggaacaaggccaaaacctgaaacccgtgtttccagaggctggggcacgactgggagggaagatgggcgaagcgccccgcttgcccggcgggtcgaggacctcgcggctgccgccgcctgcgcgcgcctcactttggacaggaggccagttttccgctctgggcttcctgcccctccgtgtcagactccttggctgcttctctctctcttcctatcgttctctctctgcctctctcttttccccccctctttctccaccccatctctggccaagggaaactgcttgcagtcaggctgatcatcgatgtttgaactaaatcgtgggttccaaggagtgggagttgtgatttggagcttgagcaataagagaacagggtgggagggagctgggcccagagtgaggctgctgtccccagcgccgcccccgccacgggtcaccggtagcctagctggcggcagggtcggcggtgcacgtgcttgtgtgcgcacggcaaggcggtcgcggccggcccttgtccctttccaggagcccgccatcttcgcgcgtgagaccctctcgcccagcccgcactggacccggcgacgtcccccagcttcccgcgctggcgtttctcgcaggatgtccgccgcccacgttgggaagagcggtggacaggaagtgcgcgggccgggcgccggggttcggggaaagccagacgcacccccagccgctcgccccatcctctgccggctccgcccagatgcccttagcccacccaggccccgagcagggggcggcgaggggaaggcgaggttcggggccgaagcctggcgggggcgggcagcttgggctaagggcaggggcaggtggctgcgggcgtcggggatggtcggggggcaggaagaagccgcgcgacatcctctgtggggtcctgggctgcagccgggctccggagggaacagcccggcctccaccaggtctgtgttcggcttcggagccggggacgagcgctccagccagcccggctcgcagggcccggagggtggccgagggcagggccgcgcgacaggagcctgagacacatgcacattgatttgttagcgggacccggcttgggggggggggggacgttgccatggagaccgggggtcgggtgtgcggctccgggggaggggggcggcggccgggggagaagcccagccgatgggcgcgccgcaggctctcggggttcgggcgcggcccgcggcgccccagcacctgtgcattgtgcattgtgcggcgcgggcggctgggggaggggaccgcgcgagtcctgggcggtgggggtggggcggcgggccggggtctgccgaggggcggagccgggctgacatcgccgcggggatcccagcgagagctgtgggggacgccgaacgccggagggacaacttggtggcgggggaggggggccccggcgaggacagagggcggcctgcccccctcgccagccccgcagactgacagcggccgggcccgccttcccctggcgtcacttccggcggcgccccctcccactcgcgcgctcggtctctggagtcgcctcggactccgccccctggcgattggaacgctggtcacgtagcaacgcgggggagaaaggcagaggggcgtggctcggagctcgtccaatcagcgtgcgggggcgcaggcctccggccgctcggctttagcaacgtcgttagcaacacgtggggcgggaggaagcactgggcggaggggagggggccgagcggaggagcgcgggaggggggccgcgggagggagcgagagcgccgggagggggaggagaactgacgtcagcgggagagtattatggtctgtcgtgcgctggctgctgcttttctgctcctggaagcggccaaggggggaagcggcgagtcaacatggagctttcagcggtgggggagcgggtgttcgcggccgaagccctcctgaagcggcgcatacggaaagtaggtgcccccgggcctagggcctccgtgcggccgggccctcccctcccggcccgggttccctccccctgctgcagcccagcttcccttcccccaggtcccagcagcggccgcggccgtggcggcggcggcggcggcagctctgagcccaggcgctttccttagacttgcagcgatgcacggattgcatgggtggggggcggggtggggaatgaatgccggtgcatgcactttgtgcagcattaggtgcaggggtgatgcagcgggcgcgtgccttttgcggcggggtttcgagcattcatctggtgcatgcattttcgcatgcatttcttgtatcctcgtcatgcgtttctccccatgcacacacattatcgcctttgcacccgcagggacgcatggaatacctcgtgaaatggaagggatggtcgcagaagtaagtaggttatatgcaattctcaaccccagactgttattcgggaggtttctttcttcctctttttgcctttacattgaaatacaatacaatgcaatgagaaaagttacacacacacacaccccctctgctctcaccctgctcctgggactgatgcccacttcttcctgattccctttaggtacagcacatgggaaccggaggaaaacatcctggatgctcgcttgctcgcagcctttgaggaaaggtacagacccttccaagtcccagccgctcacttagaaacaagtagagtggcttctttccagcctggactagagtcccacttgctttctttactcacgcaccctttctccttttcttctttctccagggaaagagagatggagctctatggccccaaaaagcgtggacccaagcccaaaaccttcctcctcaaagtaggttggcagtgtccaatggtggaggaccatgttatggagtgatttgtgggaagggggctctgagggctgtgagccaatggggtgtccacacatgttgcctatttgtaatgtaggagggagttccctgacaagatgtcaccaagtcagtagcagcaccaactgtgtctggggggacgggcttggccacactagaattcctttacgctccccctcccaaatggacacaataatcaaatgcaaaaagtgtactttttgcaaatgactacttccagccaaatcttctacctcttctctcatccttctacctctcagctccaacagccatcccacccattcatccagccatccacccacccacccacccacccatccatgcatccatgtagaaattcccaggcatcatagggtaaagataggaggtcagggatagaggaggagtcctgtgggggtggacagggccctgccccactcttgagaccatcttctctcctgcaggcgcaggccaaggcaaaggccaaaacttacgagtttcgaagtgactcagccaggggcatccggatcccctaccctggccgctcgccccaggacctggcctccacttcccgggcccgggagggccttcgaaacatgggtttgtccccgccagcgagcagcaccagcaccagcagcacctgccgcgcagaggcccctcgggaccgggaccgagaccgggatagggaccgggagcgggatcgagaaagggagagggagcgagagagggagcgggaacgtgagagggaacgagagcggggtaccagcagagtggatgacaagcccagctcaccgggggacagctcgaagaagcgaggccccaagccccggaaggagctcccggacccctcacagaggcccttaggcgaacccagcgccggcctcggagagtacctcaagggcaggaagctggacgacaccccttccggggcaggaaagtttccagccggccacagtgtgatccagctggcccgaagacaggactcggacctggtgcagtgtggtgtgaccagccctagctcagctgaggccacgggcaaactggctgtggacaccttcccggccagggtgataaagcacagggctgccttcctggaggccaaaggccagggtgccctagatcccaatggcacccgggtccgacatggctcaggcccccccagctctggggggggcctgtaccgggacatgggggcccaggggggaaggccctccctcatcgccaggatccctgtggccagaatcctgggggacccggaggaagagtcctggagcccctccctgactaacctggagaaggtggtggtcacggacgtgacctcaaactttttgaccgtcaccattaaggaaagtaacacggaccaaggcttttttaaagagaaaagatgaatgctgggtgggtgtgtccaggaggagagcaggggagagagtgagcgtgagcttggcatagtgatttttatttctgggtgggatgtggccttttggctggtcccgtccctgatgtcacccccaccccaccagcccctttcatccctccttcctccccctcagtttttgttggaaagattatctctagagttatattttctattagatgtaaatatgttatttaagaaaaatatctaaatatatatatttcaactcgaagttgttttatttaaaggagagagactctcattgtgctttagttggggcagcccgaatgagctggggcaggaggggcccccttgccccagagctctagggaagttgggccctgggtacaggtttctgagagtgtctggaggggcttggcctgcccacctcacccctcctcccttctcccacagcccaatgccagactcctggcaccaaggcccggcccagatttgctctctcttcccattggccaggcaggccaacaaaaggttggctccccaatcagaaaaaagggggggtggggtcagtctgttttccttttttctatttttttttttttaaggtaaagaagtctattagggaaaaaagtattaacttgaataagcttttcgtgtgtgatgttgaaggttaaaacgtccccagcaggcagggacaggaggtttctccccaggaccacaccaggaaatgcactttagggaggggtgtgtgtgtggtacacgcagatcgtgtgtatgtcatgtggataaaatctccccgttccctcgttcctttccttactccgcagaaagaaaagaaatccagcgaatctgtttacattcccgaaatgccaggataaattgggaggattgcgtgtcagtgctgagagttcgagacagttgttttgcaagaaaagtgttggggtggacttttccttttcgcgtcctctagctttgccaggagaagagacggtggcccccacctcccaggaagagttggacaagcctccctgcctggggagggcgggccgccagctctgtggtggacacatggccagacaggcccaccctgcgggacccacggagggaggcgcggcggcgggcgctgctaggagcagtggcttcgcacccagggcctctccacggccaggcttggagtgtggctgaggaccacggctcggagctcggagctggggctagactcacccccgcggctccggccgggcacgggaaggaggggcgaggcggggttttcatccaagaatgcgcatcggaacttttgctttttccttttttttcccccgtccttcttaaaagcaaaagctataatttataggtcttttcgattcgcagtgttctctatttgaactcgacattcaaactccgccaaagggggagggaggagcgggagttgggagtggggacggccgcggcggggaaggccgtgcgaggcggcggggcctgggacgcccctgcccggcggacttgaccgctctgcgctccgaggacgcagaatgcgcgcccctcttttgactcaaaagcacaaatcagtcccctccactccacccccgtctcttggagcacggatcccgcagcctccctgccctccccgcccttaaagggccagcgaagatctaacttcccattgcttgttgagggaggggcgcgggggccctgcacgccagaggaagcacagactcggggggagcgaggcggggagtcgggggtgggggagcttcgcgtggggtggggggtgctgggagggaaccccagcctcgtcctccgcactcccggcttctcagcctctcctccagactttcttgcctttaaagagagaaaaggagggaaacggtgtactacatgattgtgtttgtttttgaatatcaaattgcgcctataaagagaagcccctggaatggggatttttatctactcacatttgtaaaactggtattttagactttgtataaagaagcgccgttgaccgagtgtatctatttaaatgtcgatgctattttcagatgaaacttcactgaaggggcatgtctgttacctagtggacgggactgggggatacgcgtcttcacctggccgccgccttcccttctctcccgcctgtcctttactcccacctccctcccttcctgggggctgactttgccccttcccttggaccttctttccagccagctctgtccctgccgcccctccgtcctgctgtttgtccgtggccgtgtgtgtatgtgtctccttctctcgctcttgcgacgctgacctggggggtgggtgggcaggggccgggggccacgtggctgggagtctgcaaccgcgcagggtgtgtgcgctgttgggtttatttaattctaagatttgtacaaatctccaatcgatctccgcctcagctcaagagtgaagcttcggtacctatcttctgcggtcgtgaatgtctgtatccaataccgctttttacgtgtttaaatatatactttgtaaatagagacatgtcttggttttattcttctttttccttccctgagcaaagggaagaggcatcccgggaggagaggatccgtccctcttctctcagtactcatcccgtcctcccgcccccatcctcgcccccatcgcgggggcaccgttcctgcaaaggcccttccccaactggggaacccacctggctgggatagaggtgggcgtgggaggccgctggggcagactcccctcagcccgtccgggggaatccgtggctctccgcacctactggctgcacttcttcgggccccgggcagaatctggggatcccgggaggatgcgcctgaggtcgggggttccactttcctctggcgggatcctccagcgcgccacacccccaggccggaggcgtctggtctccgaggccccggggcctcgccgcgttagccaaagcctcccggtgccagcccctcgtagctgtcttgagacccactccccagacccacccaaccttgctagcgctcccctaaatgcagagcctcgcgcctattgattgaggaattgaattcgcgggtattgctaggcaactgcaagctcggagccggcgcagagcgctgctgatgtgattagtgaacctggagccgccgcgccgcagccccgcgcacccccgcccccgagtccccgcagcctctccggcccaggtctcctgggcgggcctaaaccccagcgctgggcaagggacggtgcgggagagcagagtgcggggtggggggtggagagagagatgttcttggccttttctggccgcagacttcacagcagtgggggcggggtcttgaagcccgcacaggagagccactcttcggatccccaaagaggccaccgcactaaacccatttctacttccgtagtgccccgcagacgtcaccctgccaggaagccacgattcaggctcacccctaacgcccaccaggaggaacatggacaggggtagctcacgcatctccagccccttgctgaggagtcagtggcccggcccttggcagagcttcccccttccccagctgtgaccggtgtgggagggcgcgggaggacagcagcgtcctgctgcccaggcccaggttagcgggtcacagagccttgagtgtccttccgacgtgagggcctgcgctgccggccgagtagggtcgctggccgccaggcgtcaaagatctccgcccgagactgccccaccgcaacgggcggtctctgtgctggcaggggacgtcaagggaaggtgggtggggtggccccgcgatggtcgccacttggacggggctccctcctgcgtccactcggacggggctccctcctgcgtccactcctgggcgtgtggggcagtggaatgggctactgcttaagcggatgggagggcgcccaccctgcccctttttcgggttcgctggccatcaccaccctcggctttgaggagcgccctcacgggtttccatttcctgggcagagtccctgggaatccgccacaactgcagagaccaggcgtgcgtggcggcctccagccggactggttaccttgcgtcccgaggacagggctggcttgtgtggccaccgcggcggggaacctggcctcgcacaaacattggttggattggaaggttcatgctcttcctagagtgtcggatcggattcattttctgtccgtttgatgctggcttcgcaccaatcctgatccaggcactgtgccatgcgcccgggccgctggcgcacagacctgtcccggccctctggggctcctgtgctggtttcctcttctcctctaaaagccctccaggcccagaggagcctcggacccagctgaagtccgagactggcgtggctcggggcccggcgggactccgtgctgtccgtcgtggaaggcggctgcccgcagcctcgggtcctgaacgcggcgagagaggctgcgggctgggtcggggctttcctcctgagacttcggaggcggaggtggccggggtgcaggtggtgcgattgagtctcgggcaccctggagccgcggctggcttttccctcgtccgtccgaagggccggcggccgaccttggtgggacgcgcgcgccctctgcaggtggcggcgtcggcccgggtcgccggcgcccaccccttacccccggggggccggtggctttctggttccgaacccgagctgagaaagccttacctccccccgacccaaaggtaccgctgggcgcccaccgccacgggcgccccctctgcgtcctccctgaggcccggcgctcgagccacgaaggcggaggggaggaaggagaggtccagccgcccggatgaccgtcctcccagcccctccgcacccatcgctcccggtgccctcgggcaggtcgcggcggcgtggggtcgggccattggcagcccagtctgttcttctcagggtccactggattaggcgatcacatcagcggcgccgaaactaacaaaggccgagcgagctcggcccggcacccgtcgggccgaatccctgtagaaatgggctctcccgaaagcctggctccacatccggggccgcgcctgctcctgctcggccagcttgctccttcctggcggtcccagcccctttctgcagctctcataagccagaggacaggcccgctggggtcgcccttgcccactttctccaaaaggaaacagccagagccttgcgaaggcagcaaaagagagcccaccagcagtcttctttctctgcaacagtcgatttcgaattcgcaggacttcctggagcgggctagtgctgggggtcacatttccatttgcagggggaaccctttcctgaaccaaaacattcaggccttggccccaagtagcttttcacccagttactccaacatctaggcccagcttctctcttcacttcaaagaagctctattctccctggaggctggaattcatgaataaattcatgctgaagttggtggaagccttaaggagccggggaaggttctgtaataagcaaatcgcctctttattcgcgagctttgggttaggagttgcagtagctgctaactcacagtgactcccctggaattttatggctgcctccttgtaaagcattattagcacatgtggtggcttcaaggggttgagtggctttccaacacagcatctctggatactgtgggcgcggggagagggagttttattttaactttgcatgtcttttgaagggagcagtctcaaaatgagttgattatatattgcagcatccctgacctcacctgacagatgccgataatgccgcccctgcccccaacccctgccattgtgttttttctatttttcccattaattcagtctctcaaactcagcactactgacgtgctgggaaggatcatttctttctgtcatggagactgttctgtgcacctcaggacgtctagcagcactcctggtatccacccactagatgcaagtggcatccaccccacagcgtgacaagcaagatctccagatctgcaagtgttccctggaatgccagttgttctctgttgtgagccactggtatatggactcttaaacacccatcctttgcttggaaacatatctttttctgcaccctctgcaagtggcctttcccagtctttgatttttctgtgccccaagtatttggcctatgtccagacgaattattttgcctcaagaaaggaaaagagcagagtctactgtgtttccagggatcactcatgatgtacatcaggccaaattttttttttaaaaatttattgatatactaagagataacaaaaggacaaaaatcttctgacgccatttgctgtccttcccctgcaaaataaattaacatcagtctaaaagaagaaaaaaccctgcaacctatgctagttttccaaaaatgctagaaaacccacagaatcatgagatgcacttgagtaaaatctggtcatgtaggcactacctgttcccaactcaccattccccttccccacaccatcaggggctttttgggggaagcatttccttaaactggttgatcctaattaaatgtgggccctaggctgctgtcctgtttcaacagagatcctttcctagggcaataacatatctacttttgttctcttttaagaaagcaaacagccatagttgaaagcaattagaagtggcatacatgaatgattttttttttaattaaaaaacacaaatcaagccagtgattggctttggttcaaagcttgatcctcccctgaagtctccccttagtgaaagctctcggcccagagccctctccagctaggtcagaatttcgagtgtaaccaaaacaaggaacactcttttttggtacaaaatatatacatataaaaatatgctaacatctctaaggaagacagactggccactgcttcctattcaatacaggagcaaacaaaacgcggttaacacaccatttcacacacacaccattgccacagttcctgcgggaccttcgggaaaaaagcaacaatgcatcgtcagaagtgccagatacctagctacacaaacacaaacacacacacaaatagcagcaaataaaaatagaaaaagtctacttttatttattggtaaacataagacaaccaagtctgagcatctggtgcagttcccagtgacggcacttgccctgcacacgctcttgaagcaccaggaaaaacacacaacacagtaagaaggcaaagtggctgggagtaaggtatctgcagattcaaactttgggattgaagtagctggtaaacagaaaggcaccgaatcagggtctggagagacccggctgctggggaggaatctggcctgcccaggcagacagggacagacatcctcatttctccaacagctcctggaagccgagtcaccccaagggcttggagagctgttagtctggctttggagcagtgaaggtagcacagtgctcagcaggaaggagtcaagactttgctgtcgagcacagggaggctggtgcctgaggctcagcgtgccaggatccacgcctcctcccaggctgcgcagtgagctggaatctctccctctcctgtgggagcagctcttccccttactgtctgcttccagctctggcctagctatctgggactcttagcccttcaattcgccgaggtgggcaccattcctgctgcagccaatatggccactgtgggctggcccccagctggcatatggatggccctcaacgaagccatggacatgggtccctccccaaaggcacactgttaaaaagatccatttggctacaccaaggccacctcttcctatttggcacggtgaggtactggggggtcttgcagtctggtacgcctgccccccgcaaaccagagcccattctcaaagtccgggctgctccatggaatcaggagtgcctccctatagtcaggcactggaatgtagccccatgcctgctggcggactccatccaatcagaggaacagaaagcacccaccccaccctcttttatttttggcatcacaaagacctagtgaccagattgcctgccgctgccacctctgggctgccctgccttgctgcccacgctgctctcagaacagaaatcctgatactggtcagaagccatacaagctagctcccagacgtgaccacctagaggcagctcacagtcttgagttaacaggggcctcagggccgaggctgacagatccagcttcccgggaccctctaccaggcgggccccctagactttgtccagcttccccaatggcacaggtctagtttttcagctggaaaggagccaagcagggaacccctaaaggtgatggggattgtcagggaaaatgatactcctcaaggaatgcctcatccacttgggcagggccccacacaggacgtagggagttgttggctggacccacggccaacacttgcagcacaggcagagccggcagacgggcccatggacacccaagtgccagcactgctgtcctccaggtctccggggcagtctgtgggccataattagaatgaagccagtcctttactagcagaaggtaggtcctgggagtgaagggaggggcttgcctgccaagggtcctgcccactggactcccctggacctgagcacctccactttgggttttccttgggacacactgaactctgggctttttagaaatggaacatgcttcagtgggcctggggcaggaggtgggtctgggtttggaaggggactcaggtcagttctcactgggacacaggcaggagggagggtggcagccatagcctgcctctcctgctccgaggcacggaggctcttcaggtggaacccagctgtgggaccacccccgccccacccacgctggcttgtgggctatggatgctgccctgaactggggctagatggccatgaaggcagccttttagggctgctgggctcgctctactccagctgcctgccactgtcttttcacattaaggccccagccagcccccacctgtcaagggcaagctccccacttcatcactgccggctcaggcaatgccagccaggaccacccctgcccaccccatctcccaaaagctgtggccagatggagggaacactagtcccactggccatgcctccccacaatactctctgcccactccagggctgaaggcaaggtgggccagaagtcccctcctgacacctcagcccctgcaagacagggaccaaagctgtgattcagtcacgcaggccagggaggagcagttcaaactcagcaacaacgcagccatgaagaagcccgctctgttcaagacagtcacctggagccacaggtgccaccgggtttcctgaggcaagaggggagagcaaagaggcctgcagaggtaggaacaaggtggagaccaacaaggcagtgaggccccctgccctatgtcctgggacagagtggggtgcgggagaagtcccttccaagcctgcccatcaaggaggccacccactcctcctcccccgacccagactcttgagggggcttgggctgggagtcacttagccaagcgacaccataggcagggaaggggagtaagaccgcgcagctggtggcgccggggcttcagtaatgcctcaggttgaagaagcccacgctggtgggagactccttcactgtgacggtgatgaggttggcagtgacgtcggtgacaaatacgtgctcgatgaggctgcgggtgggcttccagtcctggctggtctgaacggacactgacgggttctgtccagtgctgggcggcgaggcggagtcggggtcggagtccgagctgctactctcctcacctgcgctcatctctggcagtgtggccgccttgcgggcttctccgggggctgtgcggctctcctgcccactgggggtagcactgcccttgacacagtccctcttgctggcaggggtgggtggcgccactgctctggaagctagcttctcacttttgcttgtgtcggtgggcatggtggccccgctggccccaatgaggccactcccagtgcccttcccaggggctgggttggtggccgggacacccttggtggcggtggcgtggcgggcaaggagacccaccccgggcatgccattcttgacactctgcaagtccaagacctggaggctcagctcctgggtgggtgctggctgggggcctgggcacccagcaggcaccctgctggcaccatgggtgtgcggggggccccctgtgttccccactttctgctccacagccccaccgctggg

SEQ ID NO: 1400 - DNA, 1540 bp, Homo sapiens
ctgacgtcagcgggagagtattatggtctgtcgtgcgctggctgctgcttttctgctcctggaagcggcctaggggggaagcggcgagtcaacatggagctttcagcggtgggggagcgggtgttcgcggccgaagccctcctgaagcggcgcatacggaaaggacgcatggaatacctcgtgaaatggaagggatggtcgcagaagtacagcacatgggaaccggaggaaaacatcctggatgctcgcttgctcgcagcctttgaggaaagggaaagagagatggagctctatggccccaaaaagcgtggacccaagcccaaaaccttcctcctcaaagcgcaggccaaggcaaaggccaaaacttacgagtttcgaagtgactcagccaggggcatccggatcccctaccctggccgctcgccccaggacctggcctccacttcccgggcccgggagggccttcgaaacatgggtttgtccccgccagcgagcagcaccagcaccagcagcacctgccgcgcagaggcccctcgggaccgggaccgagaccgggatagggaccgggagcgggatcgagaaagggagagggagcgagagagggagcgggaacgtgagagggaacgagagcggggtaccagcagagtggatgacaagcccagctcaccgggggacagctcgaagaagcgaggccccaagccccggaaggagctcccggacccctcacagaggcccttaggcgaacccagcgccggcctcggagagtacctcaagggcaggaagctggacgacaccccttccggggcaggaaagtttccagccggccacagtgtgatccagctggcccgaagacaggactcggacctggtgcagtgtggtgtgaccagccctagctcagctgaggccacgggcaaactggctgtggacaccttcccggccagggtgataaagcacagggctgccttcctggaggccaaaggccagggtgccctagatcccaatggcacccgggtccgacatggctcaggcccccccagctctggggggggcctgtaccgggacatgggggcccaggggggaaggccctccctcatcgccaggatccctgtggccagaatcctgggggacccggaggaagagtcctggagcccctccctgactaacctggagaaggtggtggtcacggacgtgacctcaaactttttgaccgtcaccattaaggaaagtaacacggaccaaggcttttttaaagagaaaagatgaatgctgggtgggtgtgtccaggaggagagcaggggagagagtgagcgtgagcttggcatagtgatttttatttctgggtgggatgtggccttttggctggtcccgtccctgatgtcacccccaccccaccagcccctttcatccctccttcctccccctcagtttttgttggaaagattatctctagagttatattttctattagatgtaaatatgttatttaagaaaaatatctaaatatatatatttcaactcgaaaaaaaaaaaaaaaaactcg

SEQ ID NO: 1401 - DNA, 1170 bp, Homo sapiens
atggagctttcagcggtgggggagcgggtgttcgcggccgaagccctcctgaagcggcgcatacggaaaggacgcatggaatacctcgtgaaatggaagggatggtcgcagaagtacagcacatgggaaccggaggaaaacatcctggatgctcgcttgctcgcagcctttgaggaaagggaaagagagatggagctctatggccccaaaaagcgtggacccaagcccaaaaccttcctcctcaaagcgcaggccaaggcaaaggccaaaacttacgagtttcgaagtgactcagccaggggcatccggatcccctaccctggccgctcgccccaggacctggcctccacttcccgggcccgggagggccttcgaaacatgggtttgtccccgccagcgagcagcaccagcaccagcagcacctgccgcgcagaggcccctcgggaccgggaccgagaccgggatagggaccgggagcgggatcgagaaagggagagggagcgagagagggagcgggaacgtgagagggaacgagagcggggtaccagcagagtggatgacaagcccagctcaccgggggacagctcgaagaagcgaggccccaagccccggaaggagctcccggacccctcacagaggcccttaggcgaacccagcgccggcctcggagagtacctcaagggcaggaagctggacgacaccccttccggggcaggaaagtttccagccggccacagtgtgatccagctggcccgaagacaggactcggacctggtgcagtgtggtgtgaccagccctagctcagctgaggccacgggcaaactggctgtggacaccttcccggccagggtgataaagcacagggctgccttcctggaggccaaaggccagggtgccctagatcccaatggcacccgggtccgacatggctcaggcccccccagctctggggggggcctgtaccgggacatgggggcccaggggggaaggccctccctcatcgccaggatccctgtggccagaatcctgggggacccggaggaagagtcctggagcccctccctgactaacctggagaaggtggtggtcacggacgtgacctcaaactttttgaccgtcaccattaaggaaagtaacacggaccaaggcttttttaaagagaaaagatga

SEQ ID NO: 1402 - DNA, 25083 bp, Mus musculus
  misc_feature (4282)..(4772): n = a, g, c, or t.
  misc_feature (18040)..(18567): n = a, g, c, or t.
ccttcttttttgagccagagtctctccctgaacatggaacccactaatttcttactggctacaagtctctaggatcctctgtctctgcagccatgggattatagaagctgccaggtttttacaagggttccagggataagaactcaggttctcatgcttgtgtgggaaatactttactaactgatccaaatgtctagccgctggcctcttacttctcaaggggactctgtaagtagctgagatgcagagagtcagtgaataacatcgggatgtggctggagcatgctatgtagcaggaagcagtggcattgccaagagctacctcgagcccaaagggcacagtccaaggttacagtctgaaatacggggatccctaagcccgaagttttgcaaatactggagtctctcgattcggctcttcctgaggcaccccagtctcagccggctctagcgatgtcttgattggctggaagattgctgcttcttgatgtggtggtgattgcttccgaaagatggagtaatagcaactgctatcatttctgagcattttctaggcaccgccattgtgcaaagcgtttttgcacatattatcccaccgaccacccctataagatgaacaggcaacccagtgatattggccctgctctgcccccatccacttctttttagaacctccatgtgacagagaaattgaggttcagaggtgaagtaacttcccccaaatcacacaatggcgttctgtctacataactcccatgtccattctcctaagactcaaagggactctgtaagtaactgggatgcaaatgatagcagaggaaaagacggatctgatacacgttcctacaaaacctgatttgtttatcgctaaaattactaatagaacaaactggccctgaaaagtcccaaatgagtagacaaatggtggagcctctctcacttcagctcctccacagcaccccagtctcagccaatctctggaggatgtcttgattggctagaagtcagatgcccatgacaactgaacatttaaagaattttccatgtgagctgaaaccatattagaagagagctttatttccgtgactatcgcaactaacaagatgtatgttgcaactcagcttccagtgattaaaacaagaacaaaagtaaattgaccttgtaagcattctccccgtgtgacacttcactcgtagcagaagtccactgtagcaaaggcatgtagtcatagtcacgtaggactcttcttccctggaaaagaatgtacttgtaaatgtactaagaagaaaataaaaggggggttccagtgaggaaaaataacctatctgtggtcatgtttatcacgcagactgattcagacttctgacatccttatttcagaaggaaagcttgggaatgtctaaacttccgggtatttaatattttgagggtagaggagaaggtacagtttagtcttgctgggtagggatcaaacaaagatttctttagctctcgttctacacattcgaattgcctcagagtagctgaatcttgcctgaacgtggcagttactggatgctatgggaagataccgtaaggccatgattgctttaaaatcactcataataaaaagacataaaaaacacattttgaggcttgattctaaatgttatacttaaatttaggcgacttaattgcccatagaatgggaatgaagtcccaccagtaggcagtaatttcttacagccatggtgtgtgaaattgaaatcttaagatatcatcatatcaaagacgtaccttctcaaagaaggctccctccaaagagttgtgaaagacaagaaattgacccaaagtcatgaaagtatctccctccgcccccttagcacactcaggtcaaagcaaaagcacaattggccattccaaagttacctcttagaatccaaggagatatttattttaataactcattccaatgctatgggaaattggagcaacaacaacaacaaatacacacacatttaattacagatccatgggtcacatgctgggtacatagttatatatatgtatatatgcatacatatgcatatatatgtatatgtatatatgaatacatatgcatatatacagatatacatatatgtgtatatatgtgtgtatgtatatatatatacatatatatgtatatgtgtatatatatatatatatatatatatatatatatatatatatgctcccatttcattagagatccatgtaccacatgatgggtgtatagttccatcaatccttacaccaaaccctctagttagtaaatcccattattcccattttactaacaaggatgctgaaagtgtaaattctgcttgttcagctgagttcacatgatggtaaaagggaggttacaatacaggcaaactcctcagccactttcttcatgccgtatcttgaaggtagttttcctagtcacatgagctgataagagtctaaagcaaccccaggaaatatggttctagtggctcggcattaaaacatcattattaagtagatatactgctaatcacaacccgtgtgttttcattgtttctttttcttcttttggttttggttttgagacactgtctcctgtagcccagactggcctgtgacgaactttgtaggggaggatgacttagaatccctaatgctcctgccctgcctgacctgggattactggcctgtgctaccactaacaatgtttattttcacttcagatagaaatgaaagtagaataacaagttatgtatttatcatataatttaggcttgcctaaacattgtaaaaaatttgttttttaatttagaaaaactaaggacttaaatagaaaatatctttttatacactgaaggtgggttttggaccaacacgagggcaggcgcacaaacacagattttaattattccctttcagtatacgtgtcaggacatggagagagagggaaatgacacgaatctgtgggtagtggttcaggctattgctagggagaaatcagggaggactttgctcagtacggggaatccgggaattcatttctgactatcatcttccggggtgagctggtctaggttattaaagcaatctttaaattggggctgaaatgcctatgtctttgatccgggctgttcttactaaacaatggattctgagagcactcgggactttcctctttacaaacctgaagactgtcatcatcataagctaacgggccttgaacgatcatttctggactcagtttcaaggaactcaaggcccagggggacctaggtttttctcctgaaaagtagctagctggaatccatctcttcccttctgtatttctttctccttctagaacttgtcttcaagcttgaaggagaaacctgcccttttctttgttttatataagacaaaataatagtaagtaataactgaaagtctttttatcgggaaggaacttcctccggtccaagcaagtattgctgctgatactttacagagagggccagcctcaccgctggagttcgctctttgaaagaggctaggggagggaattctgccgccagcagatggagaggagacccggacaacgtggtccctcccagacaccctccctgcgggattagctgcccccagctctgctcaggcgcacctagcgcgtgaggttcctggtcacacagcttgcgcccctctctggagagcagtcgcagctactagcttgccgccagcagagccgcactgtctcgggcatcgcagagcaccacgactgtggacttgggacctcgaacccgagacgagcgcgcgctagccagccattagcaacgcttgcatttctgcaggtgcttatttcacattcttgtcttttctttcctgctggaacgggcgagtggttactttcagcctgaggccaaagggaaaggcagaagaaggggaactctgaaaaagacagtttagtggcagcgggattcttgccccaggagaggggctcaggggagactctcggtctctgccgcgggcccctttaagaagccaagtcagggctgccgctgtcgccgttgctgctgctgccgctgccgccgccgccgccgccgccgccgccgccgccgccgctatttggattgctaatccccaggagccccgtttaaaaaaaaaaaaaaaaaggaagaaaaaaaggggggagggggcgggcagctgtctctttaaatgtgatttccttctattgtatttgaatcgtgatcaggaaaaaggaaatgaaaccagagacagagggaagctgagcgaaaatagnnnnnnnnnnnnnnnnnnnnnnnnnnnnnnnnnnnnnnnnnnnnnnnnnnnnnnnnnnnnnnnnnnnnnnnnnnnnnnnnnnnnnnnnnnnnnnnnnnnnnnnnnnnnnnnnnnnnnnnnnnnnnnnnnnnnnnnnnnnnnnnnnnnnnnnnnnnnnnnnnnnnnnnnnnnnnnnnnnnnnnnnnnnnnnnnnnnnnnnnnnnnnnnnnnnnnnnnnnnnnnnnnnnnnnnnnnnnnnnnnnnnnnnnnnnnnnnnnnnnnnnnnnnnnnnnnnnnnnnnnnnnnnnnnnnnnnnnnnnnnnnnnnnnnnnnnnnnnnnnnnnnnnnnnnnnnnnnnnnnnnnnnnnnnnnnnnnnnnnnnnnnnnnnnnnnnnnnnnnnnnnnnnnnnnnnnnnnnnnnnnnnnnnnnnnnnnnnnnnnnnnnnnnnnnnnnnnnnnnnnnnnnnnnnnnnnnnnnnnnnnnnnnnnnnnnnnnnnnnnnnnnnnnnnnncgcgcccgcagcgtgcccttgatccctccgtctcccagggttctctttcctcgcgggtgactctggaaacaccgagagggactgggcggcggaagctgtaactgggatcgaccctgcggaccgctccgggctatctggaaagctccccaaacctttaccagggccagaaagtttgcccaggagctggcacccggagctctgaggcacaggtgcagggcagggagagtggaggacaagattctgccttctcccttttcgtcccaccctctccaggttcccttcctttttgtccatttggccttggaaaggggggcatcccaactagaacatcccggggtctccgacgtcgactctcctaccaggcccggagtagagcggacagttgatgaggtccgcttgtccacctgggaactggttctggcctccagagacttctagaattgctaatctgtcgttcctcccggtacatgttcgcccctcccctgagtttcctagtgcgggcatgtgaacctcgaaagttagtgcacatttttttttctgtctagtatgtttttctagggagcagaatctcatcgaactctcagaagggctgtgtgtgtgtgtgtcagcgaaccagagctttaatgagcatgtactgtctagtgctctgagctttgcgctggtttgcaaagaacagccccccctcccttccccattccacagcctgtaccctcctagcccattctctagccttaacaaggggagccaggaacgaaggtatcggttttttttttccacgtccacacaaatgcccttttaagagtcattagctgtctggttttgagtttttattcctttgaagtcctcatctaatcctttgaagggatttgttaacacaagaccaaaggcactgctaatgacttgtccgtttgggcttttaagatgcatttgttttggtggggttttgccccccttttcttttcttttcctgctttaaaagaattgtgctttcctgctggagttttcctattcacccccccccttcaatttcagccttctgtggtgtttatttacctgggctttaccctcagccagcagcataaaaacccagcgtgttctcataaaacacaggaagtcccacgatccagcaagaatataaacatcactcttcagtcttgaaggttaagacactagctcagaaaggagctaggtttgttggcaagaggaccagcttccttaaaatctcaggagagaaacaacaaccctttaaagagtcagtgtctatagcttgttcccttttaagcataagcttagaattacatctgggccccgagttttcagaaattggacaagacataagattacacagttggggaggcagtctggtgaactgctgtttactggctccctatcagcacaacctaaccactaatcctttattagatgttgaatctacagagtttggcttcttaaaaaaattactaattacatgaatgtgtgtgtgcacctaagctcaggtcccctggaggctagaggtgaaggatctccctagagtgggagtcacaggtagttgtgagccatctgatttgggtgtggagactccaacttgggtcctttggaagaacagaaatcatccttaaacagctgagccttctctccagcctgggaattgtgttctgtaaaggaagtttactcttgctaaagttggtgccttttattgcctcagactagaaaactgaaaggtatctcatagctgtagtagtgagcacctacctagttcaggaggtccactggtagttcatctttcctgcagtatgtgtccggtaaaggaaggctgtaactgaagatggacaagccccgtgggaaatgtctgtggaacatttcccctctttctgggaaattgttgagaaatttttgccagaaaatcaaagctaaagagatactcaggtgtcatatttgggacaggctggcgggagaatatcaaatattaacttaaggtaaatctcatttagtctttggcttgaattgttcaacagaggtaatggcatgtcattaattatagaaagatagaccgagtccgaatcttgtcctgtctttatctgttgttctcagaccctcgtgtctctttctcctgcaactagctctcctgccagcggcctcactgagtgcttgctcaaagccagcttgggtctttaccagcttggatctccagatgcagatcggtccttgcctaggcacgtgcaaaggtagcgtgtgcacaggaagccagtattcatgaacacagatatccttcaccatgcaattggtgttcccttctgcttccctacaggtcattttaattctagcgaattttgttccagctaagtacagattcttctctttcaaagttggctgcaataacatccaccctctgggcatcaagcatgatgggagttctgtgagtgtttttgaaagcccactgtaaaaccttgagctatgcaaaggatggagattagattctgaattggtgcacttgaataggccaaggatcttagttaactttcaaatatgaggatggatgccttatatataccctatagaaacaaaggctctagtaggaacctgacagggtttctctttgtagttctggctgtcctgaaactcacactgcagcccaggctggcctcaaactcagaaatccacctgcttctgcctccagagtgctgggatttttaggtgtgtgccaccactgcctggcaacttctagtgtattattaaaacgatttaaggtcttagcccacctcacccataattctgtatacatgagagactggggcagaagaatggaaagttccaggacaacctgggcaatttagtgagatcttgtcttaaactttaaaaggaaggaaagggttttcgagctgcctcagctgctaaaggtgcttgctctaagtctgatgacctgagtttgattcctggaacccatgtgaagggaagagagaaccggaatacagctcagtggttaagagcatcccctgctcttacatgggacccaggttggattcccagcacccatactgggtggctcacaaccctctgtaaccccatctctagggtatctgaggcccatggccttctggggcacctgcccttgtgtgcatcttcacccttcccccccccccccacacacacacatacaattataaataaaaataaacctttaaaaacaatataaacaaacagaattgagaaagaagtcagtggtggagcacttacctaaagcgactagggacctgggtttgatcatcagtactgaaacaacaaacaaacaaacaacacctaaaacctgacttgatctttgtttttctcaaagaaactgacctgagcttcaaacttcctggttctaaaagaagatactcttatattttgtgctaaaatggtgggtttggcattagcatttagctaaatattgacaacggatgcttaatagtctcctagatagggtcacctgtagatgctggagtgccctataaacactcattccctgagtctcactgtccccaactataatgaagctgggcttcatgggtacaggccaattacgccacaaggtcatttggtaaaagtgccaaataaaactaagagacacagacatatcacctagggtactcaggaggaaattccattggagatttcataataggaataaaaaccaattaaaaaaatttttatactagatttttttaaaagcaggttttatttgaacagtgttccaggaacacatattacaaattaacaagcattaagtatcccctgtctcctatctgacatcacattcatttcttccatgccgttttctctcagtaaagttatttcttacatgtaaaacaaaagtggtcaggttccagggaggcaaagcaagcagaaggccctatgtgtgactttaaagcaaatttttacattagtgtgtgtgtgtgtgtgtgtgtgtgtgtttatctatgtgcatggatagaacagcctgctgtaattggctctttctttccgctgtgtgtgtcctggggaccacatcagatcattgggcttggtggcaagcaccctcacctcctaagcatcttgtgatcccctacataacactttttaaatgaaagaacacatccctcaggctcactgtgaacaccgtgcctggattgagactttggtatcaatttaattgccttccactctcttttaaatccattgtttggccccctcctccactctctttactaatttgattttattcaaactacttttgctgtggtgaaaaaagtttgaaggaaaaaaaaaaaccacatcaccactatcctctgtctgtttaagagctgcatcgtgacctagatttcctgccagagtcattcagatcttgtacttctttgagacagtgtctaacgcagcccagagcctccggatgatgctgataaacttgccatcctgctcctccaggttccacctcaggatggactgggtgtatgtccccactttaggtggtactggagaaatgaccgttgggcctctgacatgttgggctgtctctctacctatgaaaccgaatctccatccaaagactcatgcaggatgtatggaagaatgcagaacttcaatcggaataatcagatattgacggaactttctgtttggggaagagaaggcaaccaaatataatttcgatggctttcttccttctctacctttgattctgtgcagcgggaaggtctttgtagggtgcattcaacaggttatctgtagattgttagcacactggggggggggggggtcatcagatgctttggctgtgagcaactcctttggtcccaagtctattctttgggattctttggcagtgcctgtgtccaaagaaaaaagggagggagggctgggaagatggaggagagtaggaggggaaggaggaagaagcagattggatcagaggtgcctgcagagatgctggaatgtagtcaagggtccaagggctatctgtaggtgccttggacacctcctggtatcccgtcttcagtttttcagatgataaggtctctctagcccactcccgtctttatccaaggttgtctgtgtctatgcagtctgaatttgggcgtcctttctccttatactgctggaaggaaatgtagtgaggttccccatagaaccttgggcatgcagtgattcctgggactttgtgcttgtctcccttcaggcagcatatcctaatgcttggctcttccccagggaacccgtggatgaggtgctgcagatacccccatccctgctgacatgtggtggctgccagcagaacataggggaccgctacttcctgaaagccatcgaccagtactggcatgaggattgcctcagctgtgacctctgtgggtgtcggctgggagaggtggggaggcgcctctactacaagctgggacggaaattgtgcaggagagactatctcaggtatatccctcacacttctggggcacatccggggttggatacatagtctctagctcctgaggtgtctgcctaaggggcctaggctgtggaggctgagcttcagctgcctcttcagagaagccgtgagttcttcctctactgtggctatgtttgcagagacacatcactgcatggtaaatcaccaatgtttttaaaggtaagagaataaaaaacacggaattcagaataaggacaaaattctgggggtgggggcagaccaaaggatagggtttggagaagtgtacgtagggaaatatccagggaactaggggaagagagaattcatttataagtttcttgggtgggttctcatttagtactcaataagcatatgcatatgtgtagatagtctttttgttttgttttgttttggtttttggtttttggttttttgagacagggtttctctgtatagccctggctgtcctggaactcaccttgtagaccaggctggcctcaaactcagaaatccgcctgcctctacctcccaagtgctgggattaaaggcgtgcgccaccacgcccggcatgtgtagatattcttttgcacaactccagtattattgatgagaacttttaaaatagcaatgtgtccttgctagtgagcccccaagcgctgaatttcatagcaggaggctagccttcagcagctataaaggtgaagtcaggaggtttgagtcactactccattgcttcctagtgctggccttgggcaatgcacacaagccttcacgtcctgtatgtaaaatggggattgtaattgtacttacttctaaagttagaatgaagtacttgaattggtacataacttaagaaataggtggtagctgagtttataattgacaggtaccatggtgggatcacaaattattttccattataatggacaaggagatggtaacatggaaggcagaaatagaaagtgtacaaggccaagcgagacagaaacatttcccctgaatttgtgtgtcctggcacccaatgagtgcctttgtctggcgtgttctagcatctctagcttctatattagctgcactggaggtaactctgtaccccgtactgccagatccactcaactgttcagctgtcagttcttcgccatcctcctgtggcagaggctccactgagcgcgcagtccctgtgtattagggccagccagccagcggagagaagctcttcagactccagtgccctgggctgctaagcaggctcttccccctgcatgtgttctcggggcactgcacatgtgaaataaaaacaaaactgctggtccttctgaagtcaaaggaagcttatctgtccacccaaagactgaagtagcgtgcttagtctttgattgaaatcattgcagatgtggtggttttgggcaaatggaaaagagagcaagtaggtctgactgtcattttgttgaatttctttcttccttttttttttttttttaagtcataagaaaatagaacagagataaatacagacctggtttttactcaccccaggcctgccaggtccatcagaaagcagctgggtaaatgactcccgctgggctcctgcctccatccctgttgaatcatttgaatcttattaaacgaagtcagattcagtgaggtcaaaagagccgattcctccctatctccccggttttatagaacattcaggaagaaaggcggcgctgcctgggcttgttaatcttttccattttcaaaaaggagaagggaaaaaaaaaactagtctgggagagcccagtgttaattaacttgtgtcttggtgacacgaaataattcttctccctgctacattcccagacaacatgttaattaactctgcattagcgcaggcgttcccagccatcctttaatatttgtattattgttattaaaatgggcagcagaaagcttaaggctctgacgcctcttgacagcggagggatttctatttcgttcagggatggtccattagccatggatttctttactttagttctttggcatatccagagctattttatcaggataagttcagagtgactccgagggtcctccaaagagacccagtccctatctatgcctagaacagcttctctccatgagggtcttgaatggacaactcttgtctggtctttttgagacattcaacctcaaatacccaggaccccaccaccacccctcatccttctctcatatacaactcagacctgctactgttgcattgtgttaagtacacagcctggatccccttagatccaattttctcgaacttttatgtagggcaatcccctttagcctatggttctgtttcaacagctggcacctacatctagccagcatctgttgtagccagaactatgtagtctcaccagatcctggtaccaaagacaccccaattcctgcagcttaggggggagccaaggctacttggagacaggacttatacttcaggagtccccagacatcaggccaaagctcccactgaggctgggcacctgagattgcttcttgactccctcaccgttttctcacttaccctgaggacatcataaaccacttgaacataaatcctcccctgtggtctgttcctgggatacccagctaagatgaggattctgtgagccagaggttaatgcacacattaacggccaagtgctggccggttttcatcactgttagcctttccaagtccatgagttggggtgggctgccaagacctctgcctccagtctcggcttacagtgtaagcacatgagccaggagaggacatgtcattttcttgggtcacctacctagttagagattctgggacctgggcttatctcccagacatcagtcctttgtcctcccgttagctgcttggtgtgttgtaatttgcccccgacttccctttaatgagctcccgctttcttaaggtctacacctcaggcactcagactcatttgccgcacactgttctctcagtcgtgtgtctctgctcagccccaaacttaacttactcaacagtcaggacaccaccagaatgctctttctgctctgtgacctccgatggggcatttgcctacagcgccaccgtctgctctggtaagatagagtgttctcccccattgacaagtctgcttccagcacagaaagtgggatccagaacagagatgacctctgacctcgctgcggggagctccctctctgctcactggccctgcttacaggccatccattttggccaaatgttgcaggctttggtggctgtccttacctctcctacaacctcttaggatgcaccagtccattctctcatttttttaagttggtacagacttctaaggagagcaagcatttactggaagctacgtgcagacatgctatgttacaagcactatgtaaaaaggaccctgctgcaacagttgagagcacacctggaatgtgatcacatagccagagttggctcagtcattgacctctgatactctgacacgccctacatgtcacactaacatctaagcaaggtagatgatggggttgccaaaccaccttctggtcctcatgttcttcttccaggcaggcttgttttcaaaagttagccatcactagatcattagtacagtctgctgagccttctcttctgtgtctctgtcaggtgtagagatagttgggaatttctgtttctaacaagttcctggatgctgccagcccctgaccggctccttttcaaccactgcagtgactccaaagttgcctcccacacctcaacactaagtgtcgcttgcttaagtgactgatgctagggagaaacttgatttagttgtgaggaaagtcacctctccagagagtcacgctgagtgggcaggaggagcatgaatgaagagccactgtgcatcatggagagatcctgtttgtcctctgggtctctgaggcatgattgtggcactacttgtctcccgggacacccctgtctcctggcagctgggctccagtgaatggtcatgtggacatggaatttgcagcttgacgggtaggaggtgaatcaaggcacactccccaaaaggggaaattagtggctgttgacatgagagtgaattcctggtgacccacccgtccaagggctggccccagctcctcttctgcagccagagttcctctaggaaagagacacagactacatgccttacttcttacacgtcacttcatctgcttcttttccatagctggtccacacagcctagaggcatggataaaagtagggaaatgcttggggaggcgaggaataacagcaagcaaaatgtcatcgtgtctcccccccccccccagggaaggattcatgggctattaattgggttcatctgtcttgcttatctgtttttatgtttagatagcttattactgtgtatcccggtcctatgtggaccttgccatcttcctgcctcagcctcctgagtactaggattactgctgtaatccactgtatccgactaggtgcagcattgcctaggttttttggaaacctgatagattcacatcagtttatcatctcacatcaatctatcatcgccagccgccatctttctgttgtccccgcccctgtctcttagcgtttttgtctctgttttttttccttttcttttcaccccaggctttttggtcaggatggtctctgtgcatcctgtgacaagcggatccgtgcctatgagatgacgatgcgggtgaaagacaaagtgtatcacctggagtgtttcaaatgcgccgcctgtcagaagcatttctgtgtaggtgacagataccttctcatcaactccgacatagtgtgtgaacaagacatctacgagtggaccaagatcaatgggatcatctaggccagagtcccaggcacctgtggggaggtgttcagtgaagacgccgtctcggtgtggtcttcactcttaggctctttgggaacctgagggtgggtgaggcatttcttaggagattatggactcttcctgggcactaaagacatagcaatcacatgacataatgcaaaggctgagacttcagtgacaaaaaggaccagcccttagagagaatttatggtcacaggctagccatagtaactgacaagattagtggaggaaatatttggggaccagcatgcactgtgccatcctgataggcttccccaggtaactatcgattagatgtgaccttggtgttcatggactagagttgtgcaattaattttttcctggctttggtaactaccctgttctagtcacagtccttcacactaggaaaggaaagagagaagaaatagtcactctttttttctttctttcttttttccttggtcaccttcccgtggccttaagctctggagccaagggaaactgcatggaggtacatttcagttgggaatgaaatccacatctttcaaccagacaaatatttatagcgatgttgatgaatcactgtttttagacaccttcattttgaggtgaggcgccccacagattgtttctatacaaatgtaaatcttaaaaaaaaaaggtcaaagttgttcaactattttattatcttagattatatcaaagtatttgttgtgtgtcattaaaaaaaaaactcgattctgaagacttaataaaaatgacaagctgaaatgcagtgctgttcttgatgtgaaatgacttacaggttgggccagcagggaaatggtttgcttttttttttctctttggaaaggtgaagtcaatacacagtttatttctaggtcaaataaaagcttccatttattgcaagggtttatatgaggtttatataggtttctgtattaccagcaattatgtaacaggccatcacgtagctcagagggatatagaataattaagttggtattgtaaaatgtgcatttcacgttggcattgtgtggagtgaggggaaggcagggagagcattgcctttgggaaacttgtaacctagaaagcacacaaatacataaaatagattccctttgggagagaaggtaattacctggcttgaaatgtggcaaagatgctgagcctgacatttctattttccaggatgtgtgtctcagggtgttttatgacaagtgcttaagaggaccttactttgaggatttaaagctggccccttggcttgttgtgtccctgcacccccatcgggggcgttatctgacttcaagcgccacctgctggtcattcctcaacccaccagcccaagggtgtcccagggaatgacaaacctccatgaaggatatattttcaattatttcataaaaccgttggcaaacaccagtgagtctagatgtgtttaattatcaagatgtcagaagcatgcagctaaagctatgtttaattaacttgaaagtactttaacgtctctgtcattggagtttatttttccctctttaattctagagaaggaataatgaagcaatgactgactctcctggcctgtaaaatgctcaaagaggttgggagatctgactgcttaaggtggcctatttaaaacaaatccaattatatcgtaccacagcctaggtggcccgcaggtgctccctcagagggaatgtttgctctaactcagcagttctcaaaccaccgtccctgagcctggttaccagcatcagcatgaacttgctgggaacagacccagcccacaaggcacacagaagcagaaactcagcagggggctgcctgtcctggaacagacctgggggtgactgaagaacagacctgggggtgctctgaagcttaaaaatggctgttttaccacaactcccagctagcaggatcacacgctcgaagttgttactattcaggttagtatggttagtattttggttaaccaccgaggaactcacacacgtggacaaacactgcttaccaaagggccggaaactgagactgcaccttgtttggctaacagctggctcatccttcatctgacacacttcatcacaattcagtctaacatttttaaatccatgctcttctgtttaattataactagtcagatatggcagtgagcttacaagagtggaggatccctatccaaagactaacatgtcaggcatcctcactctccctggagagctagacacaggatgagcgtgtgtaaagaaggtacatcgtggagggctgcacctgtatttccatcacgaacgaagccaaggcagaaccagccttttatatttaatcccgttcttaagccgcaagctgctgccgatatgtgatttgtatgttcttcttccgcataacacataaattaccaagatgagcccgctggatcctagcaggtatttccatttgagcctgtgcagatatttctaatccgtacaatacctgttctgttatacatcttgcaagtatatgtgtgttccaatttatgatgttcaaaattgaaccaaagccttcacgcgacctaggcagatgctatagaggttagcctagtgttttaaccacgccagcagcgacagtaatagtaattattgctatgtaattgtttttcttggatttttgttggagacagagtctccttgttgcctagaatagcccagagctcactatataaccctggctgactctgaacttcttactcctgagtgctagtaacatggtcatacaccaccacgcttggctaaacccagtattaaataaaatgatctctgcctgggtaatataaactttattgctaaccccagctataatagtacaactcatattaagatttatgaggtaattagtccagatcgtcaccattctaacaaagggatctctgataccaccttctctctctctctctctctctctctctnnnnnnnnnnnnnnnnnnnnnnnnnnnnnnnnnnnnnnnnnnnnnnnnnnnnnnnnnnnnnnnnnnnnnnnnnnnnnnnnnnnnnnnnnnnnnnnnnnnnnnnnnnnnnnnnnnnnnnnnnnnnnnnnnnnnnnnnnnnnnnnnnnnnnnnnnnnnnnnnnnnnnnnnnnnnnnnnnnnnnnnnnnnnnnnnnnnnnnnnnnnnnnnnnnnnnnnnnnnnnnnnnnnnnnnnnnnnnnnnnnnnnnnnnnnnnnnnnnnnnnnnnnnnnnnnnnnnnnnnnnnnnnnnnnnnnnnnnnnnnnnnnnnnnnnnnnnnnnnnnnnnnnnnnnnnnnnnnnnnnnnnnnnnnnnnnnnnnnnnnnnnnnnnnnnnnnnnnnnnnnnnnnnnnnnnnnnnnnnnnnnnnnnnnnnnnnnnnnnnnnnnnnnnnnnnnnnnnnnnnnnnnnnnnnnnnnnnnnnnnnnnnnnnnnnnnnnnnnnnnnnnnnnnnnnnnnnnnnnnnnnnnnnnnnnnnnnnnnnnnnnnnnnnttcctctgctctgaagcaacttcttccattgcacctgcacctcagcctgtggttctctgggaagcttgggttcccagggagctggatagagcaccaggtgggtggcttagcagctggaagtcttgggttctaattacagtgacagaactccttagtattcctcctggcgcttcctgggccagatgctcacccaggtcttcctaacaattaactccttgaattcagcgagccctccccaaggcttctgccccttgctacctgtgtggtactgtggaggaccttgaagccccggcaggctaagccacttgtctgaggttctccaacccagcaggggtaggctgctttctctgctcctctcaacccagtgccctgctgccggcccttcagcctcatctcgctacagaaagatgaacggaacttaagtgagggtttaccagggagtagccattttgctttatgatcttatgaaggaaagcttgtgtgcccatacacacatatcctgagccagcaacatgactgagtttatattgcaaatacatattgcaaatagggggaggggagaggacagggggagggaaggtagtggtacattcctgggaaggctagagcaccatctccttttatcctggtgtttccagatcacccagctgacaaggaacatgctgatgttatcaacatgacttttgactctcctctaagtttccccagcatttattgcctagcgtgttttattttccacactgttccctaatttaaaacttcatttggtaaggctggagcgatggcccagtggttaagagcactggcttcttttccagaggacccagcacccctatgacagctcacaactgtatgattctagttctaggggatccgacatcctcacacagacatacgtgcaggcaaaacaccaatgtacatgaaataaaaataagtttaaagtcaacaacaataacaacaacgaaacccatttcatttgggagaaaggccctctctccagataagcgaactcaaggttctgagcccctggataaggtcactcactctgtcattcacttgctgttgggcctcagacaagcgagttcacctgtctgggtctcagtttcctcagtaagtgacaagaagtagaaacgaccacagagggctctaatatgcttctgagtttgtgtttataaagctcctagcaccacaagccagagttacacgtgtggaaaggagtgtttatggtatatactgagaaagatggtagctggtgagccaatttatagggcagatgggcttttctgtaattaaattaattcgatctgtttatgtattatatgtgcgtgcatatgcatgtgtacacatgtgtgccacactgttcacttgcaagtaagaagtcaagtcgttggagctagttcttgcctctgccatgcaggtcctgggtcaggctcagcagcaagcgttgttacccactaagccgtctccatggcccatgatttgttttggggtaagggaaatcttattctttgagtatcttaaagctttgaaagatagtgaaagtctgtgaaatgttcagactaaataaaggctcaagagacctgactactgcagttctgttctgaatccagtagtcttgggtaagtaatgctacaaataaataaaattaattaaacaaacaaacaaacaaaacaacagcacagcattagggactggggaaattgttagtgaagcactagctaaatggttctgagacccgaacttggttctgaagagcctgtgtaaaagctgggaggggctggtggcttccctgtaatctcagtgaatgggaggtagaggcaggagagttctcagagcaggctgcctagctagactagcagttaacagtgagctccaggttcaagggagaccctgactaaacattcaaatagagaatgatggaggaagatgtctgatgtgctgagtagtctcatgtcagcttgacaggccagagtcatctgagagttggaatgaaaatgagagttgagaaaatgcttccatgagatcaggttgcaggcaagccaggagagcattttcttaattggtgaatgatgtgggagggcccagcctattgtgggtgtggaccctgggctgatggttttgggttctacaagacagcaggctgagccagccatgaggagcaagccagtaagcagcacccctccatggcctctgcatcagttcctgtctccaggtttctgactccagtccctgcctttgcttcgcatggtgaactgtgattcaggctatgttagccaaataaaccctctcctccccaagcggcttttggtcacagtgttttgtcacggcaatagtaactctaactaagtaatccatcttcagtcttaggccttgacatgcatgtgcatgtgtgaccctcttacacacatgtatcctcctaaaacatcattgggttagatgagaaagttggaacgtgaggaggcatattgttgaaaaaaatgtctcataaattacctgctgaagctgatagctatatcgtgggtgtataagagcaaaaacatactgaaatatctaggaatgaagggccataatatatttatttccaaatggttgaagaaaacatatgcatgtgtaggagtgtttgagagaagagagagtttgaatgtgtatatagagatagagaggaaatggtaagaaaatgggggagaggagatgtccacaaaaaggttaatgtaggcaaataatagctcagtgtgctatttttagtcttgaatctttttttctctgactgggaagaccaaataaaaagttctgctttgattttaaggaatgttagcattttcttgtttgggcttctggttcaattgggggaagaagaaggcatcagaaaaaaaaatcccagtttggaattcagtggctcgacagtgttcattcatgacaatttcaatgtatagttggctttagaaataatctatgccaggaatgagtggctgaggcaggaggattgctgtgtgtttgaagccagtgtgggctacagtgaaattttgtctcaaaatccaaacacatctaacagaaacaagagttcctgcaaggcagtggtggcgccacctttaatcccagcacttgggaggcagaggcaggcagatttctgagttcaagtcctaccaatacttgctgccaccaccacacgtagtgactatggtatctttaggaggattcgtttagtgccaatttctcaggctatttcttataaaatgaacttgctaaaattctcaaatttcctttgtaattaggatccaaatttcattatttgactggggaaatgtgtgtattaaggcaagatcacctctgcttgtgtgtcttagaactgacttaaaacgacgtttcaaagcactagatgaggctgctctctaccagtggctatgaattaattcttcattaattaaaaaaatcattcctacaagcaaatagaatctttgaagctcaatcaagttaattttcattgtcgaattgtgatgcctttgaacttggcttattgaattagcctattggatggccaccttgaagatggttctgttggtgactctaagcccagcagcctctcagtggctcaacgtcccaccctgtcccattcatcttagttgcttaatgagcagctacaggcaaacactccctttccgttatatagtagctaaaagagatttgtactcaatgtaatagagacaacattgaaatcaagaatcctgatgttgccactaatgaggccgccagctctgtttcctcatttgcaaattgagggatttagatcatctctaggaatctggtattcacgtttcttagaaggtattattttattttacatgaatgggtgttttggctttgtgcatgtttgtgctccatgttgaaacttggagactgaggaggccaggagaggtcaataggtctcctgaaactggagttatggattggttgaagccaccatgtaggtgctgggaatcttccaaaggcaggtcctttggaagagcagccaacactcttaacttcttaggcatctgttcagcccctagtactcagaatttgctttacagacaggcaagtattcaaatgaggagcaagcatttgctggcagttggtctgcaagatgccctaaagatttttgttttctgcgtttgagccgaatgaagtctctgcccacaccaaataagaataatatgccaaagatatagcaaagttgatgaactatgacttcgaagaccagttcacaaagaccgtgtgacttgaacattgtcatttgctgtatcatttattctggacttgtcaggtcatagagaccttctaaagccccacatggaaggaaatccatgtccgtgaagagtgactgcagcaacctgctctgccaacactcatttaccaatcttggaaatgagctacctagaaagtgcatcctctctgcccagacaaactttcagatgactgtagtcccagtttgtgtcttgggcataacctcccagcacgtcccacatcaatgaactaagctccccccgaattttctgacccacagcagatgtgtaacctagagcattattacgaggtcctgagttttgtactgatttgaagtgtatcaagcggagatgcttgactgttgtgggccacctctgggtgtgtctgtgagattgaaattgaaaaagagaagatttaccctgaaggtgggtggcaccattctaggggctagggagctgagttaggagtatttacctctttctgcttcctgattggatacaatgtaccgactgacccatgttcctaacactatgccctccccaccaagatggactatattctcaaactgtgagcctaaataaatccttctttctgtcaggtattttgccatagcgatgaggaaagcaactaatgtacaagctataattaaaacacatttagtaacttttatggcaatttgatggagcaattttacatctaaattactccagtgataaaaaatgtggggcttttatttggtatgcctttttaaaattgtatgttccttgtcttccagttttttatggtattgcacaaaagcatcagtggatggtagattgaagaattaaaaaataattggccccattccatagtgagtttgaaagcattgatccgaatggtaccatctttgtgggaagttgaaaggcttttaaaattatctggtctaacctcccactcagtgataaattgtctcttctaggttttttttcccctggcaataaagttttgattcttggcagtgttgttacaatcaatgttactaaatgtgcctctctctgagtacttgccatgtaaatgcctaccctgggtatttatggtctgtacagcaacactgctcagcaggtatttccagcccagtctcatagaagaggaaattgaggtttagggtaaaacagatatttttaactaactctggccatctgattgcagactcaccgtatgacatctgggttcttttctgtatttatacccaataaacttcattttatataacaaaaatgatatgttctttctgatggctggaaattatacttattttaagaagaaagggacagaattggaatcttaaggtaacccatgaaaacagagtgttcaggggctggagagatggtttggtggttaagaccacctattgcttctccaaagaacccgagttgacttcaattcctagaacctactgctttggtgctaagatgagagaaagatggcagagagagctagaagctggctttggttgccccagcagaaacaagagaaactctgcctcaaaaacaaggtagaaagagagaataattcctaaaaagccatgtatgatgtatacacacacacacacacacacacacacacacacacacacacacacacactacatacacacagttaaaatgtataaaaagacaataatcatttctaccaacccgcataccacaaagatttgtttgatgctaataataaaatcttggaacatatctgtcacatagtaaatgctatgtagtcagccctccatatccataggttctatatgcaaagatttgaccaaccacagaccaaaagcctattttctaaaaccctgactctgtgtagattggttcagtagttaagagcatttgctgttcttgcagaggacctgggttccagttcccaacacccagatgatagctcacaaccatcagggactctaggtccaggggagccaatgccctcttctggcctccaagtgcactacacacaaatggcacacctatatgtaggcaaaacatccatatacataaaaataaacacatcaaacctgtatctatactgatcatgcacagaccttttcctgtaattggctctagtagagtacaataactcttcatatagtttcacatgaagtaacctagagatgatttatacaggaaactgtagaagttatatgcaaacactatgctatgtatgccgttttacacaaagtgcttaaacattcacagattttggaatgtgagtggagctgtaaag

SEQ ID NO: 1403 - DNA, 1552 bp, Mus musculus
tgagagacagagggaagctgagcgaaaatagaccttcgcgagagaggagggagcctggggagagccgcgcggtcagctccccgcccccaggccgccgccccctcactgcccccggcgccccgaccccggcgaaggtgcgaggggctcggggcgaccgggcggagcggctactgcgcgcgatcgggaccgggcggcggcggcggcggctgtggtgacggcagcgggaccgggatggaagggagcgcggtgactgtccttaggcgtggaggggcgagctcgccagcggagaaccgagcaagaggaggcgcaggagcggcggcgcccgagcacccgagggggtccgagtccaggcagctagccagccacgcgccacaaagggagcgcccccgccgcccggcacgccgcccccctccccaatgtcctcggccatcgaaaggaagagcctggacccgtctgaggaacccgtggatgaggtgctgcagatacccccatccctgctgacatgtggtggctgccagcagaacataggggaccgctacttcctgaaagccatcgaccagtactggcatgaggattgcctcagctgtgacctctgtgggtgtcggctgggggaggtggggaggcgcctctactacaagctgggacggaaattgtgcaggagagactatctcaggctttttggtcaggatggtctctgtgcatcctgtgacaagcggatccgtgcctatgagatgacgatgcgggtgaaagacaaagtgtatcacctggagtgtttcaaatgcgccgcctgtcagaagcatttctgtgtaggtgacagataccttctcatcaactccgacatagtgtgtgaacaagacatctacgagtggaccaagatcaatgggatcatctaggccagagtcccaggcacctgtggggaggtgttcagtgaagacgccgtctcggtgtggtcttcactcttaggctctttgggaacctgagggtgggtgaggcatttcttaggagattatggactcttcctgggcactaacgacatagcaatcacatgacataatgcaaaggctgagacttcagtgacaaaaaggaccagcccttagagagaatttatggtcacaggctagccatagtaactgacaagattagtggaggaaatatttggggaccagcatgcactgtgccatcctgataggcttccccaggtaactatcgattagatgtgaccttggtgttcatggactagagttgtgcaattaattttttcctggctttggtaactaccctgttctagtcacagtccttcacactaggaaaggaaagagagaagaaatagtcactctttttttctttctttcttttttccttggtcaccttcccgtggccttaagctctggagccaagggaaactgcatggaggtacatttcagttgggaatgaaatccacatctttcaaccagacaaatatttatagcgatgttgatgaatcactgtttttagacaccttcattttgaggtgaggcgccccacagattgtttctatacaaatgtaaatctc

SEQ ID NO: 1404 - DNA, 477 bp, Mus musculus
atgtcctcggccatcgaaaggaagagcctggacccgtctgaggaacccgtggatgaggtgctgcagatacccccatccctgctgacatgtggtggctgccagcagaacataggggaccgctacttcctgaaagccatcgaccagtactggcatgaggattgcctcagctgtgacctctgtgggtgtcggctgggagaggtggggaggcgcctctactacaagctgggacggaaattgtgcaggagagactatctcaggctttttggtcaggatggtctctgtgcatcctgtgacaagcggatccgtgcctatgagatgacgatgcgggtgaaagacaaagtgtatcacctggagtgtttcaaatgcgccgcctgtcagaagcatttctgtgtaggtgacagataccttctcatcaactccgacatagtgtgtgaacaagacatctacgagtggaccaagatcaatgggatcatctag

SEQ ID NO: 1405 - DNA, 53795 bp, Homo sapiens
tcgaaggctccaacgatgtcattaggacttggtcttcctgggcctctcttccttgccctgctctatttcatctttcagtcttggctccatacggtggcaagatagctgcagcaacatcagctacccaaggtgacccttctctgaaccaatcccagtggcctgggaggcaccatgctttgattagccaggcatgctcacgtggcctactctggaagttggatgtgggaactccaccaagaacacagggactaagagtaaggaaggaatggctttccaagggactatcaagggggagagatgggtgccaaggagccaaccatgccaagtaccaagagatgagggggtgctatgttcagattgtagctttgtgctgcacctttacacctccctgctctggtggtgctaacccacctccctggcccttctaaatcctgggaagggggactcaagtccttattcagaactccagcagcaggctataaatcctgtcccacttgcctgagccctttcagccccttcactcaaggctagtttccagattaccctaacctggagctggcgccatgtcctgcaggagacgggagagggcagagggcagcttcgggctcttaggtagaatttcttctttttaaattttaattattatttttttgagacagagtctttctctgtctcccaggctggagtgcaatggtgtgatcttggcttactgcaacctctgcctcctgggttcaagtgattctcctgcctcagcctcctgagtagctaggagtacagtcgcacaccaccaagcctggctaatttttgtatttttagtagagatggggtttcaccatgttggccaggttggtcttgaactcctgacctacattgatcctcccgcctcggcctcccaaagtgctgggattactggtgtgagccaaagagcctggccttacatagaatttctgcctatggatctcacttttctctgcattaatacttaccgctctgttttctgactctgttgccatcaattccccatacaacttcctgcctattccatcaggttgggctctgtggttattgtcacctgcctaaattgcacttgggttttactcacactcctttggacctaactgtcaagttctcaagagagaaggtcccatctctttggtcttatcgcagtgaatccttacaccaccaccatgaaatgggcattataattcctaccttttacaggtaacagaatagaatagaatagaggcatggcaagctaaaataacgagtccatggttacacatctggcaagggacagaactaggattcaaacacagccggtccgacactaggggctgtgctcctaacttctacatgatagtgctcagttttagggggagaggctcaggtgttacaaagggcttacccagagttggggaacagtcccaggtagactatgccaaaccaaaacagaaccatcaccaggagttggcaatgagttgtcaggctgtcctaacctagagattgggctcagccaatgtcaccaacagggaggaactcagaccaggaacacaagggctcagaatccagttgctaaggtccgaataacaagtgcaggtgcccaaatctggggagggcagggccggggagaaaggtgatctgccaggaggcaattgacctgcccccttaaatgcagatgtttccttcctcaagtgcatatcttggctcatgattcaacccctttatactcatagaatctggacctcaaaacattaaacagagatgtttactgtgggttgggaagggggacagaggtggagagctagagttcaaaaaccgtatgaagatgttttctgagctgaatacccccagtagggccacacgatgcccaggggactcactaggagatttaaggcatgtacagaggtaagagaaaatgagaaacaagaacatgaaaactagaagaggaaggaagacaaggccaaaaaaagagaaaaccgaggccactctagcgggaggtcagagacttgtgctttggcaattactggagttgtcccacagcgctgcccctcagaaacctacaccagggttggagggagccatgggtggacaggctgtacctgataacttgtgcttccttcccccagttttcccactctcgttaatgagttttgagacaaaatgtctctccccaggctagaagagcttcagtaacaagatgtccagagttagttgacactcaggtgaaaagcctcttgcagaaaggaatttttttttaatgccatcataaaacttcccagctcacctaggcctgccgtggaaatggtgcctccaaggacagagaggagatcagagcatctgatctgaagccgaggcataagggaaagttgggaatacacaatcctctcccagacagaatcaaacttgcctttctgcaacatctgattttgcaagaagtgacggactgagagtaggagaggaaaaggagagttcaaacaaggtcacttgacccacctaaccctgtccagaggaatgaagcctgagaaagcctcccagagacccgtcctcaatttcgccttgaccttttctgggtttatccatgtgcagcaggggcagctgtcccgaactaatcctctgcctaattcgagctcttcaccctccattctgtctcaattaaacaaacgcgggtctgccaggccgtttccatagaccactccctcacatgagaggcattccagcatctgggctctggagtcaggaagagctctgtccaaatgtcactctgccatttcctagctgagtcaccctggatgactgcccatccctacgcctctgttctctcagcagtgagttggggaaaattgtactcatctagaagggctcagagaaacaacagggagagagtgctgaaggcattgtgatgaaaaatattgctgaattattaaacattaaattatcaaaattattaatcgcattaaaatatcattacacacttacctgacccaaagtcttaatgatagggttcaagaggcttttcctcccagaggtgcagctttgaggggcttttgtacactggccctagagacacaggggtgaataagacaggtaccagctctcaaaggcacacagtgagcaggggccacaagacagcctaacgctcaactagaatcaatgctaaacatactatgacagataaatgtacagtgtgctctcaagagataacagtgcccacctaggaaacttagggagttgtcatttgatctgggcctggaagagcgagctggatttgattggatggattgttcttggcagaggaatgacatttcaggaagagggaacagcaggagcaaaaagtatgatgtttggattccactcgggatattgggaacacatgagaaggactagagaatgcagtctgttatgtgggatggcaggctaggagatgagaaaggtaagctagtcaagactcggaagtggctaatacaactgaaagtggtcccataggacaatgggagaactttcagtgatgatggaaatgttctacatctgcccgtccaatatggtagccactggccccatgtggctattgagcactttatttatttatttatttttattttttgagacagagtcttactctgtcacccagactggagtgcagtggtgcaatctcggctcactgcaacctctgccttccgggttcaagagattctcctgactcagcctcctgagtagctgggattacaggcgcacgccaccatgcccagctaatttttgtatttttagtaaaggcggggtttcaacatgttggccaggctcgtctcaaactcctgacctcaagtgatctgcctgcctccgcgtcccaaagtgttgggattataggcgtgagccttcgtgcccggcctattgaggactttacaggaagctagtaagactgagctgtgaaatttttagttttatttaattttaattagtttgaatgtaaatttcaatagccacatgcagctagtggctactattctggacagtatagccacagaacttatgacaatgactcaaggccctcatcttgcagtcccatcctcagcccataaaatgggagccccgcccaagctgctgctgtgattatgcagcagggtagatgagtttggggctgaaatataatttatttcctgcttgctaagccacgcactctgatgtggcagtgtctgcccagaggaagaggcagctttttctaattcttacagaggcatcatgtgggctagcagtagccctgcttcctctgaagtttgttgctcagtgatctgtctgcatgtagagtcaggtttcttttcatctcctgcttcctggagtcactgggccaggtacgcacacctggaacatggcccaggtgggatgtgctgggcactgactgttagtgatgctcccacagtgtgagaaggccgggtcctcagtatggctgtcagtgtaaagttctattctgcatcccaaattctgcccacaggcagatcctttggcctaaacttgaggaggaggtaatgatctctactttgaccacaggttgaaagggcagtcactattccactttgccagcaagagagcacatattatagtttaattctcacttggcttcctggtctatttctcagttgtttctaatacaaagaggaaaggtaaagtcatgatacttttttggagcctcctacctcccagcaaaaaggacatgcacatactttccaatcttgaatgcaaaagcggtgacatattcacgagccaacaagtacacacatgacattactgctctaaaacacaggcacagactgtcaagagttggaaggaatattgaattctaaaatctcatcataagatgaggaaacttgagtctcagagaagtttgatgatccgctcaagccaggtaggagccagatatggctagatcccatttctcctgaatcaacccatacctaattattaaaattaaaggttgcgaactggtagccattagttaaagtcagcctgctgatttttaattttttgtcctcagtgttggctcatgcacaacttaaaaaatatttttgccagcctggccaataaagcaagccccatctctacaaaagaaaaaaaaagatttttaaaaaacttagccaggcatgatgacttgcatctgtagtctcagctaataaggaggatgaggcagaggactgcttgagccaggagttgtagtctgtggtgagctatgatcacaccactgcactccagcttgggtgacagggcaagaccctgttttgaaaacaaaattaaaaaaatatatatatttggctttatttaaaagacgaaagaattcactttgaaatccaaattaacgaacatttctgggcctgtaaatctacatggtagaaggggctgaagcaatgtcgtgcctgatcctaccatagagaggataaaggggaggaatgagggatggggatcatttcagacactgataattcaagcagttaagctggatcacaaagtaatatatgctgctttcaaaatgtctagttcatgattcattattgcttattatgaggacttagagtttcaatctgtagaagtttcaataaaatacagatcttagagatcatgcagtcaagccaattcattttacagatgagcatcacaggtcccagaccacacacgccttcagataaaaacagggtcgcagaggtggtgaccaggccggagttggtggattcccctggctcctgcactatgggggcgctagatctgtcacattccttgcccctttacaaatagttttgggagcaaatccccaggaatgtttcttgtggattcacatgtatcaaggatactcatttccacaccaaaggcattgatgccccacctggcacataacagccactcaataaatgtgttagatgaatgaatgaatgaatgtgtaagtgtgaatgacctcaaaggtgagtgatgctgcctaaaccaaggtcatcgaaactggcccttagggcaccattccctgaagccaccagtgccatcatctttattcacagccaagcagctggccccagagctttgtgtcttgctcttccccagatatctcagtgaaaagcctttgattcaattttcactccctctcttatagctctcttgctctaggactccactgggggtccgagagctgttcttcctctgctatttcctgttgttcttgaataaaacaaatgccccttcaactttgcttctccatgggacatgttgttctccgagaggctccttgatcctgcaagtaattaggtctggaagggagggtgtcctattggccctccagactggttcagacatgtctagacccagcttaaattaccttgtctgttacacaaggatggtaacaagttggaaagaaaatgagacaagcactttgctgctgtctggtagagcaggtggggctcctgtttaacatttgctgatctccacttaagagcagaacatcatcagccttagtcgccatgctgaaatgggctctgtcacttggatagcgtttgtcagttgaaagctttctctccataaacatcaacagactggaaacccagtgaaaactttgtttttaatatttaaaaattaagtctccacatgcactctgggacagaggggcaataaattacaacttgctatgtgccagagattatactaattgtatatctgattaaattctcacaacagccttaagagggttttgtaatcctcatctgcagatgaaaagtggaggaggagagagtaagtggcttgcctgagtaagggccaagacggaattcaaacccagatttttgatgtcacaaagctagtatcctggcggggcgtggtggctcatgcctgtaatcccagcactttgggaggccgaggcaggtggatcacttgaggtcaggaatttgagacccacctggccaatgtggataaaccctgtctctactaaaaatacaaaaattagccgggcgtggaggcaggcgcctgttatcccagctacgagggaggctgaggcagtagacttgcttgaacccaggaggctgaggttgcagcgagctgagatcacgccctgctgcactccagcctgggtgacaggaacaagactctgtcaaaacaaaacaaaaaaaaaagctagtatccttctcttagtgttgccccctgcagaggaactgtttttttttttttttcttttaaagcaccctacatcacataatgtcagctggacttttctgtgatattaacactgggatcctgtaaaacactatattctgaccatagtctgacactctgcataatgaacaattagccgggaaaacatagtatttgaacctcctttgcagagaggaaattctcacaactccaaagcaatagtcagcccacagtcaatgccatctcatcacccagcccaaggctcggcctaaaaccttctagagggtctcactctaaagataacccaaaggtctcacagcttcctggttgcaaaaacgacaacaggagcaggaattgagacctaaagatcatttgggtagaaatgaggaaagaaatgacatgttaaatgatgatttttccctaacttgccttgttctttctagatgtggctcaagaacttgcagagttatggtgggataattcgactgatcaaatgctgaaagttttcctatcgacttcaaggctgttcaaatctctatgtactttgaagtctgaggcacaagataatttcccagagattcatgtttctatcgatgctaggctgggctgacacagataacccctcaagaggcctttccgaactgctgtataaactgtcctgggtccagcaataaagcaactgtgtcattatagttctctgcccttcagaagatctgatcttaatacccttctcttctttttgtccctctgatttcatcaaatttgttgccattctgggtgtttctccttctctccctgactttttctacttcagatcaaagaacttcccctttttcccacttttggatttgcgccctggaggacaacgcaaggttaacttccctcccacctcctcttgtaggcacacagggtgccccttagccagcgaaatctccgcgcccgagatcctctcacaatttcaggctggtgaattgtagtaggagacatggtttagtttgatgtggttaagtcagtcatcatggcatcttcgtaccctcagccccaaaccgctctcctactcatcaccctcactttcatttctttggattatctttcatcggcttaccaccagccttcacagcctcacccaaggctgaagcagggctagcagggtggtgcgtttccttccctggttgagctggtgactgctgtgggtaagcaggtccaatgtgaactcaattttacattgagaaagagaaagcaagagtgagtgggctgctaagactgttgcttcatggtttcccctaagccccagaaatagaaaggcagacttccgactggcagagcccgtatgctaaccaccagaccacactgccagataagaaaaatgttcgattgtgtcatacttccctcattggctccagtgtctgaaaatggccctgaatttcagagagtcttaccatgacccagggatttagagaggatcgaagagggaggacaaaggaatcaggcaccttctctctctcttttctggggtaaatttattttcaaccacaaaagtaaaggaaagaaaaagtcacaacagatgagttatgagctaactttctgatttgcacatgtaagagaaagaaatgaactggatatcattagacattgagaaagggagtctgcaagctagcaatgtatcttcggcctttttgatttacacgtgtttatttatgagtacctactgtgtgccaggcatgatgcttggtgctgccaattcaaagagaaataagacacctccttgcaaagtgagaaggcagaactagattcagattcacctagatttcaactcttgtgctcaggccaccaccaccaccatggaaacaattttgcttgactctcccggcgcagccgcggcaggcgtgtgtgttgtcagacactgcaggaagagtgatggcctgggtgttgacaggctcctaattggaaggtaggaggtgccaccagagatcagctataaaagatatctttggactggggtgggctgctaatgcttggaagagacttgtgggtgaggcccggtgagctgtcacctcggaattgggccttgcccagcagacagacatgcatgcgggggaggtagctgacagacaggggcgcatggggaagcagccattccagagaactgcaacagcagattgcaaaccaggacttcaggactcagagggggacaaggaaaggagagcctatagtggccccaaagcccagggtcagaggcagggccaggagagcagctgacaagagctttatggtaaggacaaaagagaagacagccggagtctccttttattcagctcataaagacccaacttctgtgcacttataactgttcagaccctgaggggttcaaaaaaagaaccgtgttaggagaattcaatatttaattaagagatgatcagatccgtgcaccgaaattattgctgggtaagacaatactgtgtgtgttacatagcattggaacttaggaaagctctttccttgtgttgtttaatttaatccactcaacaaccctgcaaagtgggtaccattgtccctgttttttatgaatgagggggtgaggtgctgagaagctgtgtacgttatttgagtttgtctggctagtcagtggctgagccaagttccaatccaggtcatgtgagcctctgaactttctgataaaacctgcagacccccttaactgggataatatagtcatgcattaagcaagaaggagaagtaaatacaggctgatggtgtaggggagaaattcaaagggagaaggcctaggagggagagggagctatgtgtgaacagaaccaaagatggcctctgggaattggaaggtctcttggaattcgtccaaactgaggatcacaagtctccacattctgagtaggaggatgagggtctgagttaggatttgggtcctgcagggcttgctaaggaatcccctgatggcctaggattccacgcagagcacatctggtgtgagagagctcgctgcaagggtgaaggctccgccctatcagatagacaaccaggccaccaagaggcccagccctccaaaccctggatttgcaacatcctcaaagaacagcaacgggccttgagcagaattgagaaggaaatacccccacctgccctcagccgttaagtgggctttgctattcacaagggcctctgggtgtcctggcagagaggggagatggcacaggcaccaggtgctagggtgccagggcctcccgagaaggaacaggtgcaaagcaggcaattagcccagaaggtatccgtggggcaggcagcctagatctgatgggggaagccaccaggattacatcatctgctggtgagtaggcttcattaattctctgatgaatggacgattgcaagggaacttttttcatcttcaaggagccagaagaagtggtgattaaattggtcttttaaaataaaaagactccaaaggggtacaagtcttcaagcttcccctgtggtgttccgggcactctggcttctctttcggagggaggaagagcatctattcataggctgtgacttggagaggccccacggtgagtcaggcgcttgctgtgtgagccgctggttgctaatgtcttcgggaactgctaatttacccatctaatttgttcctgtacactggccacaaagggagaccactcaattattctgatccaaaagagaggcttgtgtttaccatgatctccccagcaactgtgtgagtgtgtgtgctgtgtgtgtgtgtgtgtgtgtgtgtgtgtgtgtgtgtgtttgcctaacaaccttaggcaatgacgaagaggtggggctgctgcccttgttagcattttcaaacacattccagttctgagttgagggcaaagattgtaatggggtgcttcagagaagccttggctcccaaggaggttataacttcaaagggtgtttttgaaaaaccaaggcggatgaggaaagtggctacaagttccttccatcacagaggatcaatgaaggggaacaaagatttgggagcatctactttgtgccaggtactgtgcttgggttttacacgtcttctcttgttgactttgcataactcccctttgaagcagatattactccaggttcttgccgtaatgtttcagcttaaagaaaaccaacccatacttctttaggttgccctgaaaaggtgaatcttctgtgaagccttttctgtctttatctgttaaaattaattaagctcttgtttgtgctcccagaaaatcactttagaccttagaaagatggcagcctcagttttctcatttgtaatataggggtacccatagggtcattgtgagaaataatagaaataaatcatggaagtgcttggatagtagctggtacttagccctcatcagtcatcattgtcattgttgttaagagtaataataataataatatcacttattataattactcacctctaggtttttaaaaaacttacaggccgggcacattggctaacgcctgtaatcttagcactttgggaggccaaggcaggcagatcgcctgaggtcagcagttcaagaccagcttgggcaacatggtgaaaccctgtctctactaaaaatatgaaaattagccacgcgtggtggctcatgcctgtaatcccagctactcgggaggctgagagaggagaattgcttgaacccgggaggcggaggttgcagtgagccaagatggcactattgcactccagcctgggtgacgagaaactccatctcataaaaacaaaaacaaaaacaaaaaaacttacataaatttatggggaacaagtacaattttgtgacaagcgtaaattgcatagtcgtgaagtcagggcttctaaggtatctatcaccagattgatatctattggtatctatcaccagattgatatctattgatatctatcaccagattgatatcaccacattgtacctattaattaatttctcatcatcctccccccacccttctgagtctccagtgtatattattccataccctaatgccatgtgttcacattatttagctcccacttatgagtgaacaatgtgatatttgtctttcagtgtctgacttttttaacttaagataacagcttccagttctacccatgtggctgcgagagacatgatttcattcttttttatggctgaataatattccattgcatatatatacaccacagttttaaatccaatcatccattgatggacacttaggttgattccacatctttgctattgtgactagtgctacgataaacatacaagtgcaggtatctaattatttcttttcctttggatggatacccagtagtgggattgctggattgaatggtagttctaattttagttctctgacaaatctccatactgttcttcctagagattgtactaatttacattcccaccaacagcgtataagagtttccttttctccacatcgccactaggttgtaagttccttgaatgtagggatcatgtctcttttcttcattgttttataacaagagcctaggagtgtttggcacatggcaagtacttgttttctagctgacagatgaatgaacaaatgagtgaaggatgcttcctcctcactgctgtgagcttctgagaatggacccttgtctgacctgcttctgtatctctagtgtgactgctttgtctggcacaacagaactgctcagcgattctgttgaacggatgctgctgcctggcccgtatctggcctggagagtctggctgcgagctcatctgtgctctggtctggctaaggttagctgcagccctaggaactcagagagtgtgtcctggacatttcacccctagttggtgagctcctcaagggtagggacggtgtcttgtttatttttaaattcttagtgcccagtacagtgcctggtacacaggagatgctcaaatggctacccctagcctctgaggtcccactgcactcaaagaagagcagagctccaaatgaccttgtcatctttcccctattacccaaacctgttcaatttccccatttctgtttattaaagatccattttctcagttacaaagatccaagactcctcgagggtattctaccctaacggaaataggacaggctttgtagtcagacttgaaccctggctttggcgactactagctgtcctgcctggagaagttgcgtacccttcctgagcctcagttttccctttcattgaatcaggatgataatacacacttcattcatccactcagcaagtgtttactgggcgcctcatacacagcaggaactgttctaggcactgcggatacgtagacgtcaacaaaacaaacattgctcttgcctgaaaggggcttacaaacttgagagggggagacagacaccaatcaaataagcaagtacacatatagtatgccagatggcaatatgtgctagggagaaaaataacacagagtgagggaaaatggaatgcgctggcccgggttattagtgtcttactcaggtgatgaaggaagacctttctaataagaagaactcacatctggggaagaatgttcccggaagaaggagaagagcaaaggccctaaagcaagagtttgaagaatgacaaggggtcctgtgtggatgaagcagagggagggaaggaggaagggagtgtaagagaaggggacacagagatggctagagccagatatgcagggccttataggactttggctttttactctgggcaagaaggaaaccttgggagagcttcaagcagaggagcgaaatgatctgatgcaggttatgaaaggatccccctggcagtggcacagagtatggcccctgacctgtgtggatggggcagaagcataaggctggccatttgcatcccacaaatgacctcagtgtgagggatgagcgagatcatatacgaatgcgcttgcgtgagtatgcatagagcaagtgctcaagccatggcagcttctatcaatggccctgcagctgcctggctatagctccctggtctcctgcagacaagtcttggccagtcacgtgagtgcctctgtcattgcccactcagtcattccccctgcccccacctcctttcttcaacccttcactggtggttaagctcctagcacagcagcctcacctccagcctctccccaccccaacccaacccaaatgcaactccactcacatccttcccctgttcaagagtcttccatggactagtggctcattaaatccacattcttggctaggtgcagtggctcacacctgtaatcccatcactttgggaggccaaggcgggcagatggcttgagcccaggagtttgagatcagcctgagcaacatggcaaaaccccatctctacaaaaagccaacaaacaaacaaacaaaaaacaaaacaaaagaacaaaacaaaaattagccaagcgtggtggcacacacagctgcttgggaggttgaggtgggaggatcacctgaactcagaaggtcaaggctgcagtgaaccacagtatcaccactgcactccagcctgagcaacagagcaagaccctgtctcaaaaaaaaaaaaaaaaaatccacattcctggagacttgcagctaaggccttccacaataagatgctgcatttacgtttcccacccataatcaactgctatcccaaacatattgaatatctgtggagaagtatgggtgggtgcaatatgtcactcctagcagaatcactgaggaaactgaccacactcatgatggaaaattgacggtaatgagtccttccctcaggttccccaaccccacaatatgccctaaccatggtggacatgtattcctgtctgtcactggctcacttctcccaccaggctaccgcaaactccacaatgatgtatattctcttaaagctacaaaatggcttgtggtttccaaatcagttttccttactgctcttatctcccttgatacttgcccctatgggcccctcatccataataaaatgccctcattttacacttactagttctgacaagagtcccaggttccaagtcatggattcccatatgggattgctcctctgatccttcattcctatatcttttttcaatctatccacaattcacaaagcatcggtgtcagaccaatggcaaataataagtgggacctgctggctatggatggaagagcgaagtccctgacaacatgtttctaccagcctggaaatgaggctctcccatcccctaacacatctaccagttgtgatggatttaaaggctggctaatgttaagcttgttccacaggggatagaatattggcccctggactgacacctaccaccatgtggatcttggagcaagacaaaggagccccccaacattcgtgttctgaaataacaatgcctgaggctgtctattccccaccacggatgccaaagcacagacagccactcacagctgtgggatacagatgcccctgtcattataaaaggccagccctaaatgctattacagagtctaaaaactgaaaatgttattgtgaaacctttaggttttttatagctggctatgcctgatatagctggtggcctgggacacagtttccctactcagcgctgggacacctcggcaatactgcacccacagtgtcatccctatctgtttggaatgtacaattcttctacaacaccatgggccaggaatatcacatcatcctgagcagccatcaggacaaacaaaaaggaatgtggtcctgtatgtttagtcccacctcccctacaaactacttttatcatagaaatgatgcccaattgtcagcccagcgcatgtggtgtcctccagcaccccttctaaatgtgccctcaagcaccccttcttctttgtgcatctttgtgacacccttccagatgtcagcctatatctccatgacccaaatctgacttaagagttgtggccgggcatggtggctcatgcctgtaatcccagcactttgggaggccaaggcaggtggatcacctgaagtcaggagtttgagacgagcctggccaacatggtgaaaccccgtctctactaaaaatacaaaaaaattagccaagcttggtggtgggcacctgcaatcccagctacttgggaggctgaggcaggagaattgcttgaacctgggaggcagaggctgcaatgagccaagattgtgccattgcactccagcctaggtgacaagagcgaaactctggctcaaaaaaaaaaaaggtgtaccagcccagggagacaatggccacattgcaggtgatgaccacagcccagccaaccactgcatcctggaggctgcccaccagttacccacatcatctaccaagggacccccttgctggagcacaaacagcttcccttgggggatccctcaatcagcatttgtcacatacctgaaaagggtggccaccacccaggccaccaaagttataactctctcctctcacttcctccccattgggcacaataaacctcattgccattgtggctggaacttcccttcctgggcctcccaaagcaattctactgcctaaggctatctccgggctaacttgtatgtacacagagataaagccacatcccagtggctggacctcatgcaatgttgggcctcctatctgcccccatgagcaggccactcccttatttgcaccacaaaaccaccaacaccaaacacttctggtctaggctcctaggtcttgccctgtcctatgttggctcagatgttatccagtctggtccccggctcatgagtccagatcatacatctatccaaatgtataaatacatgcctatgcttgtatcttcctaggcccacacagcacaactagtgtcatggcccaccccagatattaaaggaacacaagagattggaagccccagagggaacctgcttcacctgttccactcctagataacttcttcctgacgtcccaaatacctaaactcacctgcacactgctaagtctgacaacccccttcacatttttctgactgttctgcaatttaaccctgctggtcacagtccccagtcagaggtgatgggcagtcttcctacccattgtcctgggtataagcatgacttggggccagaagagtgggactaaggtcttacaatatgatcacaccaggaaaactagcagatacttcagagaaagatctgaggtcctatcagcccacgtaacacaaaaaacagcagcactggaagctttcactgaagggcaaaaacccctaactgccagggtggcagataagagactagctccagatgatatgccagcttcccagaaggagtatatgctctcagagggcatagtgtatcctgctggacgtggataaatattgcaaggcaaagtaatccaaatagcccaatggatgtaccaccaaacagaaaccaaattctacatgtggtactctgaactccctaggacttggatgtcccctatagcctggggtgaccttgttttaggagccctcctgcccacaagtagacttacatactgcactggctatgtaaaattggtacagcctatatacaagtatattagctctttggatggtgaaccaaatgttagggagtgaattttgaagaaattgagttgagtgcaaaaagttgctcccagcaaaatgtcatttgtccaaatagttaacacccactggggcagaaaccatcagggcaccccacccctcaccacccactcagccccactcacctctgcagcacctagtaatcatatgcaagaaaactcacccttactctttttgattgaccacccccagcctgacccccaatggagcagatcactcaaaattaatcttcccccactacctcctctcggcattattcaacaggtgggcccctgtcctatatctacgtaggtccccagcaccaggctctttctcctccccagaagtcagggagtcctcttctcagtggggccctcaaccagtggcttccctcgctgcctatgcctgcataagtaatacacctttgaattgcctgtgatcaccgggtcaggtgtggtgcgttttggcatccaaggcttttaaatgggagagaacagcagatctggttcctttcactggaatattgttatggtccaattctgcaaccagctgacttcattactacctgtgaactgcacctccagctcctccaactgaccccatacccagacccttacttgggctgtttcctaccagacacacctgctctgttaagaaaaccattattgaaatcaccggctgttaattcctactcagtccttagtagctctgtgagctggagcaagttctgtaggctttctgtgactcagtttcatcacccataaaattatgattacaatacttacttcattagagtgttgcaagggcctaaaaaacactctatgtatagctcaaagtacaagcctgacaacaaaggaagtttccagataatcgctcatcaaggggcaactcgattttctgcttcctccagaaagccttccatgctgatgtccatccactctgatctctccctaatccaatctgattgcagttttgatcagcacctcactgttgaccatggatttcttctccattacaaatgtgttcattttgacttccaagtaagagataaaggtcttggaaagaagtgattgcattttacctggctctcctactgactttctgtgtcatcttcctcttaattttggggagactgagtttctttctctgggatggcaaatacatggcctatgtgccaacactttcccatcctgaaacctcaggacacacaccagtgttctcatcttctctccagaacctgggtccagactcacaattcttcttaacacaatactttggacagtgtctactaacttatctaataaatatgttttgagtacttcgtaggtaccatcccccttggtcagtttctagaagttaaaacgttggacatcttgtatctgcacttatggaactcatcccttagtggagaagaaagacaatatgcaaatacacaaataagaaaatatcaagtagtgacaaatataatgatgaaaattaaataacggtgtgttagtgcctggggaggaggctattttttagatcaggtatccagggaaaggccttctgaggtttctcccttgatctgggagattgggtgtgggcctaagaatatgtattcctaacatgcaaacgtaggaaatttgggaaacactggcatagtgaatgaggtgagggcatagtcagaagacctaggtctaaattccgtctcctacatttatgcagctgtatgaccctgggaaagttattgaaatttctctctcactttcctcctctgtaaaattggaataatattactgatctcaggaggttttttatcaggattgaataagatcaagtatttaaaatgcctggcacataataagtgctcaataaaaggtaggcattgtttgcaacaattaggtctatctatttataactgtaatcttttgtttgaatcactcaagagacaaatccaataaatgccgctaggtaatacggtgtctgcgtgttggcttttgcctcatgaagctcttcctcttgaaaaataaattttcaaaagacattcctgtgagcaagaatgcccgagtctaaggaacaagggtcatccagttctctagtttaggcatgtttgagatttgaaagggctttggcctaatttcctctcctatcaaatgggcaccaggctacctgccctttttcactcatgggggatttctgagactcagagggataagagatttgcaaagcgtgagacacaaacagttgcagatacagacagaacacttgctttctcagaccggcaggtgcatacaatggcaaggccacctgatacaccagtcctgttcatttggaaaagggacaactccttcacattcacaagctgggctggtaagtgaagaataagaagaaaaaaaaaagaagtcggcaggaagcagcctcttcaaccagcaaagaaaccgttagaatccatccctgcgccctgatgccaaagttccgcctgccccacccgtcacgctatcaaggacacccgcctgctatcagaaagccctgggggtctttttccctagtttatcaaggacctgtggaaacatttctctaactgaagataagaattttttttctctctctttctcctttctacttctagctgtctaaaccagagggttcctctcattttctttcagtaacaactgctctgaaaagaagatatttttcaacctgaacttgcagtagctagtggagaggcaggtaaggtgggtttcattaattcatttgttcattcattcattccttccattattgtatgcttcctgcatgccagaaactgggctaagaaggctcttggatttaatcctgggcagaatgagcttgaggtctttggggaagccagactgcacttaacaattacaaaatgcggaattgtaaattgtgatctgaacttggagtgagagcatacatatttgagctgagagacagtgtgtataataattttttagatttggctcttgccctccaagtggacgttttcagggttaaaaagatgcctcagagcctagatgacttgctaccattccgtgccagccccgtctcccaacccaagtcacaattgcttgacccttgtgaaggcgaggatggaaatgacttgttggagtgatagagaggctagcataaacctgccaagacctccttcaagatttggttcattttgcaaaagttgccagataaaagatatttccagatggagggccacgcaggaaatacaaatggaatatttgttaatagctcttcctttgcgagatatgacccaaggcggccttctgcaatgtgatgggaagcactgtagcttgaaagcgtgagaggagtcagcaggcccacggcagtctcgaagtctttggaaaggggctctggcctgagcaggcattaaagatgctctgctcatcagagacgcccccttttccaccaccaccatcccaaatggagatgggacctgctatactctaagtattggattctcagacaggaggccagatatctagaagaatattgagctccttaatgctgtggctttgcataataacaacctgcactctttttttctgtccttggagtcaaatgggcttctgcaaagaagtttatccagaagtcagggatgagcactattcgaaaagtcctaagtgggcagggattgccactgattgcactgaagaatgtgttggagctcatgagactggcttccccataacatttggttgtcgaatggttccacagatgaacctgagaagaccgtgagctccctggaacaatatgtaaaattttgcatgtaggaacagagctacacctagggaatggtctttaacttttgtcagatttgtttggggcgtgtgggggttaaatacgtacatcgtaaaatttaacatttaaccactcccaagggtacagttcagtggcattaagcacataaatattgttgggtgaccatcaccactatatagctctagaactttttaatgttttccaactgaaatgttttgtccattaaacaataactatcccctccccctagctcctggcaaccaccattcgactttctgtctctatgtatttgtttaagtacttcacaaaagtagaatcatatatagtctttgtcctctcaggactggcttatatcactcaatgtcttcaaatttctttcatgttgtagcttatgtcagaatttcctttctctttaaggtggaatcatatgtgtttgcatgtatatatatgatatgtatatatatgatatatatgatatatatcatgtgtatgtatgatatatatatcatgtgtatatatgatatatatatcatgtgtatatatgatatatatatcatgtgtatatatgatatatatatcatgtgtatatatgatatatatatcatgtgtatatatgatatatatatatcatgtgtatatatgatatatatatatcatgtgtatatatcatgtatatatatgtacacataaaatagtatgcgtatatcactttaaaaaatccatctgttgatagacacttggttgcttccactttctggctattgtgaatagtactgctgtgaacatgggtgtacaaatatttgtttgagttgctgttttcaattcttttgggtttatgtccagaatggaattgctagatcatatggtaattctgtttttaattttttgaggaaccggcataccgttttcaataatgcctgcaccattttacattcccaccagcaatacacaagtactccaaaccctccagatcctcaccagtacttgttaacacttgtgcattagccatcctaatgggtatgcagtagtatctcattgtagttttgatttgcatctctaataattagtgatgtagaacatcttttcatgtgcttattggccatttgtatgtcttttttggagaaatggagattcaagttctttgcccattttgaaactggattgtttaaatccagacagagcttgtcttgctctgtcgcccaggttggaagcgtgatcttggctctgtcgcccaggcagtggcacgatctcagctcactgcaacctctgtctcccttcctgggctcaagtgattctcctgcctcaggctcctgagtaactgcgattacaggcacacaccatcacgcccggctattttttttttttttttttttaagtagagacaggagtttcactatgttggccaggctggtctcgaactcctgaccgcaggtgatccacccacctcagcctcccaaagtgctgggattacaggtgtgagccacagtgcccggcctatatgttctagatcttaatctcttatcagatatatgatttgtaaatatattattccattctgtgggttgccctttcactctgttgatggtgtcttttgatgcaccaaagttttaaattttgatgtagtccaatttatctatttctaattttgttgcctgtgcctttagagtcatatccaagaaatcttgctaaatccaatgtcatgaagctgttcccctgtgttttctttaagaatgttatagttaccaggtttttaaaaggtttgtgacaatgcatgggctatcttcaataatgattctggagtggccttcctcaccaaagcaaagacactcagggctttgtaaatatcagtgtgaatctaggaactgggcaattgataacatggatgtgatatttgaaggcttcaattcaaaaggaatgattaagtatctccatatctatatcagtaccctgggagctagtgaagatgaaaaccatggtctctcttctccaaggacttaaggcaagatgttgcaggcacacacgtgaaattattgcattgcaaggcagaatctaatgaggcacctagctaggcactaggaccaagggctataagaactcagaaagggatcaccaccatgagcttcaggggacagagaaaccttcagggtaaagatgtagcttgatctgggtccacattggacaagatttggagaagcagagaagactggagaggaatttgtactaactgcaataatcattgccatttactgagcacctactatgttccaagcactgtgctctgcccactgcatacattatctcaatgactactcctaaccctacatttatcattgtctgtattttatcattcaaagcactgaagctcagagattttcctaagatgacccagatagtaagttgtaaagcagagacttgaagccaggtttatttatctcaaagcctctactcttaatcactctactattctagtaccaaagctttagaacagggagaaagcagacatccccgatagagagaaaagagtaacacagtgcacagaaatggcacaagcaggatatttaagatcagagaggagaacaggctggatgggaaggttcagggtccaggactgtgggatgtaaagttggatcaatggagtgagcaggattacagggtgcctttaatggaagcatgggaaatttggtctcgacctgctagaatgacagaatcacacatagaatttcagctctaaccttccagtctgcctcttttctctataaaatgagaaaattgaggtctcaagaggttaagcaacttgtggatggtcatggacgatagggaactattgcaaattcttgagcatggtgttgacagggaagaaaacagtattccagatcagttagtgtggcagtaaaacacatgaggggtgactgaagggaagcagcaaaaactggcagaaaaaacaagcagctctttctctgttttttttttgccaaaggatacctccctcaacaatgggcattcctagggagcatcattaacaagattccagctctactccttcctgctgaggtttgtcgcttaagaatctggagacaggtagggtgcagtggcttacacctgtaatcctagcactttgggaggccaaggcgtgtagatcacctgaggtcaggagttcaacaccagcctgaccaatatggtgaaaccctgactctactacaaatacaaaaattagccaggcgtggtagtgtgcacctatagtcccagctactcaggaggctgagacaggagaatcacttgaaaccgggaggcagaggttgcagtgagctgagatcacgccaccgcactccagcctgggtaacagagtgagacactgtctcaaaaaaaaaaaaaaaaaaaaaaagaatctggagacagcttgtaggggcaagtgctatcagaaaggtcagaatcaccttcccctgccaggctcagtgccctttgatggcccagatgccagaaaacacagctgccccagcagcgacctgtcctcatcctccccacttcctccaatagaaagcctgtctagggtgcaatggcttagatcagagacacgtgactctgaagagccaatggccaggaatggcttctggcaccttctttatgttgccttcctgaatgtgagcctgggccaggcctctgtgaacctaactcacctgtcccatggaggccaccataccaggagaggtaagacaagacactccgttccccaggcaagaatgttgaccccaccttacttgaactaagcccttgtagggcagaactccacttatccatctatgtccagccaagaaagccctgccctggttgactattgtcctctgaggttctctttgcttagttaattctaataatagctgccatccattgagcacttattctatgttgatcactgggctcagcatttggcatgcatgatttcattttattcctacaaccccataatgaagatattgttatccctgttttgcacatgatgaaactgaggttcagggctgttaaataatttgcctaaaaccatgtacttaaaggagccaagactcaaacacaagcctttctctctccaaagcctttgcttttactcatatgattgactgcattctacactttagtccttgtagagggtagaggttctgcagtggagagtcaggcttcaaagagtggccttgttaattccagacaccacctgtttctctgttcctgggagccaagagcctgatctctttcccaaaccaaactcttggttccaaatataaatggtatctggaccattattcttctcccagtaatgatgctcaagaaaaacaaaggaccttgaagttccttctacactttcacccagagggcatcatgcaggcatgctttggccaaggggaatggtgctgccatttgtacagtcattcttttaatgaatatttattgagggccagccacacgttaggcacgttctaggtgctgaagacacaactgggaacaggtcagaaagagtttccaccctcacagagtttacattctagctgggaggaaaggccaaaacaaaacacacaccaaaaccctgcacatacatctgtagtaaagagcaaatagtgatgatgctaggaagaaaaacaaagaaggataacggggatggagagtgaggagaagaaggattttataaagccctctgaggatgaaatatttgaacagagacctgaatgaagtacatgggagccatggggtgatccagggggaaagcattgcaagcagagaaaagggcaagtgcaaaagccttccagtaggagtcagcttggtttgttttaagaaccagaaagaaggccagtgtggttcaggcagacagagtgaaggggcatgctggagaaaaggacaggggggcagcagaggccagataatagggccttccaggccacagtgaatttggatctcaaatatactgtgccggggtcccaggcactgtggtgtgtcactcaggtgtggcacctctgcatagctacagagaggagacaggctgcctaaacaaagagcacaaagacagctcagtgagtcagctcacctggctctgactcccaccttgaacttgaagcagcaaataaagcccagggtttggtacccaaaggagaaggtgggggaaggtttgacaatggcctgaggtggaagaaggagctgttgaccctgtatgtctcatttgctttgtccatcaaagggtctgaattatcaatgggtgctcaaactttttttttttttttttttttgagaaggagttttgctcttatcgcccaggcttgagtgcaatggcacggtctcagttcactgcaacctctgcctcccaggttcaagcaattctcctgcctcagcctcccgggtagctgggattacaggcgtcagccacctcgcttggctagtttttgtatttttagtagagatagggtttcatcacgttggccaggctggtctcgaactcctgacatcaggtgatccacccacctcagcctccgaaagtgtcaggattataggcgtgagccacctcgcccggccgcccaaacattttaaagttagaatctctttttataagcaaaattttccatagaaggtgactgtgtgccactttcctctccaagcacctgatctgcttcatttcacagaatccttagaacagctccacgagtaggtactctgaatactcccgctttacagatgtggaagctcaaatgcagagaggttgggcaacatgcccaaggtcaatgaatgcagaactgctgcagtgggagcaggggtgggtgacacccactagggaggtgctttcaaactcctactgctccaaggagcaagctagaaaatcccacttctcaggccccttccactaggacacactatgagcttaacactgctaagaactcactgaggaatggtgacatttgggggcggctccttcagtgctttgtttggcttcttttttaaattataaatggtggtttgaaagttgttggaggggaaaatcagatgaaatcagggatgtggctgaagcagtcagtgtagcagtgtagcagagaagcagagaagctgtcagcagcctacccaggccccgaaatgggcacagccctgcatttctggcctgaggcttgccgaggtcttaggtgaacttcagctctttctacagcaccccagtctcagcactctttggtggatgtcctgattggctgggagattgttgcttcctgatacagtggtgattacttctgaaagatggggtaataccaacagctatcgtttctgaccatttactgtgcagcatcactgtgcaaagtatttttatacatatcctattgactcctctcaaaactcctgtgaggcaagcaggcaccccagtggcctcatcctagttctggccctggtgacattatgattgcctccatcctccatttgataggtacagaaactgaggttcagagaagtgaagtaaattcccccagatcacgcagctagcaaacagctgagcttctatgctcatcctaaggctcggttgaaatggattttttaaaagatgtattttgggctctttactatatagaaaaccgaatctgtttatcactaaggttactaataggccttacatctgtgaaaacttatctgtcagctggccctgaaatgttctgaaatgagtctgagcacaggatgcctgtgacaaccgaatagtttaaaaaaattctccatgggagccgaaaccctattaagacaggtctttatttttgttcctgaatgccacatttagaaacaaaatgtcatatttttgtatatgaatgtcacaagtgacaaagcatatgttgcaacttggcttctaatggttgaaaaaaaaagagaggtaaattatcataatgttgggatcttctcaattatatttgcattttcatttctatcagaagtccattttagcaaaggaatgtaaccttagtcacttgaaactgctgttcccttagaaaacaattgtaaatgtaataagcaaaaaggatagaaaatgcccacaggggaaaaaaatgatccatctggggtcagagccatcgtgtagattgattcattcttcttctagcattcttattcaggaaggaaaacttgaacattttctagattttaggatatttaagatttgcaaggaattgggggaaagggaaaaggaatgaaatttcagtcccactggcagggatcaaatagagattttctcaacttttaaaagaaccgttttacatgtcccaatcacctcatagttcctgagtctctcttctgcataaggcatgtactagttgttaagggaggatacaataaggtcatgattgctttaaaattattcataataaaaacacattttgagacttgattctaaatgttaaacttaaatttgagcaatttaattgcccgttgaataggaatgaaatcccaccggtaggcagttatttcttacaaccactgtgtgtgaaattgaaatcttaagataccatttcaaatattcaccttctctaaggaagttctccccaaagagttgtgaaagataagaaactgacccaaagtcatatgcagtaatctctttttctttacacactcaggtcaaagtagaagcatattattaaaaagaaacgttatgccctgaatttggctgttctgaggttacctcttggaacccaaggatatatttaatttaaaaactgacttgagccccatgcaaaactgtgacaaggaaagtaataatttatcagattaaataaaaacaagcagatgtggccaggcgcggtggctcatgcctgcaatcccagcactgtgggaggctgaggcagatggaccgcctgaggtcaggagtttcagaccagcctggccaacatggtgaaaccccgtctctactaaaaatacaaaaaattagctaggcgtggtggcgagcgcctgtaatcccagctactcgggaggctgaggcagggaaaatcgcttgaacccaggaggcagaggttgcagtgagctgagatcgcaccattgcactccagcctgggtatcagagcgagactccatctcaaaaaacaaacaaacaaacaaataacacccaagcagatgcaaacaggtcatttagtcaccacgataatgaacgttaaaatggaaaacacttacatgttttatttaggagaagaagggggtgaggtgaaggaatcctgtttcctgcttttaaaaaacaggaaatagtttccaaatttgggtgggcaattcttattttaaacccccatttcacctttaaatttaatttcaagctcttttaaaattatcttaatgatgccctttactataacatagcagctgccatttatgagtgcttactatataccagttgcttttcatgcaagcaacttcatatctgttattacccccatgccattacaaatctatgtgccacccttttgtgcactaactcatataatccccacaataacttaggcaataggttctgtcgtctccattttacagatgaggatactgggagtttatttgtttgtttgtttatttattttgagacggagtctcactctgtcacccaggctggagtgcaatggcgcgatctctgctcactgcaacctctgcctcctgggttcaagtgattctcctgcctcagcctcccgagtagctggggttacaggcatgtgccaccacacctggctaatttttgtatttttagtagagatggggtttcaccatgttgggcaggctggtcatgaactcctgacctcaagtgatccacccgcctcggcctctcaaagtgctgggatcgcctcggcctctcaaagtgctgggattacaggtgtgggccaccgagcccggccaggatactgggagtttaaattcctgctgtgagcccaggttgacacagctggtcaaggatgggttagaatccaggtagtctgactccagagctactaccgcatactgcctcctcagattaaataattttcctaggacatgctaactgataagtaagagtctaaatcaaacccaggcagttgggttccaaaattccagcgtttaaccaccacattgactggttataagtaggtaaactgttcatcacaacctatatatttattttcatttctgttagaaatgaaagtagtgtggtaggttacatatttatcacatagtttaggcttgcctaaattctaagtattttcttttttaaattaaaaacaagggtctatcggaaaaaaaaaacccaactttttttttttttttttttttttgagacagggtctcactctgttccccagactggggggcaatggtgcgatcatggctcactgcagcctcaacctcctgggctcaagcaatcctcccacctccgcctcccgagtagctaggatttcaggcaagcaccaccacgcccagctaattatttttattttttattttttgtagaaacagggtctcactgtgttgctcaggctagcctgggtctcccaaagtgctgggatcacaagcatgagccaccgagcacagccgaaaaagtctttttgtatactgaagtctccactaggacaaaaatttgctcttaaggcttcctttgggacacacacacacacacacacacacacacacacacacacagcttttgattatacccattagggacccaagccttgggacacagggaccagaaaatgacaagagcatgcaggcagtagtaaactctggttatacttaaaatgggaacagaaatgtatgcctatgatccagactgatcatataaaaccatggatcctgaaagtacgttccctctttacaagccttaatgactggcatcacgcacaaataggcctttcagcttctgaacgcagatattttcaaggaactctgaggcccaggagagcctaagtttttctccacggaagggcaaactactagcctcccccgcttcccctctgcgttcctgcctctttctagaaggaggctgagagggggaagcctgaacccccaaatcaagtccgccttctttctctgtgcctgacccagggcaaaataatctctctgatcctgttcttgaccattgaaaaagcactttctctggtcgggatactactggcactttacatggggggcagtttaaccgcaggagtccgctttctgaaaggtgcagagggaggggattccgccaccagccgactgagaggagccccggccccgcgtggtccctcccagccaccctccctctgggattagctgccctggctctgctctaggcgtccccagcccgtgcagtcccggctggcgcaccaccatcgcctctgcagagcgcggccgcagcccggagcccgcagcccggagcccgcagcctggggcccgcagcccgtagcccgcagcccgcagagccgcgctgtccggggcatcccagtgcacggcgtccgtggacctgggacctcgaacctgggacgggcggaaaatccactgggaacacttgcatttctgtaggtgcttatttcacattcttgtcttttcttgcttgctcgagctgttcgtgggttactttctgccttagttaaaccaaaagggaaaggcggaagaggggaagccctgaagaatgatttagtggttgcccagcctcctttccaaggagaggtgttcgctgagcggctctccccgtccccgacactggcccctttaagaagccaagtcagtcctgatgctgctgtttgtattgctaatccccaggagccccgtttaaaaaaaaaaaaaaaaaaaggaagaaaaaaggggaggtggggggaccgggcagctgtctctttaaatgtgatttccttctattgtatttgaatcgtgatcaggaaaaaggaaatgaaaccagagacagagggaagctgagcgaaaatagaccttcccgagagaggaggaagcccggagagagacgcacggtcccctccccgcccctaggccgccgccccctctctgccctcggcggcgagcagcgcgccgcgacccgggccgaaggtgcgaggggctccgggcggccgggcgggcgcacaccatccccgcgggcggcgcggagccggcgacagcgcgcgagagggaccgggcggtggcggcggcgggaccgggatggaaggttaagtcctgagcagcagcagcagctgcagccgcctggagccaggctgcgcgccccggcccccgcctcggccgcggcgcgcccgcagcccggtgattcgctctctctctttggcgtttgaagggagcgcggtgactgtccttgagcgcggaggggcgagctcgccggcggagcgccggagcaagcggaggcgcaggagcggcggcgacggcggcggcggcggcggcgcccgagcacccgagggggtccgagccccggcagccggccagccccgcgccacaaagggagcgcccccgccgcccggcaccccgcctccctccccaatgtcctcggccatcgaaaggaagagcctggacccttcagagtaagtgcggcccccctgcccctgccacccccggtgtccacggcctcgcgtcccggagcgtcggggggacccgggcggcccgcgagggggctccaggtgcgcgctcgcggcgtgcccttggccccctgtgccgagcgctgggctcctccttcctcccgggtgattccgggggctctgggagagggactgggcggcgggcggcagggacaggggtcggcccggcgcctctgcgggccactccaggctactgggacgctccccaaagccaccacgggccagaaagtttgcacgggagcaggcacgaggagagcctggaggcgcgcaggtgcagtccggagagcgttctgggcttgactctgctcccttcttccctctccttctcggtcctttctctttgtccatttggtcttggaaaggggaacattccaagtggcggcctccggggtccccaacggccgccttcccggtccgcaggtggagccgctgccagccttgcggataacgggcgggtgaggggtccgaccgtccacctcggagctggctctgggcctccagggatttctagagcagcgaaatccggagtaaatctgagtaggtgtacccctcctcggggtccaccgatggggacatgtgaacctcgaaagttaatgcaccattttgtgtataggtgaattattctggggagtagagtctcgtagtttttagcagagtcttaaaagggtttggggtcagggaaccagagctctaatgagcattggccgcatctgttttctgagccgcgtactggtttggaatgtttttctatccctcacccattcttcagcgttaacatggggagtaaggggtgtttaagatatcattttcctgtcaacgcaaatgcccttttaagagtcattagctgtctggttttgagaatttttattcctttgaagtccccctctaatcctttgaagggatttgttacacaagaccaaaggagctggttaatgacttgtccatttgtgcttttaagagacatttgttttgttttttcttttcctgctttaaaagaattgtgctttcctgcttgaaataccgcacacacacacatacacccttcaatttcggctttctatggtgtttatttacctgggttttaccctcagttaccagcataaaagctcaacatattctcataaaacacaggaagtaccaccatccaatgagaatataaacatcactattcagtcttgaaggttaagacaccagttctgtaatgagctaggtttgttataacaaaaacccccacttccttcaacaaattctcaggagaaaaataacattcctttttaaaagtatgtttatgcaaacaatgggtttaaagggtggtttgatcacttttttaaaataaacttaaaactgagctctgagtttcagagactgggcaagatcatagtaacacaataagggagtgaattggatgaattggtgcctcatgcctttttgatcagcagaatttagtcactaatcctttcaatagaagattaatctgaaggtttcatttccctgaaggaagtttgcttctttcaaagtttgtgctttttcactgaggttagaaactgaaacatcctaacttcctaatacaacagatatctactgctggaggctcaccagctccttccttcacttcactatttgcccaacgaagacagattctgatcaaagagggacaagccagttgagaaattgctgcagcacattctccccatgcccttagaaattgttatgattgtcccagaaatccaggcttaaatgatactcaggtgtaatattcaagataagggtctgggagaatataaaatattaatttgagggtgaatcaatctaattcagtcattgtcttggattgtccactaagtataatgtgatattatcattaattaagtatagaaagacagagccaatatcttatactttacttctccatctcatctcaggccatcaccgtaactcttttactttacattcctcctgttgtccagtatcctactagatgcttcattgtgtacttcctcaaatccagcttgggtcattacaatcagcatctccaaattacagatggagacttgcctagctatatgcaaatgaaacatttggacagaaagccagccagaattcatgaacacagattcccttgctgtgctactggtggcccccactgcctcccctgtgagtaacaagagcagttcatttgaattccaggcagttttgcaccagctaagggcaaattctcttctttcacagtcctttggcagcatcaacatcgggacatccaatgtgcgtccaggttccatgagtggttttgaaagcccagagtaagaccatgggctgtggaaagagaagagatgcaactctgagttgatacacatgaaaaagctagggtattagttattagaaggggaaatggcagtccttatatacaatctgtagaaacaaaggaaagaaagcaaggcttcagtgaatgaaacctcgtctctacttaaaataaaaaaaattagctgggcctggtggtggacacctgtaatcccagctattcgggaggctgaagcgggagaatcacttgaacccaggaggtggaggttgcagtgagccgagattgtgccattgcactccagcctgggcaataagagtgaaactgtgtctcaaaacaaacaaacaaaaaactatagttttgaatttttttgagctagggtctcactgtgttgtctagtctagagtgcagtgctcactgcagcctcaacttcctgggctcagatgatcctcccacctcagcctcctgggtagctgggactactggctcatgccaccaagcctgggcaattttttatatgttttgtagaaacaggattttgccacgttgcccaggctggcctcaaactcctgggctcaagtgatcctcctgccttggcctcccaaagtgctgggattacaagcgtgagccactgtacctggccattttttttccccagataaactaacttgagcttcccattttcttgttccaaagatgatagtctcatgaagtgctgttacactgtgtctagaaagtgtgggcatggctttagcactcctaaatattcataaggaacacttcatacttcacatgacgggatcacctgaagttgtcagagtgttatagacattgagccacctagcctcctgtccccaagtataatggctgctgggctttatgggcacagaccaattaggacacaaggtcgcctggtaagttagtaccagttagaaataggagacatggatttatacctgcagggtacccaggaggaaactccctttgggaattttacagatggaagaaggtctgttttttgaaacataatagatttttaagaaatagatttgtgtttaagtaaggttccagagaacacttgctaattattataaatcaacacgtattaagtgtttgctgtgtcccatgtgggggacactagaataattccttccactcctttattttcttttagcaaagttatttatttttaaatgtaaaaatgtattcagattccagtgaagcaaagtgaacaggagatgctatgcatggcgtattaacgaaagaacacgtgtcacagcctattaacaattgctggattgagatgtcagtgtctgtttaattgccttccactctctttgaaataatcattgcccccacttcattttcttcctcaaatcaactttatccaaatcaattttactcttataaaaatgttcaggtaaggaaagaaaggcctatttgatgtccttcgtgtaacaatggccttacgatatgggattttcctccaagtattccttcagtaggaagaatggaaaatggaatttctgtaaaaaagtaaaattaggagaattcctattatgtcctgatggaattttgattttggaaagagaaagcaacctaaaataatttttggtctcattcttctttcttcctcacctctgcttttgtgcagttggttagggctggagggaggatggcactggggatttgcagattcttagcactctgggtcatctgctgccctggcagtgagcgactcttttagtccagagtgcgtcctttgaggttaggcagtgcccttgggtgtccaggttatgggaggaggaaaatgagggagatctgtgaagatagagtcagcggggagagtgggaaaaagcagaaggagaccagaggtgcccaggtagtgctgggcatgggcaggggcacagtgccacctgcaattgcctttgatgcctcttggtgccctgtgtttacttcttagacatctagggagtaaggtctggctctttcccatcttaacccaaggttggttgggactctgcagtctggccaagggatgtgttgtcctgtcccttctcccttaggtcactgaaaggcagtcaggtgagatgccctgtctggcccaaaacgatctcggaccctcggtgctggtctcactctggtgaggctgtccctgatgcttggccttctctccagggaaccagtggatgaggtgctgcagatccccccatccctgctgacatgcggcggctgccagcagaacattggggaccgctacttcctgaaggccatcgaccagtactggcacgaggactgcctgagctgcgacctctgtggctgccggctgggtgaggtggggcggcgcctctactacaaactgggccggaagctctgccggagagactatctcaggtaccctccccggcactccactgggccctcggaagggaggctgggtggtccatggacatctgcagtcggtgtgtgttgccccttaccctgctccaggctcggacaccacctatagaaagaggtcagactgcagaggctgagtctcagctcctgtgctgagaagcagagggcatttcttcctgtttgagaagcatgttctcagggttacgttcctatgtggtaaaatactaatatctttaaaggcaagagaattgtatacccaaaattcagaaaagtgcttcccttggggagcgggagaagctaggggatgggattgaggaggagtacacacggaggatcagagggactgggagtgtttctaagtttggaggtgggctctgaggacctcatttgaatgcttcagaacatatatgtatgttataaattttttttgtatgactccagtattatatgatgagaaatttaaaaatagaaagcatatggagctccaagcattgactcatagcaggaaggcagtcttcgaagagcagaaaggcaaaggccctgtaggcagttggaggtttgagtcccaataccattgcttcccagcttggtggccttgggcaagttatttaaccttcctaagcctcgatttccttatctgtaaaatggggatgataatagcacctacctctaaggatgtggggaggatttgatggaataatgcagataaactacttggcttggtatggatcaaatagatgttagctgctcttacataatcattattttccaatctaatgagcaaagggatggaagaatggaagagtaaaataggaactcgacaacaccaagtaagacaggagctgaggacatctcccatgctctgggccatcctattggccatccgaattttccagcactgtgtgaaagcctttgcctagaatgtactagtgtttctagtttccgatgagctgctgtggaggtaactgtctctgtgccctctactgtcagatctgctcaactgtgtagctgtcagtatttctccgttttcctggagcagagggtctgtgaagcatgcttccctgatacaccaggaccatccaacccatggaagcttgttgagacctcagcgcccttggctgctgggccagcttttcctcccaaacctgccctcagagcattttacattatagaaacaaaacaaaaccaaaaaaactgcaggcagtttcacagtgaaggaagctttacctaaagactgttagaagaagctttttgtccttgaattcccagataaagttcttgcagtccttgcagatatggtggttccgagaaaataagtaggattttgcaatgatcatgcttataattttggtcagttttctttttttttaagtcacagaaaatagaacttggataaatacagacctggttttgctcactcccagtttgccaagtcagtgagaaggcagacgggtaaatgattcccatcggacccttgactccatccctgtcaaatcatttgaatcttattaactgaagtgcagatagagtaaggtcagaagagccccagcttctccctatctctaccgttttatataacattcaggaataaaaccagtgctgcctgggcttgttaatcctttccattttcaaaaaggagaggaaaaaaaaaacagtctgggagaacccaatgttaattaacttgtgtcttggtgacatgaaataattcttctccctgccacattcctaggcaacatgttaattaactctgcattagtgcaggcatttccagccattctttaatatttatattattgttattaaaatgggcagcagagagcttaagatgggacatctcttgacagaggagaaaaattgtcttttgcgtcagggatggtcctttagccaaggtcttgtttactggcattcttagtatatctggcaggatcttttaacaaggcaagttggaggagtaactgaacgggccctctaatgtgtttgagttcttcttcacccctaggataacttgtccccgtgaggatttccaatggctgagttgcctgttacagttcttttccgacatttagcttcaaatattcatgagacccccatgcagaacctcaactctgctgctgtgttgtattgttgggaacccaagagcagctgttcatgtctgtgctgagccagatctccttggatcccttttcactaattcttgtgtgctgggagtggtggggtggcggtgatggcagtggttttgcttttaacagccagcacctgaatctgttagagccagaagtatgcctgccccaactagacccccaacggaccttaaccagtgacagacatggtgggagtaccaagccccgcagccttgcctggagccaggcataacttatattccagggtccctcccctctgagggactttgcctgaggatacaacttggcttggcttcctccccttccctccagcctcccctgctgccttccaggtttttcctgagaatgcctcattcataaatcactggcacatcaatccttgcctcaggggctgcttctgggatatccagcctaagataccaattcttggtgccagaggttaatgctcaagttaggtgtcaagtcccggcttattttttactaatattagaatctccgaatcccagagctggaaggggctacagagaccttctttttcagttcccttgctttacggcttaagtcacagaagcctgtacaggggactccatttgctcaggtcacctggcaagttagaggtcatgctgggacctgaacttgtctcccacatattcgtcctttgtccttcccttcatagctgcctgatgtgggttgtaatttaccccctgacttccctttaataagctccctccttccttaaggatcgcacaccccaggcagttggattcattccatgcacactgttttctcagtcgttcatccttgctcaggcccaaacttaacttacagagcagtcaggaaaccagaactgtctttccactctgtgacctccaatgtggcggttacctgcagctccaccatctgctacgttgggataaaatgttctccccccagtaatgagtttgctcccaggcggtgctttgaaaacactcagagatcttcaaatggaaagcaggattcagaggcaaattagctggccctggcccgaacaatgagctctccactcacagaccacctcttgtcaattccattaatctcgcccaaatattgcaaaatgtgtcaactgcccttaggtcccctacaacctctcagaatgtacccactgattctctgatatcctgaaatcaaccagaacttccaataagagcaagcattcacctaaaactgtcctaaaggttttatgtagaaaccacctgctaacatgctatgttttcagccacgagtgaaaattacttcctgcagcaagactggcgcagctgggaatacacccaagatgtgttaaaacataaccagcgttggcttagcccttgaccatgggtgccctgacatgcttcgtttggttgttttaacagctgagtgaggtggagcctatgatggctgccatttcactgaggctcagagaatcagaggtctctccagggtcactcagggctggtccgggacattgaagctgggtcttctctgcttccggtacttgtgttactgcacttttgctgttgcttctcaaatgtcagcctgcaaccagtcccccggaagtgttcgttaacgcacagactgctgggccttctccccagggtgtctcagttgggtagggaaggaggagggctgagaatttgtttttttgtttgtttgtttagtttttgcttttcttttgagtcaaggtatggctctgtggcccaggctggagtgcagtggcatgatctcggctcactgcaacctccacctcccgggctaaagccatcctcccacctcagcctcccaagtattaatagctgagactagaggcatgcaccaccacacccggctaatttttgtattttttgtaaagacacagtttcaccatgttgcccagggtggtctcgaacttgtgagctcaagtgatttgcctgcctcagcctcccaaagtgttgggattacaggtgtgagccactgcgcccagcctgagaatttgtatttctgtcaggttcccaggcagtgctgatgtcgctggtcccaggaccaacactttgagaaccactgcactgagccctgccatgttctgtctcccaccttgacactgaatactgcctgaaataagtgactgatcaactgaggcttgggagagtcttgatttaaatgtcagaaaagaagtttcccttttgattcatgccagtgggcagcgagggccatgaattaagatcctcccttcatggtggagagatgctgttggtcctccatatctcagaggcacgattagctgcaccgcgtgttttctgtggaactccctgtctcccagcagctggggccccagcgaataatcagggggagatgtgctttgcagcttatggaggtattcaaggccagctctccccatgggtagaatcagtggctgttgacatgatagagtttgggagcctcagaagaatgcccgttttattgcattcctggtcagtaccctctcaaaggggcccctagggtctctctccagctgctcttctgaaatgagggttcccctgggaggggacaggtaatacttgcctaactccttatgatagatcacatcagctgagagccttgcccacagaggaggagccagggggcagcctaggggaatgatgagcggttgctgcagacaaggagagggctcagaaaagggaggagttatgccagatccaaatgccagtttcatctgagttccctctgcctgctggtgaagactgcactagccggccctccttctggagccgaccttccctggcttcctgacatcctgaaagttcggcctcctttctagggctcatccccgagccctgtcttccaggattgtccctttcactgtcttcttagcttttctttcttttgccccaggctttttgggcaagacggtctctgcgcatcctgtgacaagcggattcgtgcctatgagatgacaatgcgggtgaaagacaaagtgtatcacctggaatgtttcaaatgcgccgcctgtcagaagcatttctgtgtaggtgacagatacctcctcatcaactctgacatagtgtgcgaacaggacatctacgagtggactaagatcaatgggatgatataggcccgtgtccccgggcatctttggggaggtgttcactgaagacgccgtctccatggcatcttcgtcttcactcttaggcactttgggggtttgagggtggggtaagggatttcttaggggatggtagacctttattgggtatcaagacatagcatccaagtggcataattcaggggctgacacttcaaggtgacagaaggaccagcccttgagggagaacttatggccacagcccatccatagtaactgacatgattagcagaagaaaggaacatttaggggcaagcaggcgctgtgctatcatgatggaatttcatatctacagatagagagttgttgtgtacagacttgttgtgactttgacgcttgcgaactagagatgtgcaattgatttcttttcttcctggctttttaactcccctgtttcaatcactgtcctccacacaagggaaggacagaaaggagagtggccattctttttttcttggcccccttcccaaggccttaagctttggacccaaggaaaactgcatggagacgcatttcggttgagaatggaaaccacaacttttaaccaaacaattatttaaagcaatgctgatgaatcactgtttttagacaccttcattttgaggggaggagttccacagattgtttctatacaaatataaatcttaaaaagttgttcaactattttattatcctagattatatcaaagtatttgtcgtgtgtagaaaaaaaaaacagctctgcaggcttaataaaaatgacagactgaaatacagtgttgtttatttgattacgacttataatttgggatggcggggaaatgctctgctttttcttttctaaaggagaagcaaataagcaatttactcttaggtcaaataaaaacttctgtgtattgcaagggtttgtatgaggcaggcacatttctatattactggcaattatgtaacaggtcatcatgtagctcagaggaatgtagaataattaaattgttattgtacaatatgcatttcacttcagcattgtatggagtgagtggaaggcaagatcattgcctttgggaaacttgtaacctagaaaggacacaaatacataaagcagattccctttgggagagaaggtaattacctagtttgaaatgtggcaaagatgctgagcttgacacttcgattttccaagacgggtgtctcagggtgttttatgacaagtggttaagaggacctttactttgcggatttaaagcaggcaccttggtttgtgtgtttgccttcccccgagtcaggccgcccccatgaactgatgcagagcgccaccttctggccatcaccttaaagcgcgctagcccaggagggtcccgacgtaggacaaacctagatgaagaagaatatgcttttcaatgatttccttagagtactcggaaatgcaagaagtctaaatgtgttcagttattaagacacaagaaacatgcagctaaggctgcatgttaactataagattcctttaaatcttcctaaggtttgtgatctttgttatttttaatttttttaaatccctggacagagagacaaatgattttttttcttctagaggagaaataatgaagtgatggctctcttggtctgtaaaatgctacaagtagttgggaaatttgactgcttaaggtggcctatttaaaacaaatccagttacattgcattccagctcaggtgatggaaaggcattaccagcgaggggatgtttgttctaagtcagtggttctcaaactctctggggaccagcagaatcaacatcacctggtaacttattataataaagaaacagattcatgggccccaccccagataccctaaatcagaaaatctggggatggggttcagcaatttgtgggttgtttgtttgtttctttgttttgagacaagatctctctctgtcccccaggctggagtgcagtgttatgatcctggctcgctgcagccttgacttcttgggctcaagcaatcctcccacctcagcctctgtagtagctgagactacaggctcacaccaccacgcccagctaatttttatctttttggtagagattgggtttccccatgttgctcaggctggtcttgaactcctggactcaagtaatccacctgcattggcctcccaaagtgttgggttatagacatgagccaccgtgccccacctgtgttttaatatgccttaaagatgattctgacgcatgctcaagtttgagaatggctattctaaaatatctcccagttaggaagatcaagcattctaagttattaatatttgatgcaaaggttaatcactgaaactcttccacatgtagatactgtctacccttggttcctaaactgaaaactttcacatacattcatcactcatttgttctgcacatcatcttcaaaatcaatcacaatttaattcaccattttaaaccatatttacagtaataatagtaatggtaatagattttatctatgcaattatcttataagcagtattaagtaaaaatacaaatgatcattgctttggaaatctaaactttattcttaatccccattgtagcacaacacacattaagattcaagaaatcagccaatatttttgtcatgctcaacaaagcaataattaaccttttccatttgtcaatggcaccatcttgcagaattgtggatgcgcaggcagtctttgtagcacgtcaccccaggggcccaaatatctaacccacaactgacttaagaggaaagacatgtaaagggactcagtgggaccagctcccaaggtctaccctggtggtccttgcatgaatgtgttactgtgtgtgctctagacctagggtcaggagaactgacatctgctctcttccctggtccgtgccttcattaaagcagttggctggaacattttgcatcctcttatctcttgaatgtcttttgccccaaaccagcttccttttattgctgcttctaaaataactactacttttcaggaaaacttggagtcctacaaagttaaaatagaacaagcatctaggagatttatcatctgaagacttggatttgaattccagtggacatgactttaattgcttaataaccatttacatagcacttaccatttgccaggcactcttctagttttacatacattaactccttgaggccacataacctgcctcggtggcagtttctacttcttatcacctgcattgtgctgccaaggaaaatgaagcacagatggttaagtaactaacttcctaaggtcctgcagctgagaagtgacagcagtcgctttaaccaaggcgcttcaccctgtgccctgctgctctctcgaagtctcacctcactgaacagcaggtttcccatctgcaaaagagggagaatgaacaccttccgtcccagattatttggggatatttgagtttaggcagaaatgtaaacaaagcacaatgatataggattagcaccacaataaagcaatgtaaaaagtgctctggaaacgcagataagggaacaattaaattggcccaagcatatctgtctggagtaaagagaaagagacatttgaaatggccttggacctggaagagcaaagacttggggaccttgacttgcagcatgagtatttcagtgagcccagtttgtgtatgggtgttggctggaggccagccagtgaagggtttaaattttgatgctgtcactttctggtggggtgcccttaattgccagtttctacaagatctgggccctgtggacattgctgacctgtgacttgaccttggaccctcagctcaagccccgcctcttccaggtagccccctcaatctctccaatttacagctgctcatccaatcattctcaagtactagaaatcttctaattaataggataaactattaatatgctggctcctggaccaaactgcaaatctacagaatcaggatctcttggatgggacccaggaatctacacattcatcaagcaactcctcttcctttgttgtcccctgacttcaatagaacattgctgctaaaccctgaaccctgagttccacaaaatcagggacactgtctctggtttacccttgccagactgtagcacctgcctggcacatagtgcccaatatatttccttccttcctttgttccttcctccttccgttcttcctccttccttcccttttcttcctttccttctcttccttccccccttcccttccctctctctttctccctttctttcctcctcttttttttttttttttttagagacagggtcttgctctgtctcccaggctggttttgaactcctgggctcaagcaatcctcttgcctcagtctcccaaagtgttgggattacaggtttgagccaccatgcccagcctgattgttatattttctttgttttatttaaaactttgttctctgcttttttctttctttctttctttcttttttttttttttgagatggagtctcagtctgtggcccagcctggagtgcagtggcatgatcttggctcactgcaacctccacctcctgggttcaagagattcttctgcctcagcctcccgactagctgggatgacaggcatgcaccaccacactaggttaatttttgtaaagacagggtttcaccaggctggtctcgaacttctgacctcaggtgatccgcccacctcgacctcccaaagtgctgggattacaggcatgagccgctgcgccccacctattctctactttaaaacttgatttgagaagaaggccttttctgaaactagcctttaagttctttatcatcgctcacagcatttaggccaatgtcatgcatgtggaaaagcaggaacaaatatttatggcatgagtagctaagagagagggccagtaagtaaataaataggggagatgaggttttctataattttaagaataaatggtaaatcaacatcaaagtaggaagtaaaacccaggaatttgcagggaaggggcaaggaagatagaagataagtctgcaacatcttgttattccagaaagtaaggaaatagtaaaaactaaataaataaatgaaatgaaatgaaaaaaatgatgtaaacatgtcataaagacaaaggagccagcttaaaggggctctcaatagccaaatctaagacaatttgattatcaaaacaattaaggacagtaacgaattaaggatagtaatgagttttaagcatggcagggggcagaattcatgagtttattccagtgataaataaatgagggagaaggaaggactcgtgtttacagcagaatcttggatgccaactggtaaatgggaagacagcatgagagctggaaaaatcattttgcaactgtgacagttaagatagaatcaagcaagcattatcaatagatgctaaatttcaacagagaaacaaagaacaagatatggatatttggatggtcttcaagtaccttcccatatattcctcactagctatgagaaggaaaaacgctaattacacagtagagaaattggatagcaccttgaccaggtgatctatgtggggcagatgagcatctcaggcctccagatgtgatatctgaaaaggacagagaggatcactctttttagtagttctgctgagaatatataacatgtctaattatgagacaaatcattagacaaacccaaaatgatgaacattctagttttaaaagttgatggggggggagtgtggactgtattctttgaaaatgttcatgtcatgaataataaagaaggctgtgggaatgtttcaggttaaagaaggctaaggagacctgacagctaaatccagcacctggcccctgtactcagtccagtgctggagggaacaaattctacaaagggcatcattgggtcaagtgataaagtcagaatatgaacggatagattagttaaaaagtattaggtgttaatgtaaatgttactgaaattggtaattgtactgtgtttatgtaagagaatgtccctattattaggaaatgcaccctgaaatatttaggagtaaagtgatagaggcaggaagaagagaaattctaggcagacaggggtgggtccctggcaaaaccccaccttccagccaaaaaccctgcaaccctctgcccaaagtgagaacttctatccctgtttgcccactctctccccattgattctttctgattaatgtctttttaccaatccaatgttgccttctctaaaactacctatggcccactccaccccccgccatcctgtgcctatatagaccccagactcagtcggtagaggagagaagcagcttgactggagagaggcgacttgacttcagagggagagctggacttcagaggagagattaacttcagagaagagccggctggagaacgccagatctcagggaagattatctgcttgtcccgtcccctctccagctcccctctccactgagagccatctccatcaataaatacaattctccacctccaccatccttcaagtatctgtgcgacctcattcttcttggatgctgaacaagagctcgggacccactgagtgatggtacccaaaaaaggctgtcacactggccctttgccctcactggtggagggcagcctccccatgcgatgaggcgagaggcccactgagctgacaacacaccactgtccacagacaccggagctaagagagcattgtaacatgccctctggggctttgggggtcacaggcattcccacctgggcactgctgcagggcctgcagggagcctactcttgccgctgcccaaagcagccggccagatcctgcacttgttcacccacgcgttcctcgcaagaagagcttgagcatggcgggccgagtgaacagggcacgcctatcgcaagtctgatgaaggggtggagaaaaactcctgcatcaaagagccattatatatgtaacttaaatagttgagaaaaaagttgtctctgtgtgtgtgtgtgtgtatgtgtgtgtgtgtgtgtttcaagagagggagagagagagagaggagagaggagaaatgataaagcaaatgagatgaacatattaacaacaggtgagtctaggtaaaggatgtactggtacactatttttattcttgcaacttttctgtaagtttgaaactatttccaaataaaaaggtatttttttttaactcacaaatctcggctttttcttgttttgggctttttggtttgattaggagaagaacaaggcagataaagagaggaaaaaatatagtgtagaattcagtaatgtactactgttcatttgtcacaactttaatgtacttttgaccttacaaatgtacctcaagcaagtaattcccctctccacacccactccccataatgggaagaatgtgtttagaagggttcacttagtgcttatttctgaagcaggttatttctcaaccttataaaatgagattaccagaaattctgcatttcctttgtaattaggatcaagatgtaatcatctggccctgaaatgtgtatattataggggtaggaatctaagctataatgttttgtatgtacatctaagaattgagttaaaagatgtttcaaagcaatgaagaagtcacatccattctctaccagtggccatgtattaattctcccggaaaatcatttctccgagttaatagaatctttgaagctaaatcaagtcaatttccattgtcacattgtgatgcttttgaactgggctcactgaattatcctatttgatgaccactttaaagatggctttgttgtgagcctcagcaaacccacagccgtatctctgtgtcagcctccccaccccaccccattcattcaaatcacttaatgagcagctcaaggcaaatgccccccgtaactacatcccaggcaaaatagatatatagtaggtaaaatagcctatgtgatgtgattgaaagaacactgaaatcaggaaacctgattttgccactaattagtggagtgtctttaggtaggtctcagtttcctcatttgcaaactgaggagcttacagtagatgatctctaggaatttggtagtcagactttggtttacagacaggtaagtatggaatttgggaggaagcatttgtggtagccactccccaaggtgaccctagtgattcttgtttcctggcttcacctcctgtgttgtctccattcacatggaatagggctaacttgtctaaccaataggatattgaaatgatggaatgtgacttctgaggctagatccagactgttgcttccaccttgctgtctcttggatcacttgttctggagaaaaaaaaacaaaaacaaaaacaaaaacaaaaaaacagctgtcatgccttgaagctgttcagacagctctacatggagctccatgtggtgaagaggaactgaggcctcctgccaccagccagcactcatctgcccatcttataaatgagccaccttgaaagcagagcctctggcccagtcaaagcctcagacaactgcagtcccagcttatatcttgaatataacctcgtgagaaacccccaagctggaatcagtcaaccaagctgttcttcaatttctgccctacagaagtgatacaagataaataattgttgttttaagccactgagttttggggcaatttgttatacaataagcttttattttgtatgcatttttaaattcttattttcccagtcatccactttttattatattgtacaaaagtgtcaatccatggtagattgaaagttaaaaactccagagttcgaaaagcgctgatcagaataatacaatcttagatgaaggctgaaaaagtttttgaaattatccagcccatcctctcactgagtgaataacttgtctcttacagttttctagcaataaaattctaattcttggcagcattatcaccattaatgttattaaacatgacttttattgagcatttgccaggtagatgcactatcctaagtattttatggtctttacaccaactctacacagcaaatatttctatcttaattttacagaagaggaaactgaagcttgggataaagtcaagactttaattcatcgaggtcatctcattctagactatattgcctctagcttcattaatttgtttatctcccaaaacttaattttatagaaccaaataacatatatatattttcagactgctggaaattactttctcacttattttaaggaaaaagagacagaattcaaatcctaggccaggtgcgctggctcatgcctgtaattccagcactttgggaggctgaggtgggattgcttgagcccaagagttcaagatgagcctgggaaacatagcaagaaccctgtctctataaaaaataaaacaagggctgggtgcggtggctcatgcctataatcccagcgctttgggtggccgagaggggtggatcacgaggtcaggagtccaagaccagcctggccaggatgctgaaaccctgtctctactaaaaatacaaaaattagccaggcatagtggcacatgcctgtaatcccagttactcaggaggctgaggcaggagattcgcttgaactccggcagcagaggttgcagtgagctgagattgtgccactgaactccagcctgggcaacagagaaagactccgtctcaaaaaaaaaaaaataaataaacaaaaaataaaataaaataattagccgggcctggtggcacacacctgtggtcccagctacttgagggactggggaggggaggctgaggtgggaagatagcttaagcctgagaggtcaaggctgcagtgagccaagattgtgtcactacattacagcctggatgacatagtaagaccctgtgtaaaacaaaaatattaatatagccaatgtaaaccaagtgttaaaagcatttgccaacaataaatgttttcattgcatttaatgttacctaacaaaatgggagggagtgtaaatgtataagagtcatctttggagacaaatggatgtggttctagttagtcttctcatttgtaaatgaagataatatacttacattagcatatcattgtaaaagttatgggtaatctacatgaagcaatgagaacagttgctggcattcatgcatgcatgcattcaataaatatgtattgagcgtttccaaaaggccaggcactgttcttggcaatggaaatacagtggtgagcaagatagcaaggtccctgttaccacagcacttacattctagtgggaggaaacaaaataaataaatacacaagtaaatgaacaaatttatttcagaaagtgatcaatgaattaggataaaatagagcaatgcgatagaatgtcaagagatgcagagagatgtcgttttagaggagggagggcgtggtcagggaaagcctttgtgaggcagtggctttgagctaggaccgaatgtcaggaaagattcagtcatacattcagaaacagaggaaacaggcaagtgaaagtcttaagtcaagaacccacttgtcgagcttaaagaacatcaagaagtccaaagtagctggaggaaaggtgatacatgagaccaaatcatgtaggatcttacaaggctgaagatgagctcagattttattctaactgcagtggcaagactttggaatcttttaagcaggagagtgacatacatactctgattagtgtgttgaaagatcactctgtgtgtgcatggaggaccctagagagacgagctgggaggctgttgcatgatccaggtgaga

SEQ ID NO: 1406 - DNA, 2304 bp, Homo sapiens
gaattcgtccaaactgaggatcacaagtctccacattctgagtaggaggatgagggtctgagttaggatttgggtcctgcagggcttgctaaggaatcccctgatggcctaggattccacgcagagcacatctggtgtgagagagctcgctgcaagggtgaaggctccgccctatcagatagacaaccaggccaccaagaggcccagccctccaaaccctggatttgcaacatcctcaaagaacagcaacgggccttgagcagaattgagaaggaaatacccccacctgccctcagccgttaagtgggctttgctattcacaagggcctctgggtgtcctggcagagaggggagatggcacaggcaccaggtgctagggtgccagggcctcccgagaaggaacaggtgcaaagcaggcaattagcccagaaggtatccgtggggcaggcagcctagatctgatgggggaagccaccaggattacatcatctgctgtaacaactgctctgaaaagaagatatttttcaacctgaacttgcagtagctagtggagaggcaggaaaaaggaaatgaaacagagacagagggaagcctgagccaaaatagaccttcccgagagaggaggaagcccggagagagacgcacggtcccctccccgcccctaggccgccgccccctctctgccctcggcggcgagcagggcgccgcgacccggggccggaaaggtgccaggggctccgggcggccgggcgggcgcacaccatccccgcgggcggcgcggagccggcgacagcgcgcgagagggaccgggcggtggcggcggcgggaccgggatggaagggagcgcggtgactgtccttgagcgcggaggggcgagctcgccggcggaggccgagcaagcggaggcaggagcggcggcgacggcggcggcggcggcggcgcccgagcacccgagggggtccgagccccggcagccggccagccccgcgccacaaagggagcgcccccgccgcccggcaccccgcctccctccccaatgtcctcggccatcgaaaggaagagcctggacccttcagaggaaccagtggatgaggtgctgcagatccccccatccctgctgacatgcggcggctgccagcagaacatcggggaccgctacttcctgaaggccatcgaccagtactggcacgaggactgcctgagctgcgacctctgtggctgccggctgggtgaggtggggcggcgcctctactacaaactgggccggaagctctgccggagagactatctcaggctttttgggcaagacggtctctgcgcatcctgtgacaagcggattcgtgcctatgagatgacaatgcgggtgaaagacaaagtgtatcacctggaatgtttcaagtgcgccgcctgtcagaagcatttctgtgtaggtgacagatacctcctcatcaactctgacatagtgtgcgaacaggacatctacgagtggactaagatcaatgggatgatataggcccgagtccccgggcatctttggggaggtgttcactgaagacgccgtctccatggcatcttcgtcttcactcttaggcactttgggggtttgagggtggggtaagggatttcttaggggatggtagacctttattgggtatcaagacatagcatccaagtggcataattcaggggctgacacttcaaggtgacagaaggaccagcccttgagggagaacttatggccacagcccatccatagtaactgacatgattagcagaagaaaggaacatttaggggcaagcaggcgctgtgctatcatgatggaatttcatatctacagatagagagttgttgtgtacagacttgttgtgactttgacgcttgcgaactagagatgtgcaattgatttcttttcttcctggctttttaactcccctgtttcaatcactgtcctccacacaagggaaggacagaaaggagagtggccattctttttttcttggcccccttcccaaggccttaagctttggacccaagggaaaactgcatggagacgcatttcggttgagaatggaaaccacaacttttaaccaaacaattatttaaagcaatgctgatgaatcactgtttttagacaccttcattttgaggggaggagttccacagattgtttctatacaaatataaatcttaaaaagttgttcaactattttattatcctagattatatcaaagtatttgtcgtgtgtagaaaaaaaaaacagctctgcaggcttaataaaaatgacagactgaaaaaaaaaaaa

SEQ ID NO: 1407 - DNA, 477 bp, Homo sapiens
atgtcctcggccatcgaaaggaagagcctggacccttcagaggaaccagtggatgaggtgctgcagatccccccatccctgctgacatgcggcggctgccagcagaacatcggggaccgctacttcctgaaggccatcgaccagtactggcacgaggactgcctgagctgcgacctctgtggctgccggctgggtgaggtggggcggcgcctctactacaaactgggccggaagctctgccggagagactatctcaggctttttgggcaagacggtctctgcgcatcctgtgacaagcggattcgtgcctatgagatgacaatgcgggtgaaagacaaagtgtatcacctggaatgtttcaagtgcgccgcctgtcagaagcatttctgtgtaggtgacagatacctcctcatcaactctgacatagtgtgcgaacaggacatctacgagtggactaagatcaatgggatgatatag

SEQ ID NO: 1408 - DNA, 96598 bp, Mus musculus
  misc_feature (16721)..(18461): n = a, g, c, or t.
  misc_feature (21639)..(21658): n = a, g, c, or t.
  misc_feature (31832)..(32269): "n" at positions 31832 through 32269 can be any base.
  misc_feature (48053)..(48314): n = a, g, c, or t.
  misc_feature (53839)..(53964): n = a, g, c, or t.
  misc_feature (58514)..(58548): n = a, g, c, or t.
cgaactcagaaatccacctgcctctgccttccatgtactgagattaaaggtgtgcaccaccactgcccagctgagagagaggaactcttagctactgcttctggggatgcaagttattacagctatttggaaaccataagaagcttcttcaaaaacaattctcaaaaatattttatatatatatacacacacacacacacacacacacacacacacacacacatgtatatgtatgtgtatttaaacaggggactagaaaatgggttagtttttaagagcaatgtttgcttttccagagggcctgggttaaattcccagcaaccacattacagctcactattgtctaaaactctagccctggagaacccaacaccttcttctggtctctgttgacacttcatatgcatgatgtacagacatacatgtaggcagaacatccatacacataagcaaaaatgaagattaaaaactatttttaaaaacctccaaactacaattatcatatagtattggacaatatgatatcatattgagcaatctaagaactgatcatatcctggttgtggtggtgcatgctggtaggatttgctgaaggagatagaggcaggaggatcatgagtttgaggccagcctgggctacacattgaagaaaaataaaaagaaccaatcatatatccaaaggaaataagataagtttattggaaaaaaatgcctgcatgggccagggagctagctaaggtagtaagcatgcccattgctgacgtgcctaccaacctgactttgatccccaggaactatgtggtagatggagagaacaaactcccgaatctgatctcctttgatctctacatatatgctgtgtcttgaatatagcagacacacacacataaatgaaatgaaagaaaacagaaagaatgtacttgtacccctatttgaattgtagcattactcacaatagtcagaattcaataccaaacaacagatgaatggatagagaaaatgtgatacatatttgcaataggctattacttagccattaaaaaggatacaatcctgctgtttgctgcaacaagaatagaccaggaggacattctgtttagtaaaagagtctagacataaagcattgtagtatatgaccttgctcatatgtactacttgtggaaggtgaccagacataagcagtgttgggtggtgggcaattgtcagagagtgggaagaaaaggcagggaataggttagttaaggagtgtgagctggccttgaccctgaggcatggcaaagccttcctttggtccaagggtggatactggcagttcgtgcagaaaatgtctaccatagctttctccttctgagtgtttatggtctgaggactgtgcccttacagggactgcttctactgagattagctaaacctgttctttttttacagctgtataccataaaccttcttccttgttcatctgtatgtaataacaccatctctttgcacagctgtatgcaataaccaaccctgcgcccagtctggtcagccctgtttaacaaacctgctgacctttcaggatgctgaggcatctccagctgatagcccagatcaccaatcccaggtttctatctctgttccctctgttatttcttcattttcctcactaccctactctgtccctggacccctgctagataaatcaaagggggctggggctggggctggggaagataggacagggtaacagtgcttgctgctcctgcaaaggacctgggtgcagatctcagcacccacacagtgacttgcatgacctgcatgcaagtccagagccaggggattcaatgctctattgccctcttctggcttttgcggactcctgcacacacacacacacacacacacacacacacacacacacacacacacacacacacacaaaaaagtagagaggagagagagagagagagagagagagagagagagagagagaggagagagagagagagagagagagagagagagagaaaacagctgtgcattcggattgttcccactcttctcctattctgattgatgttgctatgaacattcacttacaagctgttgtgtgactgctatgctttcctttctcttgtgcagacatctagaaatgtatgtatgaagcttcttaattctgacctgcctggggttacaagtgacttagtactacaggctgtatcctaactcaatattttttttgaaatgaacgacttggtcttaatacatatagtttaatattaaatgacatcactgatgaatttgcttaaaatctatcaggtatctgtatactcaccttgtctgatctttagagacatggatattccacacagacaacagtgctaagaaatatgttggctccacattttaaaactatatatatatatacatacatacatacatatatatatatacaccccaagaatctgttatgtaccagatagagtgttcagactggaggacttaaagagcaaatgatctaacatcagaaatcattttaaattttgccctgtgcatgctaaattctactcaaacctctttatttgtgtatttgtggatgttactatttgctaaatacacacctcaaaaactgtgccctgtctgatgaacataaagttttcagaaccccacaaacaagtttcagctcttctagagaatcctagaagaccacaggcccctttatcagtaagcctttaaaatacactctacttttcccttgtctcaagaattttttgcttctacttcatttataaaagaaaacagacgatgagacttgtaatttaatggctgttattaatcaaatttacttgtggattgggcatttccccataagtgtatggaaagttgtttattttcctccacttcacagcatggattaacatgtcatcagacttattggttcaaaacgtagttcataaataggttagcagggtaccccctttcctttcaatattggtgcctcttcccttgtgatatgctctgaaaataagtgaagcagaggagaattaaaggctaatttaatccgagaacctactttctaatactggtttggggtcaggctgaacatattattctaaaaaaactttttttaaaaaatcagaagcaaggacagacagctaattaaacagcgagattttctattctaatgaacggctcctcccaagtctcaagtctaaagcagctgcactgaaagactttgccttttctgaaggtcaaactactattcaagagtgcccaagttaacagttaaacgtaattagcaaagtcttacaagactctttcttttcaaagaccaaacaaatttacttactattaaatggagtattttcattttgccatgcaatgttttctcccttttggacagaagagggtactcagacccttggggttgaaagggcctttttctaggagttgaagtctttgggaaacgatcatcatgttttcttaaaaacccttttcacgatacgagtatcatatgcctgtttaaaaacttcttcttctttacagaatggctcatttgattatggatagatgatgtagtctctttcttagagtgtaccagatgttgagtaaggcttagtctgtctttaaagagattcacttttccctcccctcctcacatctgccttctccccctccttgtcttcctccactcctggccccctttctcttcctcctcctaacaggtactacaagaggtacacacacaacacagcacaacagaacaaaacaaaaacaaaggctaattttgaaggaaaagttgactgaaaatacctgaactgccccttcactcgctgtattaaagttaatataaacggttgagtgacttagagccatgtagtatgtaatatattaatggagaaacatggctgcatgaagggacaggtgcctgttggaggtaagaagctgaggcaggcagagggcttgaaagcatctgggcggtttgctaggccacagctgcatactctgcactccacacctggaaggaaacccagagtatggggtgaaagaccagctggtgactgtggtttgtgagtgccaagcagcaagtcttggaactttgtgagttccaaacagaatgttgaaatgaagagaaaggcagacagcaaaagctctttgcattccactggcttccttcttccccagtgctccacagagctctgggtaaaacaggaggcgactcatccagtcagtaactgtctgatagtgatagcccaacattaactaaccaacgcctacactcccagtcctgcttctctgggctgttcctatcttaatgatccttattgtgaaccatgaacctcaagtgctgcatctgggctgaactcatcatataggttgatcatagcctgggaaggtaataattggagagaaaagcaagtagttgatttgcttcaatctgaaaacatcaccataggacaggaaaagtagaaaagttacaggcttcacttgattggtgactgatttaagtaaaatttaatgctgggttagtgactatatttactgtagtctgcaaaagttctcaagttttctactatcttttcctcatgcacaataccttttgcttttctggttgatttgggacacataaatagctttaagaagtattgccttaagaagtcttattgaaatacatagaattctcatagcctggagactattggcatgaaagttgctaggttattactagcttgtaagctaaataatttttaaaaaacaatttattgaaacctaactgtcttcaaaataactgcaaaaatattacaaaagagaatccactatcaataaatatttcacatagggttctcttcatggctttttaatgagattgttatatataaataaagaaatgtatactttttttttttaggttacatgatagtgtaggttttgagattgagtttcaaataccctgagacataactttgtggcattctaacctaaataaatcatttccctacaagctgcaaaataattaatttttaactatacctatatatgattttttaaaaaaacatggattcctgaattcttgcatacagtagagctccaggcgaggcatagtggaatatgactgtgttcacataaggaactgagggctcctgagttcaggtgagttgggttatttcgtgagacccccatctcaaaacaacaaagtagcttcccgaatctcctttgacaccaggatttcatttctgctgtaataatgatagtgtgataataaaaagtcggcaaggcatttcaaggctcctggtccagttcgcctgccctagcatgttaggataacagtcttatagatgggaggcaggaagtggggctggatggtctactttgtggtaaactcctaactttgcatgtttcacaggaaaataatgtgtaagaaattaataatccttatggttttgggattccagacagcatggacaataataccatcaggggtggcacagctgccttttccatatggaaaaaaagcagtagcaaatagtttttgtctatatttttaaaaagcatgctaagtgaatcctctactacagagctacaaacccaacccagtttttttgctgacttttgtaagttctgtgttgcctgcttggtgtggtcactgatacttcatcccagttccctctagtccccaggtgactaagtagcaggctcttctaaattctcgagatcagacaacaaacgaagagcctccaatttgtgatgttttctcttggcggaacaggatgtcctgggcctggatacaggaaatgccttccctttctaagcttcagactaacttctcctctttcctgttttttctttatttgtttttttaaattccagctctgtctcgtcttgtgtagactattgagggtctgcaggttatcgcttctcctggccatccttagaattctaagacctcatgactcaataagtgctgaacacccctctctttacccagtggccaagttagagctacaaacggtacacaaatactcatcttcaaagatcgtatcttagcctgtaagaacaaaaaccacacagaacgctcaaacacaatcgtcttgtgagtgtgcctatgactgagttttgggccattcagtgcaaaaactccaaggactgatgctactactatttggaatatctggtggtgtttagacatgtgtgtccaagagttttataaaattatccaaaagaactatatcctctttcttctaccatagaaggttaaaaaatggccaggaaagacaatctaggaactacatagacaatatcgatttctctttactgatatttctcatgctcaatggtagtccatcacaccaggtaaaaaagaagttctctccaggacagaatgaattccgatttgagtgtcagcttgttgtcttgccatttaagggggacttgaagaagctatttactgaagcattcaaggctcactatgatagtcatgtatgactgggctttgtgactagaggaaactagggatttgtgttccaacaagctgacacttggtttgtggccaggcacggtctcagggtgagctgctctattttcctggccttggtgctcatgtttttgttttggtaaagctcaggtaaggtttggaagctctttcgtgtcctgtaactcaatgactgtctgggccgacaaggctggagaggattagtcacatcactctctccacaagcacacaccttggatattaatggtgcagctggttgtcagccttgctttttctgaatcctgctttccttggcacatcttgctttctttagtaggaggggacctgagggtgggtttctcagcagatgaatttagaatttagtccaagtctgcagccatggactgctgacaaaaactgtttctatttgtggggtttccctggagtaagttgctgtgctagctttggactttcttcagactcagtctctaacactgtcctgactgcaaagtcctctgacctccctacgtgggcatttcaagggtaaagttacacatgggtacttttgtggcagattatctttttttttaaactaggcacatgtatggtatgtgtttatataaacatgtttgcatatgtatagggatatttgttcatggcacatatgtatgtataagcatgtcaaggcccagaggtgctagttgcagattaaatttttagtcaatttaaaaagtaaaaaaaaagtcaggaaaagtcatttcaagtgtgtggtccaacatatctgaagccttgcgtttgaagtttaggtgcttgaaactcactgtgtattttataagtacttcacatcttctttagaactagctgcatcctcggtgcatacatggctgatagctcctggattggagatgcatgtctagaaaaattcttcccaagaaaaattataacagagaagcagcagctcaccccccacagacacacacaccctctcttcagctcataaaggagtataagccactcattctagcatctatcaccgttagcattgccacacatcaactgtctgacacaaagaatctctttgagccatagtagaattagcaaaagtattttcctgtgatctggcagcttccagaacttgccaaacgttgaacagcactatgtgcacacactgacaaagcaaactgatctgagcagctaaacggcccaaatgctcagaaagacatgcttctgttgccttctgtatgctcaatgcaccttccattacaaggttgcaggaaactttttttttttttccaaatctgcaaaaatgtgcaaacagaagggtaagcctttttgagtcaaggggactggagtacacaaatgtaaggaagacatggtctctcattgaaacttccggctggggagggaagaccatggataaactacacaaagggcttgtgtctacagtgtggcgaggatgaaaatgagctgccggtgcctctcaactatggccaaggattcttttgcaaatccacattagaatatcatgaagcaacccccacccgttttgtgggctgatttgttgaaattgcttgaaagttagggtcaaagggacatggaaagtggatcaggttgtttttatcggggaaaggaaaaaacaacagatatgaaaggtgtggattcctctgtggtgacaagttggggtttttcccgaggacagacaggcagcttgaagcatccccacttgcctcctagattgccaacggtgccttttggatataacttaacctgcatgcctttagctttccatgtgctattgctgaaatgatctacttaaattacttagaaacaatgcctgggccacaggacgcacccgtgtgatgcccctaatggttaggttgagcactaaatatgcaataattgttacctattttgccctctattgttcttaaagtttcacgagaggaggcaaggctgttgaatcacgtaataggaaaagagaacaggcaaacattaatgagtatcgaatccctctctagatggcaaacctggggtaaagagttcaaggtgatttgcctaagggcttagaggctgctcctaaaataggaggggctcctttaaggaggtggtgatggaggtcccaatgggcaagtgcttagtataggtacaggttggagttgcaaaggagaccaaagttaacctgacttgtcctgttctttggccttatacctgctgtatacaaagaggttacaaacccagaatcagtgacactcaatagcatgctgtacagaaagcaggtaggctgagctctgtagaaccatttgttttcattacaaggattactgttaacaggtctttagcggtagcagacagacccccatttaggatgttatgatatattttggcgcgctctcatatcctggcacagtgcctggcctggcacccagatgacacccggggaacgtttgtggaatgaatacgtgcagtctagtttgtagggtgggatggggaaggagacagtaggataactttgcctgtgatgcaagctcttcttcccaagaccaaagttctatgcactttgcagcctggagcctacactattttctggtgtgtggaaatccatttcagcccagaggcttgggttgaagactcgcagcacgcctcgcctggacgcactcatcttagtataagcagttttctctgaagcccttatttttttggtttgcggtttatttactttagcgtttacagattccaggagcataggggtcttagaagcggggtcaggaccgaggtcgcggtttgtatttctttcctgcttcgcgatcacaacatcagcaagtcacaacatggttcctttatttgctcactcgtcagggtagcgtttcttttacctcctaccgggcgacgaaagacagacccagctcgaattcagaaaagggctctcacacgattaccccgcatcctcaatagcagggaccaccccatttccagacttagtttttcatgcagacactagcaggatccaataaaaaactagaccagatttaataaagacaaacttgtttctttaatccttgaccgcaaacactggcgtttttgtgcctcggatttctgaaattcttggctccaggacacagggcgcgcgggggtgggtaaatagcttgtaaaaacttcccgaagcagtaatccgagctcttcctctctctccggaccctagtgacacctgactttaggaagggaagatacaagtcaaaagagaagggttcacagaggtaggggacatacccagtgggtcgggcttgccaaacctggggagtccggtgttcagacacaagttcgcaacccgagccttcagcctgggcgcctcttccccctcccacccctggtcagcgcgcgggagtctatttagaacccagccccggagcccaggggattctgggacttgtagtccctctgcgcagccccaggcgccggcacgacctgggactcggactacattgcccagggagcttcccggcctatataagcggtcggcgctgcttcaaagtgcagtaaccatgtggatgttctgctgaagcgtttcctcaagcctgccggggtgggaggagaggaggaggtggtggtggtggaggaggtggaggcagagggtggagagagagaaagcgcacgccgagaggaggtgtgggtgttccgctcccatcctaacggaacgagctccctcttcgcggacatgggattgcccagcggctgctaacccctctcctggtcctgatcccccaaaccggcgtggctccccggtcaccaaggtagctgctggggccgggcagagggcgcggggagttggcactagctcccgtgcgcagaagtttttgccctgatcaccgggagttcttggtggctttggtggctttgcatgcacttggcgtgtattttggggcttctttccctgtgaacagttttggggggaggtatattttttttttcaggcttaagtaaccccaaacgtcctcgactctagtgaccggtttcaacctccttccccgtattgaaatggcattcccccaagttggaaacggttggagtgtctgcaggaaatagtttttttttccccctggggggggtatttgagggggtgtcatatgagttcgctcaaggaaataatctttctaaaaatgtagctagccctgttgcgctgctcagctggtaggataatgcatgcgtgggggtccccgtgggttaaaaaaaaaaaaaaggaagaaaaccggaggaaggggggggggcgatgaggaaagaagtgtggacggagctcgtgcccaatgaggacgcgggtttcacatacttggcctccacgcggggaaacaagtgctttgggatctcaacacgtcccttacttccatccaccttcaatccccatccggcgtgttcgaagtttctgcgtgtctgatctttctggccagctactgacgggaaataagcatgctgggtttgcttttatttgggggaaagagatccctctgacttagctgctaaatttggaggggagtgggatctgcaggaaaagcggaggctataaaagtcaaaacttggatttgagaatttctgatagaccctcgcgagatcccctactcagtcttctttctttgttaaatatttaggagctgattacaagggaccaggatttgcatccttggctgggcgtccattggctacagagtgcctgacctgggtcaggtgagtgtgcgagccgagtgctgtagtcaaaaatgggtttttgtcctaagcattttctaagtcctcttgtagctgccatagaggtaaagtagggaaaagaaagacaccgtggtcaaaattggtcatggtcttgggtgagtaaaggtctagtgacagccacttttgaaggtcgctcagaagtgaagcatggcgtggtgaggggggtggggtggggaagatatcggtaagcgaccacaatgtgcagttaaagggactgtaaagtgggtggtcccttaccagcctgagaggagccctcattagtttaattcccaaagatgcagaacttttcatctgccaagatccctaagcaagagtgagatacccctccctttcacaaactgtcactttgttctgttcggttgtgggcatgcctgtacccagagtgggctgggctgcaagaaatgaaagtgacaaattgaaagaatgagaacttaaaaaacgggaaggaagagcttaaagaatactacagtcgcttccagggtttcactggagccacctgaatgtcaaggaacccagcgggcttctcttgctttgggacctgttcctggatgaggagctgagggcaggcagcatttctgtcagtataatggcatatttaaaaccatcacagcccgtttctagaaaataaagcttctgtaggtacaggtgccactatggtttcaggtttggccattggattttgtttttgtttttgttttcctaaaatgtctgggaattgagtaaacaacaagttaataggggtgggtggtgagctgtgggcagctggtccttggtaacttctttaatgtcctaaatatttagctgttccctgggctacaatctttgggcttttctaattagtgaataaaagccagatacttcattatggtagtagaatgcttttgtttcctgttgataaggtcctcaggaatactggcagagcgggaaacatttggaagggaaggctagttcttctgtggacttaagtctatgttgattaaagcttggggtcagccttctctttgaagtacattacagacgaggttaactggtccacagactcttctctatcttttgcctaaaaataatgaggctgtcccattaggtagtagcaagccagctgcagagctgtatcacagaagaccttagatgtgggtaaagaaaccaagatacagaatgaagtcactgggcagcccgggcagtaatgtgtaccgcttgtgtttaagtttatggagaactgggcggggggtggggggagatgctaggaaaaatagtaaacatattgatcttaatgcattaacttatttatgtctcaccaacaatgtacaagctattcttagtttgatgtatgaagaaaattatagcgccattggcagggataaaagactgtaggtatttgtaggaggatttgacgttgggctgaattcattttggaaagctctgtgttgaaagcttgaatcaggacagttaaggaaaaccagaggaaagccagtgtctccgtgcagccttaggcctggctcatatctgaagtatagcgtggtcattcacatcacggcacctgagcaggtttgaaggagtcaggtgtgtctctacgtgaataattggagagcttaaaccgctttagttttacctgtggaatgttggtagcttgtcctgtggcctctggcttgcctggcaactagttgtatgcagtggttttcttctccattcctttctttctttccccatttctttcatggatgtgtgcattacatgagtatacggggcaagcacaatctgctcttgactaaatcaattcggaacagaaaatctcatcaagatttccttctaactaagcaagggaagttctttatgttccaaatgaatcactccggcctctccatcgaagcccgcccaggaaagtcactgaggcattattacccatgcaaaaaggtggctccttttgccagcctcccttgaggaatgggaggagcagtggtggcttagaagagaaataggttagtgccacaagaacaatctgttgactttgccctcaaagtggtttcagctgcaaaaacactagaccgtggaggtggggtgggaatgggacactctggaactaattcaatggtgtgcaaggaaaggacttgagaaaacttcacatggcttcttagctaataatgatctcatggagattctgttctactttttttttttttaaatacaggcagctcttttaaaacaaaccaaatgaaacaacagataccaaatacgaacaacagacaaaaaaaaaaaaaatcttccaaaatgaaagcagtcctggagttaggtttttaggtcaagctgtccttggatacttctaattaaggaatctacacaaggacagtgttctgtcttgtctgctattggtttgatgttttaaaataaaatgcattgcacttacagatccctgatacctagaattgcatgcagttgtgttagctttttttttttttttttttttttttttaatgttttgctgttgaagtttgaggactacacttaggcttgaagtcaatggtatgaattacagtacttgtgtgggtccttctacctgttagagtgtccaggagtgttctgagaagattcctagtgggaaaggagctaaatgaacacctgaagccgccacctggtagaccatgagattccctaggctgctcagagttgaaatcaaagctgtcggtgaacccgtggacctcactgactttcaccctgctacaattgttaccattcgtgtgtctctgtgttgctgagtccacagatttcttgaatacctgctacgtgccaactgtgctctaggtgccttgggtatggcaatgagcaatcaagttggttcctcggggctttagtaggagccagtgggaagtgatcagcgaaaacaaacaggtattgtagtatggcaggtgcagagagttgtggagcaaaagtcaacaaggaggggatgaacagagaataagcgagtggacaagatgtggaaaaatgggagtgcttgtgtattgttggtgggaatgcaagagatacgtcttagatacaacagcatggtagctcctgaaaatatgaaacagaattattatatgatttgacggttccatgtgtagttctctgaggaatttgaagcaagaactgaagcagttgtttgatattgaaagtgacctcactaatgttagcctaaaggccaaaatgaaaccccaaagtatctatggatatatgagcgaaaaccaaagtgctctttttatgttcagggagctgttagtaagcccagaaaaggaagaaacttggttcccagtgtattcaaaccaaggacacactttgtaactgaaagaagccaggcatcagcaggtacacattgcatgatacacatagtgtaaagtggccctcatgaatattcagattgatagagccagaatggggactgatgaagttctcaggagctacagaaaggggaaggtggattaaaggacacaggctttctgttttaaacattaaaaacgcctgcaaattgatatgtattatctaaataaaaaatgaaaaacaaaagtttgaagggtgttaagggtgtattagggttgggaggtaaggcagggttcttcactgtggtgacattgaggacagcgctgaaggaagtgagccagataaccatgtagatgttctaggagtccagagcagaaagtgcaaaaaccctgaggtggatggaggtgggcatgttggagacagggctcaggaggctggagtggctgcaggtaggcagcagggggaaggcttgaggtgggaggatggtcagggtccaggggcaaaggccggattttgcagatcagcgcttctgaggatttctgaaccctgacagggtcctcagtgtggttttcatttgcagcattgctgaactccactgtgctctctaaagggactggccaggctggcaagaccacataccagctggaaacttgatacagggggcatgagggagacctagatttctagactggtctgtcatgtgacatttcctggcactgaagtccgcttaagtaggaaaggagtctcctctgctgaagaatagagctggcctttgctttgctcatcatgtcctaagacccatctggtgggcctggggttcctgtggccgtgtggccaccctgctgcccaccagacttcacttggggaagtcctgacaatgagtgccatgttctcaccatccctaggtgtgagaagctccacattagtggattctccttgaaagagtcaccctcacaggggcagaactcaaacccctcgcttcatcactacagagattacgggttcattgtcaaacactgggaagcaatggccaagccacacagcaaaacaatgaatctgtcttagccatctgagactcagttcccaggcttttcaccatgtgtagaaattagggctggagagatggctcagcagttaagggacccaactgctcttttagaagatccaggttcaaatcccagcacctacatggcagctcacaactgcctataacttcaagatctgacactgtcacatagacaaacatgcaggcaaaacaccagtgcacataaagtaaagggaaataaataaatacatatttgaaaagttagatgagtgtttgaatctcttaatcacaacacctcccacttgctgctctctttccttttgttcacagttgcgcctcttttctcactagccggaagatacctgatacctgtattttttttttcctccaaaagtctgtccctctgatggtattttatttcattaaaaaaaaaaattgtattttgggagttttgcctgcatttatataagtgcactgcatacatgcccggtgccctcagaagccagagcaggcactggagcccctgaactggagttccagatgctgtgtgccatcgcgcaggtggtgggagcaaaacctcagtcccctggaaaaggagcaagtgctattgactgctgaaccatccctccagcccccgggaagagaatttaagttatgacatatatgggatgagtagagtacaaaaatactacatcctccagagttcgtcattgttgcacaatccaaattgtcctttggggaaaaagaaatgacagttgaaatgtatttcacttgtaaactctctcagttgttcagaataacctaatcctgtgaagtaaagaggtactctcttctgtttttttgtttgtttgtgtgtttgttcggtttttaaatatgtgtgttctagagattgaactaagaacgccatgcttgcaaagtgactattttcagctatttccctaccactgtttacttctaagaaaacttttaccatagaggagttcaaacataatttagcagtatgtgttgtggtgcctgcaaggactgggaaaggcttctggatttaatggaactggagttatcggcagttgtgagctgtacagtgtaggtgctgggaactgaacttgggtcttctgtaggagcagcaagtgttcttagccactgagttgtctctccaatactcgacagtagcttcttaccgcatggaannnnnnnnnnnnnnnnnnnnnnnnnnnnnnnnnnnnnnnnnnnnnnnnnnnnnnnnnnnnnnnnnnnnnnnnnnnnnnnnnnnnnnnnnnnnnnnnnnnnnnnnnnnnnnnnnnnnnnnnnnnnnnnnnnnnnnnnnnnnnnnnnnnnnnnnnnnnnnnnnnnnnnnnnnnnnnnnnnnnnnnnnnnnnnnnnnnnnnnnnnnnnnnnnnnnnnnnnnnnnnnnnnnnnnnnnnnnnnnnnnnnnnnnnnnnnnnnnnnnnnnnnnnnnnnnnnnnnnnnnnnnnnnnnnnnnnnnnnnnnnnnnnnnnnnnnnnnnnnnnnnnnnnnnnnnnnnnnnnnnnnnnnnnnnnnnnnnnnnnnnnnnnnnnnnnnnnnnnnnnnnnnnnnnnnnnnnnnnnnnnnnnnnnnnnnnnnnnnnnnnnnnnnnnnnnnnnnnnnnnnnnnnnnnnnnnnnnnnnnnnnnnnnnnnnnnnnnnnnnnnnnnnnnnnnnnnnnnnnnnnnnnnnnnnnnnnnnnnnnnnnnnnnnnnnnnnnnnnnnnnnnnnnnnnnnnnnnnnnnnnnnnnnnnnnnnnnnnnnnnnnnnnnnnnnnnnnnnnnnnnnnnnnnnnnnnnnnnnnnnnnnnnnnnnnnnnnnnnnnnnnnnnnnnnnnnnnnnnnnnnnnnnnnnnnnnnnnnnnnnnnnnnnnnnnnnnnnnnnnnnnnnnnnnnnnnnnnnnnnnnnnnnnnnnnnnnnnnnnnnnnnnnnnnnnnnnnnnnnnnnnnnnnnnnnnnnnnnnnnnnnnnnnnnnnnnnnnnnnnnnnnnnnnnnnnnnnnnnnnnnnnnnnnnnnnnnnnnnnnnnnnnnnnnnnnnnnnnnnnnnnnnnnnnnnnnnnnnnnnnnnnnnnnnnnnnnnnnnnnnnnnnnnnnnnnnnnnnnnnnnnnnnnnnnnnnnnnnnnnnnnnnnnnnnnnnnnnnnnnnnnnnnnnnnnnnnnnnnnnnnnnnnnnnnnnnnnnnnnnnnnnnnnnnnnnnnnnnnnnnnnnnnnnnnnnnnnnnnnnnnnnnnnnnnnnnnnnnnnnnnnnnnnnnnnnnnnnnnnnnnnnnnnnnnnnnnnnnnnnnnnnnnnnnnnnnnnnnnnnnnnnnnnnnnnnnnnnnnnnnnnnnnnnnnnnnnnnnnnnnnnnnnnnnnnnnnnnnnnnnnnnnnnnnnnnnnnnnnnnnnnnnnnnnnnnnnnnnnnnnnnnnnnnnnnnnnnnnnnnnnnnnnnnnnnnnnnnnnnnnnnnnnnnnnnnnnnnnnnnnnnnnnnnnnnnnnnnnnnnnnnnnnnnnnnnnnnnnnnnnnnnnnnnnnnnnnnnnnnnnnnnnnnnnnnnnnnnnnnnnnnnnnnnnnnnnnnnnnnnnnnnnnnnnnnnnnnnnnnnnnnnnnnnnnnnnnnnnnnnnnnnnnnnnnnnnnnnnnnnnnnnnnnnnnnnnnnnnnnnnnnnnnnnnnnnnnnnnnnnnnnnnnnnnnnnnnnnnnnnnnnnnnnnnnnnnnnnnnnnnnnnnnnnnnnnnnnnnnnnnnnnnnnnnnnnnnnnnnnnnnnnnnnnnnnnnnnnnnnnnnnnnnnnnnnnnnnnnnnnnnnnnnnnnnnnnnnnnnnnnnnnnnnnnnnnnnnnnnnnnnnnnnnnnnnnnnnnnnnnnnnnnnnnnnnnnnnnnnnnnnnnnnnnnnnnnnnnnnnnnnnnnnnnnnnnnnnnnnnnnnnnnnnnnnnnnnnnnnnnncctggaggatgcctgcccagttctattagtggccttttttagttgctgagttttcatggctcgttcttacccgttgaagctcatctttgaacatggccctggcagccttctctctttcagggagatagaaagacaggctaactcaccaggcagaattctgacaaaaacaacgccaagaccaaaaaaacccaaaaaccccccaagaaccctgtgtttacatttgaggatgcttttatggctgtggacctagaggtacaaagagaccacaggctacctgtgggccatgaagccacatggagaaacacgtgcagctgggttttaaacctactgttgttagacacttgggggaactgacattttagaaagtttgaagacttctttcctcacagaacttctgaactgctgggtagaaaaatgttctcatcagaaaaatctgagcaaggaaaaacagcccaggcctcctagtgtcctggttcatttgcattgggggaggagctttgtctggggaatagttttattttgtaaaggcagcttaaaagcattccatatctatttatgaatagaaaaagacttaggaacgttcatttatttgccttgtctcctgtgtgtgtgtgtgtgtgtgtgtgtgtgtgttatattctgcctgctgtgtacttcaccagtttctatatcttcaagtcgtcctcttccttaggatcttggccaaattcctcctcctctgagctgcttttccttttcctggaggcttctgtcatttgaaaactctgcctcttgagctcggttttcttcgtaggggttttttgttgttgttgtttgcttatccctcaagagtactgaacatattggaagagctcacaaaatatttgttgaatgaagtaatccatacttgagatccgctctgtctttgaaggttgcaggttacctctaagaagaaactaatgtttagtccctctctgctgattcaaccttttccgagttgtcccattactttggaaaacccttttggtgcacaaagagatgtgaaaaacatgtagaaatatattacgccgcacctttgggaggattttaagctgttgttcactacagctctctagaggatgctcggttggggaatgtctagcagtaggtagcagcagagtggaagtgagaactgggtagtgaaaccaactgttctcagactggttggctctgctctaccacaggatgggggctcctgcaccacactcctgtgtactgcatcttggatatcaccaaaataggcaacatctgtgtgtctttttcctcttttgtagactaggtataaaaatgcaggctgaggggtggggtggggctgggagacgcctcagtcagtaaagtgcttgctatggcaagaaggaagacctgagttcaatcccctgagccacacaaaaagtgaggtatcatgcttcatgttggcattcccaaagctggggagtgggagacagctcccaggaactcactggtcagtcagcgtgtcttggtcatcgatccccagattaaatggagagagcttctctcagaaacaaaacaaaacacccaacaaacccaaccagattgagtttcctggggagcagcactcaaggttgacctgtggcctctgcgcatgcgcacatgtcctttcttcccacctgctatggattgttgtgaccaacgatctatgtaagcagactgggaaaaaaaatgatttaaaaaaaaaaaaccaagataggtctcagctaggaggctcatttggccttgtcaggagacatttttcctagtcccaccggtggatcttgaggtgaggtgcgtgctagtacccaatatagaggcctctgttgaggttcattctgctatggtgctgaggaaaatgtctctattgtgaaaaaactgctccaaaagtcagtcatgccggggttgaggaaccaacccatggtctgagtagatttgtagatatagtaaaactcatctcttaggaaactgacttcactccatggctcaggttagacaggcagaggactttcttctgaggctagtgccaactttaaaaatgtttaagtcacatttctttcttctttccttcctttcttccttccttctgttctctttttctttctttcttttttctttcatatctgcatgtgcgagcgcctgcaatggcacgtgttcagaggtcagagaacaacttgaaataatcagttctctttccctgggggtctaatttgagttgtcagttgtggtaaaggcaaaaaacaccttgctaaccctttatactggctctacttgaccgtcgtaccaaaataaacaccctttctctcttctcccaagagctcatcttggtctctgaaggtctgaggtctggcactggcttctcataagctatatgaatgacatccataaactcactggacagttgaattgactggctgctttttcccatataaaatgaggactgttggctcaatgcttctacccacaaattctctgggactttaaagagccaagtctgagcttgtggctgccttcttttacagcggtccttgagggggcattagaacagatacgagtacaacatctttcttgaaaaataactttttgtaggaggtgtaccagtttccagtgtagactactttagcaaatgtgtgtggaaggccaaatagatttgtgagtgaaatatccgagggacagctcactggagatggaatccaggaattggtgtacgctaggaactgtggtgtagcctgggccctaagggacatcatttaaacttaacagttcctctgagcttcagatagagagtaactgtttctgagataatcttaaaggaccttggaacttctgagatggtcacttcctttgggatgggccaaaaacgaaagtatttgaatatggtttcctatgtcctgaacagtgtttttttttttttttttataacagaataaattctatggtggcaggaatgtggtgttcccaaggatggtttttgatgggacaagcctacgtgtgaatgtgtggtgaggctggggtggcattgtgtccaactcaaaagtcttctgaggctggttcaacgttcacagtacaaatcacattcagcatctctgcccagaggatgttcagaaattaaccgggagagagcccagaaacagaaacagaaaggaaacattttcctctatcttggggaaannnnnnnnnnnnnnnnnnnntcaaccataaatatgttggggctttctctaccctgggtttacagtcatattaccatatatgtacctgggtaaggacatggcggggagacttctgctcctctggacagagtttccttggcctctggccaggagattgatcacaggccagccactcttccttcttgggacattcccttttcttccctttcagagtccttatggcttgtctttgtctgattctgcccatcctttatccctcccacctggagactgcttaacctaaaagtgacatggtgccttttagtactggtccctgacctcagttctgagagatctgcttgcattccagatgctcttaaacatgcctttatgcaaaaggcccttcttaccgacctaccattagacaaatttgttgatgttgttattttttttaaatgagacaacaggaaatcagtgctagaggattttggcaagagctcattattttttgtgctgcagaagaggtatacaagcatcttccctcctcttctgtgcatggtacctttggttttattaggaatagcatggagaatattctgctggagtcggtgctggcaggcttttatatgtgtaacttgcagtgtgtccctttcctcagactcctcatcatttgaagttgcacggaaggacttatcctcaaccagttctaagaagcctgtaagcaagcagcagattagaaaggacagaaaacagagaccagcgctgtctcccctgttctctctgccgtgtgctaagcacacatgctattttcttcccttggtttaatctgcagcatgtcaccttcctacaggagaggaagctgcgggccaggaaactaagtaactgtcaaagtgaccatgagtagaggcaggagtggggctggactgtgcacaagggaagaacctgcaaaaaataaataaataaataaaataaaataaaataaaataaaataaaggcccatgcttcatgctggcttatgtccctgtggcctggctccattcgtctaaccttccccttccccattatagctgcatgctttatggccggctgtttggttttgaaccaccccaggccctttcctgcccctagggcctttgtatcatcactctttccttctaccatgctcttctgcctgactcctacccctccccctttccctaggatggcctctgtcttcactttaggatctcaacctaaatgtctcagctgggttttctctcaccagtcagaattaaactgctgccccattcgatgtcacctggttttaatttctgttctctctggaggtactgttgggggtgtgacccagggaattgtgactccgaggcagctgctctgctgacctacccccaaggctggctcgaattctttgcatggatgtatagtgaccaaattcaccctgttttgatcttgtgtgtttactgtctgcctggacttggatgtgtgccttaggacaggatcctaacgtgcgtgttgaatgtgtatgtctttaggacaggatcctaacgtgtgttgaatgtcaggacagagggtctttctaagttttgaccgtctttcattgtctttgtgggttgagtcacagccaatgtttggccaatgccagtcaaagagaaattcaactcagtattgttttcaaattcttgggtcccacaagttctttacatgcttaaaaacttttgagaaactccaaacacctccatagatatgagatatgatatatgttagcctatatctatcatattagaaaacatttttagaagttacacatgagcatagtaagattttttttaatgctaaaatgataataccctctagaacaaaacaaagcaaaatttaataagatggctgggtgtgatggagtatacctttaataccagcactccagaagtagacaggtagatctctgttgagtttctggccagtatgctctacataaaccccctctccctacgtctctggtgttgagtagatttatagagcactttaaggcctagttgaatggaagagtcacatagtgcacatctgcattggtctccagtctgtagtgatgccatgtcttacatcttctgagggtctctaatgtacacacaagggactagataaagagacagaacaaagaagtgccttggtaatattgtgaaactgattttgcccttggatcttgagagaaagggtcttggggaccccattgaagccactgaattatgggacaaatgaactctttgagatgttgggtatggcagggaccttctgaaagagggaggagctgaaggctttggtagcatgatacaacccaacatccctaaggctggaggctatatcatttcttccttaccaggaagaagtactttttagcattcttagcaaaacaaaattgctctgagttcttgtaagggggtagcgtgtgtctccgttcagtttctaaggagcagcagagcaaacagcctaggagctatgcagtgggcgccatcattcggggactgagaatagcagcttgaaaataaaacctcatcagctgccactccacagcgtctactggactcttcttgcagctctgggctacaatagtagtctactatagagattagattgtcttcgctgtaagtgtagctggctggtagggtgcttgccaacatgcatgggtcacagagttctgtccccaggactggggacaagaaatccagtgggaattaaatcgacttgaggttttgtgcttctcagtctctgctgcagtcggagctagaaggatcaaggtggacgctgttgataatacagtggcctgctgagatgtttaagaaggtttagacttgtgggggagtattttatgtgtctctgggctaaagcatgcaaggctgtcactggggaggtgcatatcagagcatctgtgagggacttggtcaccaggaaatgaatggtgtgctgaggaagcttctaaaagccccatgtttaaggtcaggttgtcagtggacttatgtcctccccagttactgaaaggcaactgttcagctccgatagccaggtgccttcatcttagcatagaaaatgcttgctattcttggcacaaatgtgcaaatatgtggttttttatttttttcttgttttgaaagtaggccttattttgtagcctacgtagacctaaaactcgtgctaaagtccaggctcgaacctgtggttttaaagtccacggactggtgctaagttggcttctgtgttccttgagcttcctgtccacttgtaaggatcttatgacagacgacaggtgtggtgttctggtgacttcgcggttaatgaaaagtgttctaatttagacttagtttgaggagttcccaacttttaaattctgagttgtgtgtgtaggcgaaagttaaaaaaatttttaaaggaaaagtaatgtaagtgctattaatttaagtgtgtgcaggagatgggaaaatgataataaatgagttttttttttgtcacccccccccatcccccaattggagcttttagaaaatgaaatgtaaaacctatctggagctgcttaaaattaaaggaacatagttcttctttcagtggggctgtgcttcagcctgtttttactgcaaaataggagaggtttttaaataattaaattatcagccctttgaagagctctctcccatccccccttcccagcagggcctctggtttgatgtgggaagaagagggagagggagtggagttgtgggttgactctctgggtggtgtgaattcgggtacctgggacatgctgtactggcaacagacaccccatgggcttgcagaggatttaaatattttcgggcctgtgggtcctccccccccccttgcattttttcttagcactagcagctaagtaagaagtgtatttcaaggggaatcatcacaaggtaagggcattggagaaagaacgttgaggtcagtgtttctgtttcagcttggttccgagatgcaagagtgactatcagagccaggcggtatgcttgagctcgttctgtggattgttggctttatgccccaaatactatggaaagttgcaaagaattcctccctccttccacctgcttagtataagggagctgtggatcagagaagctctattgcttaaggacacacagccagagtgctcgcatttgagctggtgtttctaagcacactcttgccagcactcaggagccattttggactcgaggagtagaggtcaacagggcagatctgagagcagttgtcccagattaaaaagaggttggtttcttgttcttttatttctcacagaaatctaaaaagtgccactagatttaagttctgtgtatcactgatccaagagtttacaaacttagctttaattaactttagaagataatcgcccccaaagagtatcagcaggcaactttggccacagatgagaggccaccctggtgacatggaatcccagtgaggctgatcaccacattccccggtgctaggctgttacagagtgaggccattgtggtcctctccttgtgagtttgcagagctgagagaacaagtcagacaagtgatggggagacacccaggaaggtgctcgggtgcagtggagggaagtgtgtatatgcaactcaggtttgggaggagagtggtagcagggcagcagaggtgtgggagttagccatgttagggagggaagggagtgccataggcagtaaggattctgggaaatgtgcattctgttgagggtgggcgggagggcaagcagggctgcagtagatttggggtatttgggtttttttttgaggtgggggtctctggtctaagttacaaggctgtctgcaaaggcttgcaccctcctgtttccgcctcatgaatagtttggactacaggtgtgcacgctgcacttgtctctgattttggagagttgtaagaaatgatctagttgctgggtgtggtggcgcacgcctttaatcccagcacttgggaggcagaggcaggcgaatttctgttcgaggccagccttgtctacaaagtgagttccaggacagccagtgctacacagaaaaaccctgtctcgaccccccccccaaaaaaaaagaaaagaaatgatctagttgatgtacctacaagattatgttgactgcgttcagaatagactaaggggaaacccatgtctttcgaaagataagtagatgtccaggtaagttggatccacatcccacatgtgcctcaagatagttatggctcaacacaaaattgtaaatttacttaaaacatgagggtttttttttttttcagttttgtttttgctataactcaattgtgtagttttggcatgtgaattttaaagatgccaatcataagttgaaatgtcagaaggctagacctttcaagaatctagttaagaaataaaagggacggggtctggagagatggctcagcagttaagagcactgcctattcttccaatggactcgggttggttcccagcatctccatggcagcttgcacctgtccttaagttcagttccaggggatctgagactctcacacataggatgcaagcaggcagaacactaatatgaataaaataaaaataagtcattaaaatgaaaaaaaaagaaagaaatgaaatatggggtggagggatggctttgtggttagagcacttgctgctctggcagaaaacccagtttcagttccagcacccacatggcagctcatgactgccaggaactcagccctagaggattcattgccctttcctggtctctgagggcactaaacgcatgtagcacacatgtggacaagctgtcacacatacatgcatattaataaaaaaataagttgaaaaatggtatttgggactggggagatagcttagtagttaaagtgcttgccattcggaggtacggatggcagttcaggttcctggagcccacatagccacctgcctacaactgcagccttgaaagatagagacagaagatccctgggcacagcttgtgagactagacatcctggagactctgggcttgatggtgattcctgatgtcaacctcatctgtggatgtgtacacacatgcatatgtgtgccctcacagtgctcccacatactcaaacttatgtacacacacacacaccccacaggcttacacacaagtgaaaatggggaaaaaaagaaatgaagctggctgagactgacggaagcgaggcgaggttaggagaaatgaagggcttagtaatgttgagatttaaaatcacgaggagtggatgttcaagccaagctcttcagtctttcatctgacagcacctactcttattctgtgagcacctactgtatgcaaggcattgctgttggagatacagttgtgtagtagagagcagagctctagaattgcctatccctcaagggtgtcagacaagcatcacaccgatagatgtgagcttgtgacagaagcaagctgaggagagaagatctcacaggcagagtttgtggaagttgcagaaggatttgtcttcacccagtgatcgtgggaataatgattgaactgagagccgaagggcttgctttcactgaagctaggcaggtgactgtgaatgccataaaacttgtgatgatgctgtgggcaaccaggagcagaaccctagatgctgttgccagtgacagatctgtggagatcctagttaggcaaaggggccagcagagcacacagagagtatctgggaggcagagaacaacatggacactgagtgccactccctctgctctgttctcagagtagatctctgtgtttgtgtgtttgttcttgccctgtccctaggagtgcagccaaacacccccttttctttacccatttcttaggcagtgagaagctcggacacagggggtgggaactccatctggctgctgtggccgcagtgtgcagaagcaccagggcagctatcctctactctggccagctattctggaaaaatcctgttctgacaggtgccttaggcagcaatcagccgggggtggtgatgggtggtggcgcttgtaggtcatagagatggtgacacagctttataccaggggcattgctggtgcttgtcacagtcatgtacccaaacctcaagatgtatatagtgtagagcgggggacagcagggtttagggaagttgtgaattcctacactgagtaactcgcagaactgggagtcagtgctggtgctttgagcccggagccttctgtcttcctgtacgctgagctttggagaccatactgtgtcagagtggaaggaaagtggtaagccattgtgagagagctatgcagccctcacagatttagaagccattgaaacttcagaagacaggtgagaaggaaaagttttgggaggtggctgcctccctgtggggacagcagtaattgctgtgtacttaagcaggagctgtgagcttccagaggagactttttttttttttttttttttttttgctggattccagcagtgcacaagagacatgcatgatgacatgcttagccagtggttcaagccactgtgtgtattcagtctatagttctgtgccttcagaaaggcctgcgggcctcatgattgggagttgagagtcgttctgtaccgttcagctttttcccagtagaggaattaggaaggataattatctttccctaaagtaaaatggatcatcacaggtcttacaggaggtcatttgtggcaacgcctagctgacattttattacagaggaaccccccccccccccttcatggaggtcgagatcttagattctttcagaattagtctttatcttttaactgaagaaaagagctagcagtgaacgctgaaagcatgtcagctcgtgtctcaggcactttgcattcatggcctcatcccttccctatgacatgtctctgaagtctatccccagtgtagagatatgtacagaggtccacatcagccgagaagtcttggtgggcttagcatacaaaaataccttacacatagagagtcaggatggagtcataggtcgacttagtcgactactaagcctgttttgtagagctgttggcatggagccctgggtgtccttgtagtgttgggagctgcagttatgacacagttaggacagcatggcaggttggtacctgctctgtttttctcacagtgaccgggtcattgtgtttgaggactactgggagccctgcgtgtggctggtagaggcatacaggcagaatggtcctcaatcagataaagaagtggcctcccacccagctccctaacaacaggaagtcttcctgatgattgctgccaggcctacttcctacctagtccctccagccccaaacgcctgttgttttgactctgctagccccggttttccctttcagtacacaactgataattgtttcagagtctctcctcctggccctctcctatccctgtgtgccattaaaggcagagcagcgggagacccaggtgtttccaatcagacctggaagtggttcacttactcaacttatccaaggagcaaatcactgcctgatgcccctggggatgaatctgccctaatgatccttaatttttttttttttttaaagttgggacctttggcagatggcccagttgaggatcattaactgtggtgggtgtactggcctctgttttcaggggaaatataaactatggcaaaaggttacttgttcaattatcttgtctacttaataagcatatgggcaagaaagaagacgcgcaacctttcttctgacttaacaaaagtgttatatttgactaaggtaggaaaatgaggaattcagcagtaggaaaaaaatgaattagaattgtccataaagaaaaaaaatgtggagggaggagagggtgtggcaggatgtattgtatgagagaagaataaattaaaaaaaaacattaaaagtgaacagttctccactgccacccagagaataagaacagtggacattttccattttcccagggattactgttgatgaagaagcccatgtaagaactcagtagatctctgtgcctcctgtctgactaattatctatgatgaacatgtgaacctttctgttcttcagtttccccaacaacaaaagaggggtggacctatgtcacgccgtgccacatgtctggaggattctgagacaatcttattctcagcacagaggtggacacgatagtccttgacaggcgttagctattcagcttaatggtggggctgaagcgttcaagctccaagctactcagagagtttctcatctgctctgatctcagaagctaagccgggtggggtcaggctggaacctggatgggacaaataggactgctgtagattcttagtgtcaactgaagtccaggaacctgttgtgattgtcaggttgcaggttcactcattctgtcatgtcttgccattgctgtcatgtcccaggccttacaggttatgtcacactctgctactacagaaccctgggttgtatctgctgctttacagtgagagaaactttcagtaagatacccagaagaggatgtagatttgaaggacaatatcatgctgctgctgtctggcttggccttcatcggagccaaatgccctttagaaggatacggcctgggaggagagctttagtcactccgaattggccctgcttgtcttgcctaagcacattcctgccctcctgcatccagcagctccccgttggtcctctgggaggcccgtatgtacagacacaaatttggcctgactcagaagtcagtcaaacagaacttcttttctaataaccagtcctacagccctacagccgggagatagctacataacagagcactggcttagcatatcaagatccgagattcgatcccctagcgcagaggaagcaaaacaatcatcttgtgcttttattatacatggtctctggcctcttcatgtaaaattatcacagtgtagggtggaggggatggcgccgaggtagagcactagcccagcatacatagagctctgggtttgatccctagtgaggtatggagtgccaactttaatctcggcagagaatctgagtcagtagtctctcttgtgttcacggccagcctgggctacgtcatatgatgctatctcaaaacgtttataacctctctctctcttcttttctccttccttccttcctccctccttccctccctccctccctccttccnnnnnnnnnnnnnnnnnnnnnnnnnnnnnnnnnnnnnnnnnnnnnnnnnnnnnnnnnnnnnnnnnnnnnnnnnnnnnnnnnnnnnnnnnnnnnnnnnnnnnnnnnnnnnnnnnnnnnnnnnnnnnnnnnnnnnnnnnnnnnnnnnnnnnnnnnnnnnnnnnnnnnnnnnnnnnnnnnnnnnnnnnnnnnnnnnnnnnnnnnnnnnnnnnnnnnnnnnnnnnnnnnnnnnnnnnnnnnnnnnnnnnnnnnnnnnnnnnnnnnnnnnnnnnnnnnnnnnnnnnnnnnnnnnnnnnnnnnnnnnnnnnnnnnnnnnnnnnnnnnnnnnnnnnnnnnnnnnnnnnnnnnnnnnnnnnnnnnnnnnnnnnnnnnnnnnnnnnnnnnnnnnnnnnnnnnnnnnnnnnnnnnnnnnnnnnnnnnnnnnnnnnnnnnnnnnnnnnnggaggcaggcgcttctccctaacggtttcccttgccgcatctggcattcctgccgaaggaggagagtgcttccagaagtttgcctgccgaggaaaacttggcacccagagaagagctgaaggggagagaggacattttccccttccgcatcattacaactcttgtggcctgtgcagtaaatgatttattggagtcagtagaaggggaaaggtttccagagggctctgggctgagaggaaacccccaacacttcatgcatcaacatcccagatgcagaggaaacgcagggaagctctgcaagccccaccagggccgctgctctcctcatagctgagcgcgtttgctaaaggtcagttcaacggcttgcagttggctcctgttcctccatggtcatggccggggtgaaagatgttgttaggaatcacttcaatatttttgtatatacattgtgtgtgtgtgtgtgtgtgtgtttaatagtttctgggctttgtagagatttcctggaatagaggaatatttttcttgaattacttctacctaatcccagccagggaatcttagtattgattagtgcctgaatcggcatgtttgggcctggacctggctgggcaggggtcttactacatccaggagtgtttcctggtagagaaggcaaaactgatgcagcatttgtgtggagtgtgggctatcggcctccgaggcattgtgattatcactcagtcccaggtttccttccattaacgtcatcttgttgctttgattccttaacccagcccccatggctttgccagagctaagtttttaccaggtgcttcctttgacttaccattccctgaggcacgttgaatatgttaatgtgtcacacgtcagacttcccagctccttaatcactacagagttcttggctgggttccctggtgtctgggcagttcagtattagggaagggtcctcaaagcgttgaatctgacctgggcgtggccttgttagaagccagtgctaatgtgattggaatacccagaactttaatatgcaggacagaatgtagttgcagatgtcctcacttggctcatggaatcgcctgccagtcaaacgcctatttaaatttgaattttaagtaatgcgctgggggaaattgagctaagccaaatcttagtgacattttttccccctcatcatgtctcttctgctaacagtgttgcatgttttactttgtctaggctttccaacacggacatgtctgacaaaatgtcgagtttcctacatattggagacatttgttctctgtatgcggagggatctacgaatggatttatcagcaccttagggtaagagcatggaagtcctgatgcgtcggggtttgtttaagacatcataacactgatttgtgtaagataagacagttatcacattaagtggcttttccaaggctgcttgaaagcacagttagcaaatcctgcgttagtcacttcacctttcacacagagacatttctgtcagtttcgaaagaacaaaacctttttagttaggtctctattcactttgaatgtattataatctactcttcttatgtaagagggaacgtacttaagaatagagaatttaaaaaaaagaatagggaataataaatatattgactaatatacacagatccaaagaagtgcctctggctttgtggaaaagccttttggcttgtcttttcacacaagtgcccgggtgtaatcggagccaagaccattactgctcctctgcccatctctcacctttgaagcagacccttttctgctaagtaaccaagcgcacttggaagtttcaaattgcactaagttccctaaaacgttttctcttcatttgtgcttcctccaatcagtcatcactcaacctgggagaatagaaacacatgtgtgcctctcggctcagtttcccttctccctcctgttcctgccatctgagggaggaagtgtaaagtgtagtagcccctgaagtcacgcagaggcagaatgcagcatcaagatggctcattccagaataggcaggagtggcctagcgtctttgtgtaggaaggagtagctaggcccgggtggcattgttgattttggcaagacgtagtctcaaataaatgggggcagaaggcaggctaacagattttccaaaaacctcattcttacagcagccagaatgtccgctgtaattacagctattactggaagcgtgcttattttctggtatttgtgcagagtgagtgttgttaagggctcattcagggtactctatccccactgaggaaattatttcagataacagaattatatctcagttagacctgtgttctcattctagagagtttattttcagaagtcaccatggcttcttcctatgccgggtctctgtgtgtagttgaccttaccctgaacgtttatctactgtggcttggggcaaacaggcttcctgctactctggcctctccagtgatggccatcttggctcccgccttcctctttttattccctgtggttaattcaccccgttcttatttttcagcattgacttcagtactgtacagcagtggtaagcactctgagcccggtgggtgttcactgtgtgctgttctgagtcctgggcctcccttattcccctaactcccaatcagccctcttcgtggtgagcactggggtcatctgtcatcagtgtgtgtggaaacgacacctgagtgcttcaggcaggtgcctgcctgcccaggtctcagagctccaaaggctcgggtctccaaggccagggatgctaacacataacctttgtagggcaggttttttctggtttccctgtgtgctccctgaggtctgggtgcctgtcagacctcagctccatcatatacctgcttttcctctggggcctctgaccttatagttaacttggctcagatgctgaggtcccccctcccccagcccctaaaatcttagcctcggtcacatcttccctttcagctccattattttattatcacattattattttgagcctagtctgaccttaaacttgtagtactcctgcctcggttttctgagtgccatgattataggtgtgcaccattcttaaaattcttaggtgtacatactctgctttgatatttttctcaagaatcatatgatgactccctcataaagctaggatgtatgttttttaaaactttggatgctaattcttccttcagtttttaccttcaggaatagcttgcataaaacctggcttggtttggggaaaaaaaaaccattgatttggaaagttaaatttgaaccctctttccccttctttgaaatgtgcttaacatttaaggaataccagtcatagacacaacgagtgactgtcagtcttagtgggatgtggtgtctggctcccagctctatcctgtttatatagactattgggggttgcctctcagtaacttgacgcctccattgaactttagaattctggcaggaccttggagagccagtgtatgtgtgtggatctacactaacctttggtgtgctgctgaaccacctctggagcttgttaagaacccaacttcttagatcacttcctagagcagagcttcagtatgcctgggcaggagggatgggttttgatggggccccctggaaccggtatatttagaatcagtatctaaatgttctctgagttgagaatccctgagaacaatttgttcgttttacagatgaaatattgagacaaggggagagtgaaatggcatactgtcatgccattagctggtatctcagtgttatttacaagctgtgatcaatgaggctgttcctcctagcatttcctcttattaggacttaaccattagtccagctttgcattatgtatgtcctgaggggccaagtccagtgtctgatacatagtaagtaagtattctaccactgaactatgtcactagcactggaatccgggcccaaccttttaaatattgggtcaactttggtgacctttctgaacttatgttctaattccagagcccagggtagagatttttcatatgtgcacattatacttttcatttttgtagaaaaccctcaggctgcttgctgaccacactgtatcctgtggctcttgtaggtgcatagtttgatcttgtattttgagggcaaaggtgggatactcttcatacttggattcacgtcccttgacagacactgagcatcacgatgccttgggcatcttctgagccacaaagtagggagcccattgcattgtctccatggagcttggttgggacagtggaggaggagaagcaggccatttttaggcaagaaaggcttgtgtggggtatagtttcctttctgaaatgaggattagaatcagggctttgaatgcagggcagttttggaggaggggtcaaagttgaatatttaatggcccctggcatttggaataagaggcagcataggccgaaggaagaagttccaaagatcctagcatggtacctgggacaaagtcccttggtaatgtgtaaaatgagctggctctcacagttttaggaacttggaaaagtcatgtaacttcatagtgtctcaaaagctcaatgatgtgcatatatttttagtgattctcctaaaaagaattatgcaaggtaaattggtttttagtgaaatcagaatttgagttatctgtctttatgtaatctgggactattacttatttgtaacttgattgtgcttttgaaactccaagctcttccaatttgcactgggttccctccacctaaagatgctctactcactgggtactctccacctaaagatgctccactcgctgggtactctccagctaaagatgctccactcactgggtactctccatctaaagatgctccactgactgggtactctccagctaaagatgctccagttttcatctccccacctttgttttggctctttcaacaattccgatacatcttcttccgtccaaagcttcagaaggcatctggcacagatgactcctgcctgttctttcttccttcctagattataccttatttatcagtttgcttttatggcttctatacttaggccttgagctctttcagggccgaggcctggctcactttagtcctcatgccaggacttggtacagtccctggcacagagttggctcctcgccaactgttaggcaaatgcattaacgtcttcctgtgtcttccagactcagcagtattgtatgctgtgcgcaaatctcccacagatgtggttctggggaaagtggctgcagagaacagtaacttgacctgcctatcacagagtgctggcccttgggttacgattatttcactccttgcacaggaaacctccttgtccaagagctccctgccagagggacatggcagtatcaattttgcataggaaaagccctggactcctccatttttacatactgtttattgagggttttattttcctaggcttgtttttgatacagcattgatttgtttttctttttgcagcttggttgatgaccgttgtgttgtacagccagaagccggggaccttaacaatccacccaagaaattcagaggtaaagttgtggctttgatggagcggtcaccttcacttacttgattatttagaaaggctgctgctgtgcctgtgaggccagctgccctctcccccgccttcgctccgcgcttccagtcctttatccttttctgtagcaaccttagggttatttacttgaaatctgattttgaaaaagatacttaagtcctggctttaaaacttctcgaaaaaatgtgtaaataaattctcagtcaagattggcatggcttttattagggccttagtttgtctacagaataagtattgccaagttctaattcatctgaaagcttttcatcagcatagctacgtctccaaaaaaaaaaaaaaaagggatttaagggtccagtcacaaggaacatgttttttttttcagcagatctcatgatccctcttggggccttgctaattcttagctgccttacctggaatgagacattcttgcttagtgtacttccacttgagctataaggtacagcagggcagtgttcctattaatgttgccttctatgaccctgaacttgtagtttttctcagaaggtatctcagcttattgcagggagtatttgaatggcattggcatcttagctgccacggctttgtttctgtctcctgttgtgacagtggtaggatgtggtcctctgttcgagccacatcttagaattatctggggaaggttttcagttctatagatgctctggactgatggtcgggaactgtttttgtttgtttgtttgtttgcttgcttgcttgcttgttttcagagtagaatgtcactgggtagttctggctgccctgaaattcactgtgtaggctagactggccttcaactccaccgccctcagtctcctgagtgctgggattgaaggtgtataccattgcacctcgctcagcactgacgtttttaaggcttccaaaatggtttaaaaattacattgttttgtttattaattttgcgtgtgtgcacttgtggccatctttgggtgaggccagaggacatcttgatggagttggttttctcctttcaccatgtgagtttcaaggattagactcaagtggttaggcagaaccagaaggcatttttttttaaaaatcccttacaaaaaggagaaatgcatgcttattggagtcccactgggagtgtatggttcagacccctgcagactaatgtctgttctattttgagtgcaatgccttaaccattgggccaccctgctgacaaaactgattcttcttgctagtgggcctacgcaccgacttgactggtggcctggtcacagagagttcagcttttgctgtttgcagactctctcatttgagttctagattctccatgttgactgatttagaaaatgtttgactcctctggatgaaagctaaagaaattaggatgcaatggaaggcagacgttcgggtggaaaggagccatctggatgcatggtggtgttgcgctgtatccagttggcacgaggctatcaggagaatattttcacctgaagatgagggaaaactatttttaaaaaagtgaatctcagaaacttgaaggagctcttgcttctgctgagtttttcttcacaacccttccccgtgtctccttctaaaacaaaatcttcagtggcgccgaaatgaaagatgttatctaacggccataatgtcacttagagagtcaattccccacccagtgttgaccatgttggtcactgggctgaaagaggatgctgcctgtgttagctcggttggaggtcagatctcctctctactgggaaaggattggctagattcttacctcgtgtgtcacctgaggtcacatggctagaggcaggagcgtgtaggggtttggatctcaaatttggctgcacagagaaatcacccagagagctatgaaaagcactgataactgctcccacccaccacgttcctgagttaattgggcattgggattttttttaaagctccctgggtaattctcttgtgcaaccacacttaagaaccattgctaatagctacaagctaccgacttccttgctgaggaaagggctaatctaagcttggcttttgcacctgggacattgagaagtgatgattgtcagagcaggtgctggatccagggggacctcttattccatcctagcctcgggggtcaagcaggaagagaatttaatgtaatgactaaagtaagccaatggctattcagtattgttttaaaaatattgttacatattaatgactttcatttctaagtcatcatgtatgatttgaaattggcagaccttgcagaatacctgatttggtctaactaacataggtttcttcaagtcacttttgtgttgtgaggcgtacaagtattcagtttgtgttgatgactattgttaccatgctgtgcaataaatcctcccatctaagtgagatgctgtagcttttgaccaatacccttgccaacctgccatcttaaccccaggtcttggtaacctctctcctactgtctgcctctctgagtttaagtttttaagatttcactaataagtgagattattatacagtatttttctatgcttgcctcatttcatttaacatcatgtcccccagggttggttggttggtttgtttgtttgttttatcacaaatgatcaagtggctgtttggatgcagggtgaggacattaaagtaaataggactgctgcaaaggatgtcagaaggtgtgtgtgttccctggtactagggtcagtgtgggtctcacttggatgtgtctctggtgtctgatttgaagagactgttttgaaatcaaagcattagtctggtggaggccatttggaaacagtcaatctcctttcatgtcttgacttagttctacaggtaggaaccaggcagtgacttggcttattgactttctaggtagtttctaggctgtgaactgctttgtgatagtagggacatctggttcaaaatcagttgtgctgcaggcatcatgaatataggtcagaagttcctaagctctgagtgctaaggttgattgccctgcatgtaggtaagaagcctgggaaatctgcctctgcaggctgtgggagtgctggagtcttctccaccatgggacttgggcaggaaacattttcaacgtttttgaaaacatctcttcagctgtggtgtagcttgtctatgtcaagaagtcctccacgtccccacatgaaggaaaaagatctctcttttggaagagattgttgtctttctaactataagtacattttgacgaacgagatcattttgctggcttagaaactgcgcctgggcagatgagtcgtttgcagacggatctggtcatggtttcgctcatggagcctttgcaactgcagttgaaacaaacacgtatggaaaaagagatgctggcgagcagcttgatgggatgatgaagtctttatccaagtaatcagcagagctatgctgagtcacttgggtctgtgctggttctcattgctggctcaccaactgatttcccatcctgagaaccattataaactgtgctgcagtaaatggggattggaaggagcctgtctgttgtctgctccccttcacttctgactttggggagttccttctgagatttgcagccctgatgtttatccatacagaaccttagaccaacgagcctttctgggttcagagcaaagttccaccgatttttgcctgtatgaccctgactaaagtcacctctgtgtacctggctacaacaattttaataaaagatagatgtgtgtgaagaatgcagtactagtcagaatgttaccagttgtgacaaggtaggtggacctggaagacactggggcaatgaagcaagccagggacagacagagagacatgatgcttttactcatggggaatcctaaaaaattacctcataaaaatttagtgtaatgagctgttggagggcaacccgggagggggataatgattggactgttaaaaaaagattaaagataatttttaaaacattgagagtaaaacagtggttaccagaggccgcagaggggttaaaggaggaaagatgagagcgattagttagtgggtacaaggttaggagaaacaggttctgttgtattttagcatagactagggtagctatggctaattatcacatagaaagcatttagaaccacctagaagagatgattttgaatatttgcatcacaaagaagttataaaggggtagggcatgaccccatggtagaattcttgcctcagatgtgagggcgtggatttgacctgttgtagcacaaaaagaagagagtaaggaaaccataactatgtaaggtgacagataagctaagggcactgattagagtcctataaacatgagttgaaacatcacattgtatacctgctaggtgtcaaagagaaagcaaagcagaaacataaaatgagaagaagaaaaaaagagtaatgcagtacttagtaagtcttcatcatgcttaccttgtctgtcttaccttatccagtccctagatggaacccataatcataaatggcatcagaaggcatgactccttcagtgacatgagcattgtctaccattcgtctgtctgtctttccctgtctcgggcctagggtgtacacaggacttcccagcctagattccagggccattgctgctgtacaggttgagtgtacttgagagactaattttctgagcttgtttgcccatctgtagaatggggccgtcgatgtttccttccttacaaaggtaatagaattgaaggtagtgtggctaaacatagtgcgtaggacggatggtcccctggtccagtcccatagcttctcttttggacagtagatgcagaaggagttaagcacggagtgcccttgcttctctctgatgctttcaagtacatttccaaaatgaatttctcctttcatgtagtgatttccttgtccatatctcctgaccccctccccaacccccaaactgtgtgtgtgtgtgagggaaacttgtacatctgtttcctattaggcaaatctttctcatcatctgcatgattatgaattgtgtcattctctgtgatgacaagaaatagctgagatctggagtcgttagggtaccttgtttttgtttttgttttgttttgtcagtatgctaccatatgaaagtgctagagtctatgcacagtggggcagaatcactgttttctctgatgggagttagctttgcccataatatagaaagaataaggaagacaaacatcagattgaaaccaggaatagaaactttgtggtcagtgaattcctttctctgtattatcttttgctcttcccatccctccacatttctcccccttgaagatactaaatataaaaagcactttctctaagggaagatggaaactgacagccagaccccattttcctctcaggcctctgctcctttcacagtaataacctccagggttgttggagtagaaagaagggattgcaggctttgagggaatcaaacaggcttgtagaattggttacaccatctattgtgtaatctcttttctacactggggcaatggtcaagtttttgtccttaaacttttcactgtactggaaccaccttggcctcagagccttgaccttggacatatgttaccgtatcagcatcaactgaactgcagcgtttagatttctagaaactgttgagcttctgaaagaagctgttagaagtttacatttgaggtgggaagccagccatggtggtgctacatactggactccagcactcaggagactgagggaggaggatggtgagttcaggcctgccaggactacagagggagaccctggcccacagaaggggagggagaagaaggacagccgggtaagaaggggtagggtaggagaaaggggagttggaaagggaagagttgtagtgaaggagacaaactcatatccatgaatggggcgggggggggggctgcatcaggctgcagtgtgcaagcaggttctgggtgtcttccctgcccttgggttcctttgttgtcccacagtgtcacagatctcaaaacctgttattccacctaagctggtgtatgactaaggcaacattgtgcagcagctgatggcttgcctggtcgggtcaggtggtacaaacagcaagttgagttgaacagtcgttgccttagctgggtgtgctagtgcaagttttaatcccagaacatgggaggaagaaggtagcaggtttatgtgggtttgaggcctacctggtctacaaatcaagtcctggatagctagggctgttacatagagtacatagagaaacccagtctggcagaaacaaaaaaatacccccacccccaaacaaacaaaaccaacccaaaaaagagccttagggttttctggagagactgacccactacatttatcacactgatagatcatccagttggtacaaagcattgtcctgatgaatgacttctttctaatcttgctgtgcaatccacttccttgcggcaggtctttatgttcccattatgcagatgagaagatggaggctccaagaagttgagtaactgtctcatagacagtcacttgcccatcctaggctggttatcatttactccacaaacatttattggtttccttctacatgcagctacaggccatttattctccagggacaagagttaccagaattctctgggaaggcatctgttcccacaccacagcagttatatatgcaaggggaagagagccggcagagtactttcctatgggacgggggcagagtagatgatgctctacatatgtgccttctctctggctctgcagcacctccccagatcaggacacatctgtttcatacctaatgctatttgggttaacagatgttaggaactggtccagtgtcatgtcacgcctgaatgccagagtcctgagggctgaccctgtcctttcccaccatttgccctatagattgtcttaaacccctggcctgagggttctgtaagggcatggcctttgtcactggcatagcttctaattgagactagacaaaatgttacttctctgttcttgaattctacctagcttttattcagacttatttcaatgaaaagctaagaaggaaggaaaaaagaaggaagggagggagggagggagggaggcaggcaggcaggcaggcaggcaggcaggcaggcaggcaggctggctggctggctggctgccttggaccctttgttacaatgaatcttcagctgttcccaacactagctcaggaatatgcataatgtccacatgattgggacatgtttgtggagccattaagggtctagcccaaggcagtgtaaccagtgtctgagcatttcaagttgggtgtgagctgaaagtctctggttcctcagcctgggctccgagacacgacagcctgcgagtctagctcttgcaatgagcatgggagaagcgttactttcctctgtgagttggactgaggcccagtgcatagctatggatttgagggctaagcctctggcctttttccttttgccagacctttgttctccttttctagagtgcttgcagaatgtcagtccctctctgaggggtcttggagatttaataagctgtcttaatgggggaaggactgaagtgttttatatttggtccatccactttgtaattagccttgaaacttcctggcaacgttggtaggtgtctccaccagggagtggcctatttcagggtcagtgatacaaatagtcaaaacctacttactggatcatagacttgcttgtggtttaggcctaggtaggacactgagaaaaggatgtcatgtgaggccagagctggaggctggttggctactgcaaacggcttcattatcttggagaaaccaccgtgtctttatgtgtctgtttccccattcgttaagtgcaggtttagtgaaatatctccccatatccattccagctctagacactgcagccggccgggactggaaatgggcaggttcatatttcacaagaaagcattggtattcaggagcctggagctgcctagaagtagatctccttttccctgggattacaagttgtctctgtctagataaaaaggaaacagacagactttcaccctgaggccagaaggagacacagccaggatcttgggtcacaaaggtctttcagggtgactctaacaagcctgctggcttagctttctttcaaaccctgttcctttgctgcacattgttttaattgttgctaagcaacattctctcctaccccctccccccccttctttttggcaaggcatccaaggaatgaacccatatcttatttagttttaaatacccacatgcaaaggggagggcctaacttaaattttgtttgttcttctgattttaatccatgacaggaatgcagagcttactctttgcctgtcttgttaggtaagggaaaaaaaaacccatcagtctgttgaaggtacgcgtcagaatcatgccgtggggcatattgaagatattgcctatgtgtgaagctgccttgcaggagaggctcttgcaacgtgttctttattcacaaagtcaattcaaatttaatgaaaagattagtaggtttttataatcttcatttcagatttgctggcttatctcaatcttgcaccaacagactccattgaaagggaacaaagctgtaatttaaatcaattccctgggcaacctagaatgcttccagggtgttacacaatcagtggggctggttcctgtagcttgattattgcaggagtcccacacacttcttccagtagctccctgtgtgtttctgcccactttcttgacgatatgagatgtgtgcctgtggcctctcgtataatgaatggacacaagtactctcctgctctgagtccatttatttttgaatatttgagtcacccttggcaaatagaactcaagtgtctgtttcacattcacttaccctaatagttaatttacttgttaatgggattaattttcagctgttttatcctgaaaatgttcccagcaaaataaatatgattaccgtgtcctctaattcaatcccgctgatgtgatgtggcttctcccattctagaacaaatggattttgaaatcccagccagaagtaattgggtcaattgtcatatcattgtatggtccttctgacagcagaatgtagtggttgattaaggacttttcttttggcaaagggtttttatagtcctgtcttaagggcatcaatgaagatgaacatgcggtgaatcacttgagcctatgataactttgtctcttcctcgtttgccaagtgagaaaatcggactgggataactagggtgctggagacagagaatgatgctgtgtcagaattgggattggattgtacccaaagcttccctttgttctttggggtcatggattaaagcaaaataaagttttgtcccgttttcctgtgttaataacctgccttctgtaaacacaaataggtggttgtgaatactttgttcagtctttacttaaattagttaaatcaatttattgaatcttatagtttcctttatatacatctgtttatttagtcttagaacaattctagaaggaagttgctcttctatggatggagacgctgatatacaagaggtacagtgcttggtttaaggtcatacagctagcaatgatagaaccagaatggaaatccaagcagtctggccccaacacaactactttgcccatttttgtgtccttcccaaatatgtcaatcagagctgcgttcatagactagagatatatgctaactataaccctgaccttctagtgtggtgtttattacagctgccttctacttttgtcttttcacctagacatgggacatgtagaagtaccacagattgccctgcctgtctggcccccacgcctgtagtgttgatccttagcaaaagccagttgtagaagagtcagtgtttttcctggtatgatattttgtggttcccagcccaactgtgttttcattgatgacatttcaagtcaactggcctctggtcttctcagtatgctgtctcatgctgtaatctttttccaaactacacaagtctggtactctataagaaggttgtcttctccctggaactttgggctgtgtttggtctcattttttgctacatgttggattttgattagcccccaaaggctcatatttgaaaggcttgggcaacaagnnnnnnnnnnnnnnnnnnnnnnnnnnnnnnnnnnnnnnnnnnnnnnnnnnnnnnnnnnnnnnnnnnnnnnnnnnnnnnnnnnnnnnnnnnnnnnnnnnnnnnnnnnnnnnnnnnnnnnnnnnnnnnnnnnnnnnnnnnnnnnnnnnnnnnnnnnnnnnnnnnnnnnnnnnnnnnnnnnnnnnnnnnnnnnnnnnnnnnnnnnnnnnnnnnnnnnnnnnnnnnnnnnnnnnnnnnnnnnnnnnnnnnnnnnnnnnnnnnnnnntgcactctcctttgtttcctgctgagttgactgtcccaccacaagctcttactcttactggaaagtactgctccgctgcagggacaaccaaccagtcatgagctccataactgagccaaacagttctttctctttataaattgattatctcaagcatttcttttcatgagaggaagttgatccatcctcagaaggaatttgtttgtttgtttggtttttcttctttttttgaaccattatgttgactcttcattgcccctttgatgtttacagtttcaagatgtcttggctgccttgtatctggtctgatatggtcataggtgcaaccctgtgattgttgctatttgacagctgggcagctgttgagagggtaaggaaaccaggccggacttggatttgaacccacatctggaaaactgcagtgtctgtctgtagagtgaatttatagagttgtgtttctcagggactatctggggcctcttgcttacctatcaaattgagcaggcatattgctcagtgaaaattaacacagggccatcaagaggttaggtctcagataaactctagcaacacttctcattcctggccacacacccctcccttgttgggcgctcccaccgttgtgcctgtgggtggaccctgtttcattcctcccccctgcccctagaggagtcacagtcgagctgagggtgcacttgggtacttggagctagatggttacttgctaactccagtttgaattgatattttgtgtctcaaggacagtatatctgaagtgggacctggggctttgtgtttttaacagattcttgagctcctgcaggatgcctacagagacagtgataggtgccttcccctagtcgggtctgtgggacttggttaagagtgagcagagtgctttaactgtacagagcttgggcctgaacaagtcctgatttgttattcctgcatccagttgtttcctttgattcaaaagggactgaacatctgttgaggatgcagaaagaatgtctgctctgggacagaggttaggtagttgtcctcttttgacaggctctgtttttgcaccaaaggaccccagctgtttttctgtttggcttcccgtggaaaccctatggttgggacatgcgtctgcaaacagctggagagagtgcagatcgagcggtcatgctgagaggctcttgggaaaccaaatgggttcagtctagtggtggagagggttgcagaggaatggagaggtgggattactgaggatgtgaaccgataagcgaatggcagagccaaagccttccaagttaaggtcctgctgagggtgtttgtagtgagtgagaacgttgctgtggacaccagtagagcagagtctgtcggagtcccagcgatgggctcagctgtggattcaagcctttgccttgactctttaccagccaggtggctatggacaagcctggtaagctttccaagccttggcttccctacctggtgttggtaataattaatagtacagacatagtggtactgtttcaggacgagctagttagtgtgtgtgagatcctgtccacgtgggcagcacgggttaagtgtcacatacctagaaatgaccgaatatgtggttagcagctttcaggggatctctcagaatgacccaacatagctcttgctgtcttctaaaacactgatctgttttaaaggctctattcatgaacccatagaccaaatttttttttttttttgagacaggattttctgtgtagccttcgctgccctcgctctgtagaccaggctgggcttgaattcacagagatcctcctgcctctgcctcccctgtgctgaaatcaaaggtgtaccaccattattacctggctatgcagaccagctctaatctttctgaattttattgatttttattgaaaatggcagtcgataggaaggacattttagacggacactggcctttaggaaagaagtcaactggcatttccttccacaagtcttgatcagcctcagtacatgatacgtcattcacttgtggcagtaatcctgtcttctttgtggacttacaaacttagcagagagagaagaggaagcagaatttctcttgtctgagcagcaggccaatctgctctttctccagagccaccaggggctgcaaatttagagaggtgtaggccatttggcttgctctatctggctccaagggcaatcacacttctaaaagggttgttgactgattacttcttctgcagtattgaccataagttgacaactctctctcagagctgtgtgtggctcatacacgtggccaaacttacgctcctctcaatagcgttggtttggagatattttaggaagagcatccaccggtgaggaaaacaagccccagctcttcggagagccattcttttctccctttctccttgtgagaccaatagctggtcatcaatatgaagaaaactaatctgagtagttgtgcaaattacgacaataaactcagcaattattccttttactaatgtgtaatttttttcctggacttgtatttttccaggtacatttctgttctactttgggtgcctctgaaatgtctggatgttttatgctgctaaaattatatgggtctaaaaatgttactagtgatgacacttacatagaagctcacttgggctcatgctagcaaattgctgcaactgggccctctacccacccctctgccatcccactaatgtggtatttgaggcaaagggaagaaagagaattatcgagttcaggtgcagccagcaagcctgtcatgagaattttgttttagtcttgtcggcagaaaagtagtggggtgttgttgccatagtttcagtgaaaaatttgaccttcgctataataacatacagttagagagaaccagctaactggttttctaaaattagtattctctagtacataaggcagtcagaacagagtttttaattaaatattatccaaggccataaaagcccgagggaatgcagtcctctgacctgggcaggggaggacggaaacccgtaatccctcttgattggtcttttggaagctaggagaactggagtggggtattgggttgtttgtttttgtcttgttttttgaatatcctcattggttttattcttgagagctgtcagaagcgagtttatacagcttgttgagagagcccaacaacaccctacaactcacagagcaacccggcagggtctggcagtgctgccgggctggactggggtgctggcaaggtcactccttcaggtcagggagtgtttgcagtgaaggttgagacttcctgagtgaaatcttggtgttttgagcagttccaacttgtttctaaactcatactcctttgaatgcttaatgtgtcattaaatggagtcagcatctctgtgttctaagtagagctgtgttctgcctcctccagctctgtagtccttccctcactgagctgtgatccagtcccaaaccgtgatctgtacacagattagataatatttggtatctctcaccaattccagttaagagctacacgagtttgtttgtttatttatttatttatttattgaacttgactggaaatattgaaaataccattattccatgttttgtagttcagaatgaggtttctctaatccgttgctgcctttctcgccctttctccttggcatggtcatcccagtgtaagcctagcaatggtggaagtcggaccttgagttcacaggcctccctattcctgagattacggcctaggccagcaggtccagaccaggcgcagttgagtgctggagttatccccagggtttgatgaatttctcttgtgaccgaccgttccacaccagttgcctttagtaagttttctcccctatactttttatggtttagctttgtaattttaccttcggatggttattagtagaatctgaaggatggagtgtacatgtgggaagatggatcacctgtttgcctctcctctctcttgcgatttgcttgtttctgtactggtgtctcagctgtggtaatggcacattcatccctaggaagacttgcagaaaagcagccccataggtgagtggattgtaaaagcgcctgcctgctcctgaggctgtctacctgaatcgttcggaattgcctctgccctgcaggaattagagtcttagggcaagagacaagccggaagtgctcagtggattgttcttgggagtgctggagctcaaccatgcttttattccattaggtcattgtgtccaaataatttgaatccatctcagtaataatagcttaaaaatgcaattagagcgctcactggaaaagctaggcatgcattctaaagcacttcctggtttccattatgcacacgtcctcaggcccttctgttaatatggataacagagttgctattccgtaaaccatccaagaggtagcttgtaacaggctggctggtggaatgttcaactagaaagcactcttgatttgagggtgataggcctgacccagagactttattggctcagataatctccactgagtgacatgaggtactggaagttaatgatctccccatacacccttactttctgtggccttactctcttcggtgtccttgtccaacttttcctttgttcctttgtcctgtgtgcttgtggttttggggaatggaatcttgcaggtaagtccaaagacgcctgcctcagctgttcagtttgaccccatgtgaagacttactactggctgagagtctctctgtctttaaagggctgtctcattttaagtcaatatcgtacgtttattctgctttttgaaaatgtactgtcatcttaagcgttatttctttaattcctgaaggaacttgtttgttccccaacttccctcaatgacatcctgctaccaaatccccagagcctgtgattatgtctctcctgtggtaaaagaaacgtcacagatatgataaggaccctgagatgggaagttctctcctatttccagttgttctccggaaatcacaaggggcgctgaaggtgtagagttggtgaggatcagaagtctgaagtttgtggccctcaagcaacagagtgagtggtacacagaaagcctgaggaaactttctcctgaagcttcataaggaactcccctgcctactttcaaatttaatgtgtgtgtgtgtgtgtgtgtgtgtgtgtatgtgtgtgtgtgtgtgtgtatgtgtgtgtgtgtgtgtgatgtgcaccagtgcatgcatgcacttgggaaaagcagaggtcagatgttaagtattccttggtagcttcctaccttatggtgtgagatgggggtctctcagtgagcccctgggatactcctgcttctccggctctgttctaggattacagctgcagcatgcagcttgagagactaagtagtctttcagcctcttaatgttctctcaagttgaataattaatttgtaaattaatttactcttcaaattaagttgttaagcatcataaactatcaagtgccctctaaatatcgctttannnnnnnnnnnnnnnnnnnnnnnnnnnnnnnnnnnnnnnnnnnnnnnnnnnnnnnnnnnnnnnnnnnnnnnnnnnnnnnnnnnnnnnnnnnnnnnnnnnnnnnnnnnnnnnnnnnnnnnnnnnnnnagctgcccaacatcctaattgcagtagtgatggcatggtatttatgtgtgtgctcaggttcacaaaactatggaccaagcaagaacagtgaatggccctacacataacatttgtaaaaagttaaatttcaacagtggattatgtcagtttgccctacagttttttttttcttttatgtatggggaggttatactaatgcctgataagactgaaactgtttgtcattgggaaggctgtttgttgttgttgttgttgttaatgctttatatactaaagcttattttggcttatgctaaataaaacattggcatcaaccctttttgtatttttgtgggtaaaacttaaatggcctgccagattttagaaatatgtctcataagctatatctgagcaaatatttagacgccatcccatctttgcctgctcagtaaaatctttagttcatttccatttgttgaggacatcagcatatttagagttaactttttgtatgtgttccctttgtttgttttcttgctctccttctttgaagattttttttaaaattgctatttcacctattccatgcgtttaagctgtgttggatgggggtttagactctgtgtgtttgccttagagattgcccaaatgttttactgtgcacgtctcattaagccctgaagttggtgggcagtcactctttcctacaatgtcaggacagtgaggacgcttatgctactgtcccccactcagaatatgcttttattgttcctaatgatagggcttgttgttgtttgcttggccttgcagagtaagtataattttgttttatattgccattttaaaaagttggcctgacttttgtttttactaaagctgtgtctcagataattcttttctgcttcaagaagatcccacagctctggggaatcctgaaagtacagtcatttctttgtgtctttctcttttatccttaagtggcagtttgcttggtagagatttgtagattaagaatgccccacaccccccccccatcgcctctcccagatttggcctagaacctcccttgtcttttctctttgctgaccttcagagcttctctcttcctgtgatttttgcagtcttcctcctgcgactccaagggctcacttccctccatttgttatgtacactgctggggagatctccagatcccaggttggtttttgtaaacaatcctggagaactaagaaccatgcaaatgctctctagttttaggatatcttttttttttaaatttctcatttttgctatctagtttgaactttcctatttcacataatctattcttgtttactaagtctatcctatgatcattagagaaattaattttgtatatatttttatttaaaaaaaatacatttttgtcttctccagatgttgatcattcttgttcctccatgcttcaagccttcactttattttctgttccataaagatttcctaaagtagtttatttgtcacagttgtactagttaatatagggtatttatgttgcaattttaaagcgttgtgttgtgcttttgatcacttgcttgtgcattttttgcatttcatctatgagccctggcttgaacttatactccttcagaaggaatgattttcttcgcctgttgcctgaagtgctgccaccaaaagatttgttgaaatcaagtttttaggtttttaatgtttttttttattttgtttattttctatctaagaaatctacagatttccaatggggcatgaattcttgtgacaaaccaatatgagggcgcactctggttctaaattattataactgttgtccccccccccccctcgtgggcacactgaatgtaaaaagtaagttactattatatacggcagacttgtttggtatttatcatataaactgagtctatatactcaagggttgctcctcagaatttgaccttgagtggggctgaagacagccagagatacctagggtttctagaatcccttagaagtaatgcttgcctaagggtagacttgagcccctaacagcttctctggatgcttttaaagtgtgttttactatttcctcaagctttttgtttgagttgagaggcccattcagggttccccatctgttacactccaaggaaaggaaatgcaaacctgtcaagtcttttgttcacaacaagttcgttatctgtatgaaggaaggcagagttaccaggatcgcctccaatgaagcactgtaaagatagaatctttagaaagagtctggtctcttgtttttgaatattcaaattataggaaagggactcaagttagtcttgggttagatttactccactaaatcagtctcacttcaggctcaaggattatggtgttttgtggtaatatggaagctcacatggaaactctgcactaataccaggtcaaactaaactaaacaagcagataaaagagtgactagcttacaaaaggtgctatgcagataagatatcccctgccgtggattagggctctagaaggtttcttttatctgctaggggtgcttttcattacagtcaaagaggtctatccatctaactatagcagcataggggctgttaactgttaggcagaaagctacagtgataccctcagtattcgttttaacttctctattggccaggtctgagttcttttcatagccttgtcacttcgtggcttacagaatggctgtggcaggtccaggttgtgtttattttcctggcaaggagtgagaggggagagctgcagcctgagttctggtctcactcctctctcttccgaggcccgtcgtccgtccatccgtccatccgtctgtccgtccgtcccgccctccctcccagccagctacttccacaggtcaaagctgtgtttccttctctctctctttcaaagagtgtgggggaagtgaggtgctctttctctcacagggttaagaagccacgaatcagaaaggtattggaagtttttagcatagacaacagggtacatcttgttacattattgattgcacacggaggagcccacccgagtttacaggttttagtgtttttcttttttcctgttgaagaacagtggcttttagcagcagcatctgttaggaacaagcagttctctatctagttgaagctgtctgtgaaaagggatcataaatgaatacaggcaactgtatgtttccccagtggttttgtcttgtcacttttctattgctgtgacaaaacaggatagcaaagctttgaaagaatgcgatagatgtgggactcatggctcaagagcattggagcaattcgcagcacatttgaatgtgcggtccccactcagcaatgaccaaggtgatcatgaggttaatctccccctctctttttgtgttcttcctgagttggaagaaggaactctccaacgggctcagaagggctcaggtagctagcaggagtatcgtgtctaggagctgttagaagatgcagttgctgatacattagagcatgcgtgtactggaaccttccacttagctctctgtcttccagttttcctcatctcagcttggtggaatttccccctactaggtgtggggtgatggtgaacaatattttgtgacacttgagtcagctaaaaattataacaaaaacttgagtatttgacccatgttccgctgccctgcccggcagtggcgtgcgtgcactctgccctcagcaccagaagccttcgggccttattgtgttctgctgttgttgccttgtttcaaacatcacacactatctaaaaagattgtgaggtttttctaaagaatggaaaattaattgaatggtgcatgtataggatggtgtttaaaagtcaataaaataaaccagtcccggagaggactaggcctctttgttgtcttagacttgctgtgtgctatattctgatctaagtcttgcatgactaccccaaggaagtgctatgtgaggaagtatgagcgtggcagataggacaaggaaaccagagagctgactatcagtgttctggaaacagttttgcctcaggagctggacaacttgagtccatactttgctttgcctgttactaccaacttgacctcctggaatgccattgccctatctggacccttggttcttcatccatgatgtgatagtctattaggcttgatagtaaagcacagcccagcttcctgcaagtctatgccatgcaggcctgagccaggaataatttacattgtgatagtatttacagtcattcttatctcttggtaaaatttaatctctggattatgaaagagtaggcctgacattttgttcttgtttcttatctttaagaatcatacaatcagatggatagtggtggcacacacctttaaactgagctctcagaaggcagaggtagagaggcaggcaggtctctgagttcaaggccagcctgctctactgtgagttccagaacagccaaggctatacagagaaaccctgtctcagaaaaaaaaaaaatcacacaatctttaaattagagtagcccatttctcttcatatttatgtatatgagtcaccaacatnnnnnnnnnnnnnnnnnnnnnnnnnnnnnnnnnnnaagttaaaacatttttctatacttacccacaatgggaagctctaacataagcaacgaaaagactggttaatgctctcagaagccctctttcagtttttctctaaatagcatggatttggctttcttgcttgtatgtcaattcatggcttcaaatgacgtttgcatgtagggaggcgaaacgacacagtaatgatatcatggtaagactcagttaaattctagtcaccacttactgtaagcgagggctgttgaagagtagtcaccctgtaaaataccattcccagcagagttggtcttttatgtatcttataggtacacagtaattgttcattcccgtataattacactagcaatataattcatttacctgccacgggcattagctttgatctccccagagttggggcagtattttgatagatagggccgaagaaaaggtacaagaccatttatttaaaaatattaagttcatgtttttaatgaactcattaaaattctgcatgtgcacaggagtgggcatgtgcacctgtgtacatgtggcagccagagaggcttttcattggttctgcaagatggagttagaaacactcgcaggaagcgtgtacgcagatctgaactctggtcctcacgattgtgtagcaagcattcttaactgctgaaccagctcctcctgcctaattagaaaattaaaatttatgtatgtgtctgtatgagtgtttgtgtttgtgtgactagcacatttcttgacttgctattcttctcagtgccaggcgttgaatccatgactttttagatgctaggcaagcacccgaccatggagccacttccttagcccagctatttcagggcaaggggacaaattatattgttttgtttcattctgctattttagattgtttttcaatactccacctatgaagtaaagctacaagtcttttttttttttttggttttttgatacagggtttctctgtgtagccctggctgtcctgaaactcactctttagaccaggctggcctcgaactcagaaatctacctgcctctgtctacggagtgctgggattaaaggcgtgcaccaccatcgccctgctcaaagctacaagtctttgaccttctgccaaacgcactcagttacttctcatttgaattcaaacatcagactctatcttgactcccagcgtaggtcagaaccttgaagagtgattgaataaggataggcaaaaaggcttttagaagtcatcattaaaaactgtttgcggatggagtctctccttggctcagcccaggtttgttttcagtagtgggtaaagttaataagactttaatctgactgtaagtggaaagacactgccaagattaaattgaagttgaattaaaaccagggcaattgaatttgtctaattaattgagaattacgtctcagtctgtgttcgtcttcagttttttcacctctgtgccaggcaaacacccagtttggattagttacacatttggatgaactttcccagaggtatctgtagcaacgtcatccaagaactgcatgagtatctagttgtacgcgtgtgtgggaaataaggatgttcttatcgttttagtaaatagtcagccccgcatctctcatcctttgatggtgtttaacttagtccaccaggcttagcagatgtttaatttccgtcacgaagaaaataaggttcagtacctttccctgcagttatttacctcttcatgaaatgtacaggcagcgatgaatgcattctttgtcctgttgactgggccagtgccagtgactatattccatgtcctctcaaggggacgtgaaaggcatttcatggagggggaatcttacttaggttatgaatctcattttagggctatggctaagtggactttcagatttggttagagtttagagccccacattatctctctaaaaccagagaaacagttcccagctgcgaaatttgcacttgacagtggtgggtagctggtccagttctcaccaccccttgggacatttgggttgtttatttcccctctcagccaaaaaggactgctcaattcagaagctcctgtctgctctcctgttgttattcagacatcacttgcagaaacacgggctggcttttcctagagtgcagatagcgttgctgaggagtccgggctggaaagtcagcatataaaaccttagtgtgcctgagttgtttgttgttgtttctttgagactaggtctcactatgtagccctggtagggctcaaactctgtatgaacaccaaactagcctcagactcagagacctacctgcctctgcctcttgactgctgggattaaatatgtatgccactgtgtctgatttaaacatttacttatctatctatctatctatctatctatccttatagaaacggttggctgttagaagaagtatagtgtgtaaatatttcatatgtttattccaaatatcagtttgcttaactagtttaaataaatatcatgagggctgctaagatagctgccttgggtaaaggtacttcctgccaacctgggctctgtcgccatttctcacatggtggaagaagaagatggactattcaaagtcgtctgttgacctgtgtgtgtgtgtctctgtgtgtgtgtacacaaataaatgtaaaaataatggagtttgctttttgtgtgtgttaacatgcttatatgtaggtttggggatgtgtgtgtgtgtgtgtgtgtgtgtgtgtgtgtgtgtgtgtgtttctcagttgctctccacctttggtttttaggacaggtctctcactgaacctggagctcatggatttgactggactaactagatggcgagcttcaggcatccacctgcccctgagccctcagagctgagctaacagatgcatgctgccacactggcttctgacatgagtgcttgagatctgaactcacaggtcctcctgtcctgcaggtactctacagatagatccatctctctagctcccaaagcaatggctctccaccttcctgatgctgtgaccctttaatatacttacttcctcatgtggtactgatccccagtcccaaccataaaattattttagttgctgtttcgtaactagttttgctactgttatgaatcctaattaaatatctgtgttttttgatggtcttaagtgacccctgtgaaaggttgtcgctccaccccatccacactcacagaatgacaaccataggatgagacccactgtcctagattaaatatactggcttaatgcattgacaggaaaagtttatgacatttagttgtgtatgaggagattgaaatcaaagtcacaagtgaccttcaaagtcactatggctatttaaataaagggggtatgtatttttctttcttctagctaaaaaccaaatcaactatttttctttagtatgacataataaagaaataataaaaaacaattaaaagacccccttgagttgttaagcccctaccagttccatcctgaatgaagcccagaagctttgttccttgtgagcatcagtgtgccttttgcctccttccctcttgccccatcccgactttggagcctctgaacaggtgattttcttaagggtcttcttaaagtgttgtctttcattactccacaaaatagggttcttgcactcccctctgttgagatttgaaagtctaatcgaatcaaaacataatctcgctcatcctgggttttcatcaatagcttctggctctttcttcgccacggggtagtgtcagttgccggagaagcaacatagttttaactctcactctgtttctctccacccgttgttgtcgtctctcctcctgtgaagtgggtgatttttatgtagaaaaggtccagtgccacgatagcctgggtctttctattaatggaaggtccagactgagtctttcttcccttcccccaagaaaacgatgtgcttccctggagacaaccattccgtgctctgcttttccctggagggctgctcctactcctctaatcaaggctgaagcatttccggtgctctctcaatctactgttaacagccatcacctgccggaggatctgctgacagcttggcaccagcaggcctttgtgggcttcattgcctgtgcttaagttttttttttctaagaccccaggtccctttaagaagatactggagatatctagcccatgggttatttattttaaccgatttattttttattatttttccatactatatattcatatgggctatttaaagacacccagaggctgcagcaaactaggcccttgagcaagaacactatctgtgcatagatcccagtgtaactgccctacttatagacatactgacatgtacctgctaccactgtggtaactatgttattgggggctttgtgtaaatcatgtagtctctggtacataattgcaaaccaacattatctttgtgctttggcatgtcgtatatgttcctaaagcattaaatgaaaacaacaaaaacaaaaaatgaaaacacttgagactgtaatgagaccaattaacttcacccatgctatgacttgcatgttttgccaatacatgatggaaggggttaacaggaagccctgtttggctcaagagtaaaatgactccacaaagacccgaagtggctgaagaagagaaagattgctagactttgtgttcgcatggtctctggtgttgcggtctactgcacacagcaggcagtagaagtgctgtgtggaagtgctggcctatggagagggatggaccacagcagcacgggggatggaccacagtacgggagacgattccagctggggcttctcacagtggatgtctggaggccaaggctgcagggaaggaccttatgtgctgcatgtgtttagctgctctcctgattttgttctacatgtatcaaaaacacaaaaaagaccatctggtgtcttgaaaggaaaaataatgggaacagagggtggtaggatcgtgccagcattgctgtatttatggggtggactcttttactcgcctctcgtttgggggactgacgttgagggttgagcaatcatgaacccagaaaggttattttttaatgaacacagcctcatgatagcttttatgtataggacttttttttttcacttttaaaccagaatgcttagctttgccaagaactgcccatgcttcttatctcgagagcatagtttgcattttagttatgaagtgtctagtagatgtctcagggttggactaaggtcatagcaaagctagccttggctttggtcagtggcttaacattcctttagcaaaaataccactaacatttgcaatatctatagactgtgctctttgtggtgcggtaggcagaaagataataccccacctatagtgattttgatagtttgtaaatgtttcttctcttatttaagtgtaaaccctgaaaactgggaaggtcaggtcatggctgtgttattcctcctcttcgctgtctgacacgtggattgtactctcaaacaatttttagtagaaaagacaatttggtagatccaactgaactcttatcgagtagattttggaggtgctgtgttgagatagatttgccattgtatcctaacatagcagaaataatcccatgtatcttttttgaaaaatgttttaaaaattcttttctttgcatgggtatagttgttcgtatatgtgcatgtataccacatgcaagcagtgcccatgagatcagggtaccctggaactggagttaaggagtggttctaagcctccgtgtggggccttgaaatcaaacctggccttctgcaagagcagcttgtagttttatacagagtcatatattcagccctctttgaatcttttaaattctgttttaagttgcttattgtaatctaaaggaagacattgtttgaaggatgctttgttctttcctacctcccctggtagactgtgggcagagacgttatctttcttgttgtcctctgcatctccgctacaaaagggagcatctttctgaaaactctggcagtcatcaaaagcttgttgaatgagtgtgctataaaagcaaagaccagcactatttcattcatgtatgaactgtcatagaacatgcctaaagtctacttggagacagacagggtcattattagagaacttacaaagattaagttgggccatgaaagatgagtaagagataaagataagaagagccagtgaggctggaatgagggaccattctcatacagaaatcttttccttcttctttcttcttccctccttccttccctccctccctccctgccatttgccctagttacccgagattaaaccttttaggcaagcattcagccactgagctatattcccaggctattataagactatagtcacagatggatgaagtacaaatgtactatattttaccaataaactctgtgtgatgctgaggttggagcaggtgatgggtgtcagatctgaaggctcttaatggataaggacaatttgcttttgttgataatagtattactgttaatttaaagatggcctttcatggtaagttcttatgatgaatgaattccatacaatcaccttatttagccaacagagcaatcttattacagtgagcatgtcctagcttaaaagtttgacgagtgtgtgaaacctgttcagcctcatagtcagcaatggattctattcttggtaggaacagaggtccactgagcccagggtttctctgtgactgtggaagtgggatgtatccccctttgtttgctgttgtatgcatgtctgtgggggtgttggctggtatgtgtttatgtgtttgcatgtatgtgtgtgtgtgtgtgtgtgtgtacatgggtgttactttaactatatgtgcactcctgcatgtggaagcctgagactaataccaggcatcttcctccatcactaatttattcattgaggcagggtttctcggttgaacttaaagtctgaaaatacagctaatctagctaaccaactggccctggggatcccttttcttcctctgagccctgaatttcaggtgggttgttatgcccacctggcaatcgtaagtaagtggtcatgtaagtgtggtctttgctttcctcacatttgcgtcctccggctttagggtgttcttcatactgagataaatgggcaccatgtttgccacattccaggtgctctaaggtttgggaagaagaatgttgcccacttacaggtctggtcactgcatctcttttaagatgagtctggtgtcataagcattaactctattgataaatttggtgaggcttggatcaatgaataattctcgtgtcagctgaatgcaggcagtgttttggagctgatctacagtgatgcaatcagtggtagattgggggaggggcaggggaagaggaggaggtggtgagaacaggatgctgattaaacagtaagttcttgtgttcctgtttgtgggttgctgacttggattgcctgtgtttatgaatgataggataaacatgtttctgatgacaatccagagagggagcaaaaatggcagcaaaacaaggaactgttgctcatgcatcaactggtaagcagcgctcctcggtagcagcgcatggcagtcttgtgggcgttgggaaggagggaaggaagagtctgttactgagagcacggtccgggatggagctgtacccacgcaaagtatacccaccatctggcctgggctgtgcttccgaaacaatggcccacggcttatagagtctgataaatcctgagccgaatggcagcatcgagtttttagtgtatttagttatagaatgcactggtcctgttagggagaatggtggcagttacaggaattgctgaatcctagtatccctaagatgcgtgagccaccttaagcaggtctaagttaggggacttagccaagacagacagctagttagtatggagacaggactacggcctttgagagacatctgatgatcatgcttagcagtttgctgtctacctttctcaaagatctcctgcccatctgaaggctgataggaatcagcctaagagcacagttttaggagttttcttgccccgtaatgactcttctggaccttgctcttgacacgacagtacttctcggccttccccgtctctcttggagttggtatctgtatctacacgtttactacctagctctttttaagtgttgcagattattcgttttatagtataattatgccagagtggaattgtctacactcggtggtatatatacatttaagttattcatttattactgttaggagtagtattactaagttactaagcaaaaaattgtacagctcttctcttcatgtgctttgcttttctaaaggctggataaatattaactttttttttttaattgcatcatgatctttgttggtcttacaggaaaataagttgagtcagggaagaagttaacgaattacctaatgtcccataagcatgctgttaggatttcaagccaggctgatttcagcactgtcactgtgccctgagcattgtgctgcatttgagcagtcacagccttcccctagctctttgttcactcgtccaagtgctgatatgccgggtgagtggcacagccatggagttaccaaagctttgttttcctaatacagttttaaaaaaaatgaactctgttttgtcaattcgagttcttaggaaaagagttgagagaaatttacagtgttttctcattgactccgtgccccacaacccctatgcagtttcctgttgtgctgacaccatctaccagagtggcggaccattaggatagatgagtgacatcattgttactcgaagctcatagtgtgagtatttcaccctggacacgatgtatagaaagtggtgttgggcatatttgtgatagtgtgtccactattgcagcatctcacagaacacttgaactgttgtgacagcccctctgctcttgctgtctagcctcccaagtccctgactcttggaagccatcagtctttgaactgtttctatgttgttgtttcccaccaggaagacatgtagttaggataacaatgcttcttccacattgacttttttttagttactaatacactttttaatttcctctttatctcttcctggcttgataggtcatttccgttttagcactgaataatactttggatagacccaaatctctatccttatctctatcactctctaaagacatacaggctgcattcaagttttgccagttgtaaataaagctgctatagacacccataagcaggttttgtgtggatatgttttcagcacctttgggtaaacactcagaaacatcaagatggcttctgttgaaaatcgtcttcaatggtgtactccttacttagtgcatccagcctcttgtcagatagaaaccatcaataatttagtaaagtgtttggttccagtttactcatttagtgagtggcagttagtgacttgaacccagagcctcaactttgaaatcacccttcagtttctttttgactgtgttcagttccttctcattgggatgaactatgttagcaggtggtttgatgagacctgcaaatagtgaagtgtttatttccagctgaaagaagagtgtgtgtgtgttttgtttatgtatgtgtgtggaggctgaaaactgaagttatcgtcttcgaatttgctttttttcttcacattaatttgacttatggtgtccttttctcctctaccagaggagccgtacaggactgtgactcagcccaggaacggtgggacagtcccggttctaaatgtgactctgaatttggggtttcaagtggtgattttggcctgagtgtaatttcagcaacagtcacacgttcacagcataaactcatctaaatttatcagtcactgcatcgtaacaaatccatgtctcattccgttctctgttttctttcctacaagaatattctgcactcctgagtaagttctgagtagcattggactatcctcaaattggccaatttattaattcatcttgaaaacttggaaaaagatgcttcggagtggatgttctgaatgagatttttcttttatttggcaggcagagttatgtaaatacaaagatagtgtaactgaagtaaagtaattctaatagggtaggcgatcggatgatgagtttcaacaatgctgaggacgcactacggcagatgggacaagaagaactaaaagcaacagcaaactcagggcaggggtcaagatggagctaaaggaaattcctgaatttattttatattaaaatatgtgtaaatattaattgatttaaaccttataatttgaaaaggaaatgtactcacattatattcctttgtatacattaagggaaagcggccagattcagaacaataattgccacatttttttccctttatatatggaatctaatttaaacaagcaaaaaagcaaaaaacccagaaggtaaaaagaggaaaccacgtgggatggaggaggaatgagggagggtaatgatggcaggactcgaaaagagggcatggtgcaggcacagggaaatgccataacaaacctgccattttgtccagtgaatgcacaaacttaatatacgcaataaagcaaatgttgttactgaaaaacagaaatgtagccatactatattacttgatatgcacagaacaatactttcatgatgctagttatataaactaccaaccagctcatggttagaaagcagtaaatcagccttgactatgaaaaagaaagacacagacttgagataatcaggcatagaaggatgtggagatgtgtgtgtgtggtggtggggtggggggggaggggcactaagagcttggagtttagtggctgagagttactgtaccacaggtaaaaccctatgagttacatgggctcctaaaaggctgttaccatgttaaacttcctctgaaattatagctgggtccgtgcttttctgtcagagagagcagcagaaacttcgttctcctaaagccctcaaaactaacaagagtctgggtggacagagtagctttacctcacaggttggacaaacaggagatttccttgccccgtgtaaactatcccatagtctctgcagaggagaagtggtggtggattgtggcaatatggccaagcgactggtggtagctccagattccctatcttggtctaactgttgatattgtggttgtttaaagttcagcagactagagagcttggagacctggaatcacttggcagctttgaggattcagggtattattgtcttagctgtggtattcattgatatgactggaaatgtccacaggatgaagtggacttgttccaaatgcctccccggacattttctgcacctgacctggttggctacgatgtgctgattattctcctgtagtggtggttttggttgaagagtctcaaaagagtggagatgctctgccgggctaggtattggattttcttataacgataagtcagtgaaattctgttttattgaagaacttccctagttgagaaggactgtgtcaaacttcctaggttctcttaaaaattttcagccagttctagcaactgataatgataatggtgggtcaagaaatcttggcacgattttttactttttaatctagatatttgcaggtgaacaatttgccagaatttatgtacctttgtgatccacaagtcattataatacctttttgggcttaaatgttttgattttgggaagatagtgtgataaccttcactgactgtaacagagggggaaaataatctttattacatacttttatttctgacttttgaatccgaaatgggttttggaaaatgctatattttcctaggagtggcagctataatcactattgctgccttcccacccctcctaccctacctgccttccttcccgttcccaaccacccgtttctgtcacagcattagattataatatttatcatctagcttgaataacttaaaggctttaaaaaatgaacttggcttaaaagaacatgagtaagcagataactgtttgttttcctgtaaaggtcacatccaaaattcagtgctcctgacttttagaatggccatttttcttagaggaataatttagacaagttgaattgaatagctctagcatctttggcatttattcaactttgtctttaactcccgttgtctgaacaaatcttttacagagaatggatcgtaaatacacatcacaggatccctaaaagaaaagaaaagaaaacaaaacaaaacaaaaagaaaacctatttcattttgtcttttgtaagaaaaattatgagattgtaatgttaagttgcattaagtaggcttgcattttgaatgatgataatcccattcgtcttaaaatcttgacttgtggtaaccatagatttttagttttcgttttactgatagtgtgtaggagtagggggaaggaggaggcactgagtgggtgcagcagttggcctaattgtttaaactgagattacttaggaaaagatatctgacatgtttactttacacggagcaagttgtttacagtagagatcatttaaatgtgagttaccaatatctcaagttttacatttgccaaccctgtatgttgagattttccagaatcttacagtgacagccggtcctctaatagacagtaggactttgcacttagctaaaaatagctcacctttggaggtagaactccttttccaaaaaatatttagcgcccacagtgaagtatgctaagcatgggagaggcgagggtaggttgtctctgccctactagggcttgctctcttggcaggtgggataagaaaccatacaagtaaacagtggcttgtaagatcgcacccaacacagacaaatgcctggagtgtggagtatggagatagtttacagtggtgctggaggcaatgtgctagaccagcactaacttggctgatgagggaagtcttctacagaggtatcacctaggctggggtttgccttaggcagctgcccatatgagcttatataagaaggatgtgcaaggccccacgaaccacaaacataaaagccaggtcatgaacacattagcactggagaaaggaggagagcatcagggaaccaaacggtgactccaactcagtcatactgcatggagtccagctgtgtccagctgttttcctcctctagtcagggaatcagaatcatttgatgaatttgagttttctaaagccatgtaaagttaaggtgaagaaaatcccgatttcctcttggtctcggagttgtacccatgctccacacatttatgctgctcctccttcccttacctgccctttttgtcatcatggatctcacaggatcctttaggctcctgcgtgcgggccaataaatgaatacgcatacacttagaatgcgggtgcatgtgctcatgtctgtttgttaaatggaaaaaaaaggtattgtttaggtgttggttcacttgcttatgctgatagaaggtttgaaagacagaaaatgtctcgaaggctttgtaggcaagcttgtactttagggcagagagcatcaccggatcctggctgtgggctggctggcggtagtcccggtggcggctttgttattcattgctttgcctacttttaatcatcatctacccttgatagtcatgtgacacgtccacttactaaagaattattaaagacttcattaagctttttttttttttgtaatttttatttttgtgtgtctatgtgtaagtcagaggacacttggctggagtgcattttctgatttccccttgcaccgtctgagtcggggattgaactcaattgttgttgggcttgatgccaagtgcctttacccactgagccgtctcactggccctgcaactatttacaaagatttatttttattttttaattgtgtatatgtggatggatgcgtgtgaggatgcccacggaagtgttggattccctacagctggagttaaaggaagttgagagctgccctgttctgggaaatgaactctggtccaccacaagaacagtacaagttcgttaccatggatctttctctccattcccaattatagttattttaaagccatcatataaagtagggtgtactctgcattggtgtacactcatctatagtgaccctgtaatgtcacatttttatgtactgtatatagttttatatgaagtaattctttctatggaacttaagatctgtggcatcaggacaggatgcctttgggaagtgattcggtcatgaaggttctgctgtggtatgggtgagattggtactcagtgtgcttgatgtgacggaatacctgtttggttcattggctttggctcctttgtaccattagtcttcttgatattcatgtgacatgttactctccaaatgtacctcaaatatggaattatagctaaaatcgtattacaacttaagggaggaagagtttgttacgatcattggtgttaaggaatagagtttgtccttgtgggcaaggcatggtggcatatcatgttggaaggaatgtggtggtaggaactagcccttactgtgtgtcacatcttagtaaattaggaagcaaaatgtgtgggcaggaacaagaagcagatatcagtactaagacataggcccatgaaagaactcctcattggcaagattgacagagcttctataaccttctaaaacagagctatactttgaggacgacaagttcaagcacaggagcctacggggacatttcacatttataccataatggtcttcattataaaaagaagcctgttggtttagagttttcaaaatctacttcaataagggttcttacatgctttaacctcccttctagcctaccgccctgcagaggtagtagaaaagagaggttattagtccctgggggaagtggacctgcttagaactagttcttctggagatgccaatctttgatatcaaaatatcagcagttcagtctactagcaaaccagcaaacatgaatcagcagcttcattccagtccacttggcagacaccacacattagccgcagtccactcaacagacaccatgcataaattggcagtggcagctggatccagaataccatgagaggttcattggcaagttactgtctatgaagtcatgtcaagcaaagatcagcaatggggtataagactccgggacccagagcatcattatcagacactaacaagttggtgcaaggtgaaccaaagcacaagccttgttccaccagctgtggtcatatttatattctttctaagcatcacatatcctttcacgtgtctgcttcagcaaaacattatctcacctgtttctgcttcagtaaaacaccctttcacctctctgccccagcaaaacatcattatgacctaactgaatctccaaagaaaccataaatttccacttcagagacccatggggatggagtagtggctcactagttcagagcactggctcctcttctagaaaacttgcattagattgctagtacctacatggcagctcacaactgctgtaactccagttccaggggaatataaggttctgacctctatgtgtccaaagcacacacctatgcccatccacagcttcccccaccctacacagaaagaaagagacagagacaaagaaagaaagaaaaaaagaaagaaagaaaggaagagaaaggaaggaaggaagaaagatagctacattgatcgataaggtaaagcctgagagagaaaccttgtcttttttttttttttttagtacctagcaaagaaggtcctttgtgtccatgggcaactgggctctcagtaaactaaaatttccagcaattttattgtacacttttcagagtttgcttatcaaccatcttgaatatggtgttttgttgtgtggttcaaccttcaaccaaagcgtgtgtaatctgacagagttcacagtttcctacaaatacctgccaattcctcggagcccttgatcctatttttgagggtaagtatctgggaaataagtctcctttctactcagtagcaactaatgtttactgcgctgtagcagactcaggggtccttggctatttgtaaatcacccaaagcatcctttggaggtggctctaagctctttgtctttgcacttgagggaacccagcctgacttctgtgaggaaactttgccctcaccaccatatggattctagtttcaacactgttcttcaagctgagctttaattggtaggtggatgaagtatccaaaactactagcaggagagtccgtagtcaccaatccattaagcgttagagaagaagtttcttgttctgcccctggcttctttagtgaaccctgtggaccttatcccaggaagataatgtgatgtatagtagcactgtatgacttaaccttcaggttatgacattactatttctgaagcactctgaagatgaaatacttgtgatcacttaaattgaattttgtaccctactgccaagaagtacacaggctatctccatccttttgcagctctcttacatgcaggacagcgttctcccaaggtgagaggctgcattgctcatcctccctggtgctcagtagggacacttctgagtggttactgcttgactaggcaggattctgtaggccattgaactgtagatactatagactggagatgtgctgtcgaaacaggttttaaattcaaacttttaagaaattaagttgaatgtaatgagatttggcgatcaatgccaaagtcatttgaaaagcagttcttaacattttgctaggtattttaacttggaaattgatatcagtattcaggaatgttggggtaggggaggtaatttcctcactcttctcctgtcttttcattttgtcttaatatgtgtaccaggaagtccagagttgcctatcatgaatccaaacagcataatggctgactgtatcctgtcattgctctggtcgacaaatccctgcacaatagtttgtggcatgctctcagtgaacttcgggaaagtgtcttggaggtaggagaggataccagaaacccacaggacaaatacataaagaagtcaatgctttataagaattatgaaccaagaggatttctgagttcgaggccagcttggtctacaaagtgagttccaggacagccagggctatacagagaaaccctgtctcgaaaaacaaacaaacaaataaacaaacaaaaaagaattataaaccaaattggaaattgatcttcaatcttttaaagtttgttcatccagttcgagagagttaacaattgcttttcaaatttcccattaaggaacaccgactgtgtgtgtgatcagggtgttgtgacatcatacttgctttctccagaatgcaggaaccatcattcctgtctcccctgggagtgggcttgtgtccaattgcattcacgtctagaacctcagctccaaataaatacagctgaaaggtaggatacagatgggccatttgaggcaagaatgagcctagacactgttatagttcaaggcaggaagggaaagaaataccattgtctggtccaggacacacatatgtagaacttttaaatacactaaagaagcagagctgcttcctaagttacttgtgcccaaattatcttccctctccactccgcgtcctgaggtgatccatctctcgggcctgcatgactatggaccggacagtaaccagcctgaccagggccatgagtagtgctaggtgcttttctgcaccaggagctgcggaggtggttttcttttctccatgtcctctgttgtcaggagacttgagagtttagcaggtgacatcttcccctccattttcccctcctttccaatctcttctttcaggatgtgcatttcgagcagcaagacaaggtagattacatctgagtgtctacatttgaatcctgcctctgccactcatgacccaggaaggtatttcatttcctactcatctgtgttggtatgaagtattgataccagtaatacctatttcgttagtctgctgtgtaaagtgagttagcacatggcgaactcttaaaccacacttgctaatgtcttcagttagcattacgtgaagatgagaagtactcttgtcagttcttccctgagtgacagacgagtgagtatctcaccctcattatttttgctcatcattattctatagtagagtggtaagacataacagagctggttgccaacagaatcgttcctggttgaacttcctgagatgctacaggttggaggtagaaagatggaaaagtataatgagataaattcctttctcttggaacttaaactgttgtaggaaagccgactaatcaacaagagattgcagtagagtgtagagaatgttaggcatcatgaataaatcaagattcaagccaggaaaagaagaacagattagctaaatggaatgggcttggtcacaggagccatcacagaggagatggaacttgagagagagcccgtgaaaggtgtgtcaaaagacaaaattaacaatgaatttagttgttagatctgataggctttttatctctgagtcataactctgggcagcatccatcctacaaatagaatgccattgatcaataatagaacaatggcttttacaaagtatgaataagagaaaaataataactagtgattatcattatttaatccacgttgctgcatgtaacagttaagatagagggacttgcttataaagtcagctataattggcatggctgggaatttggccattatttctcctttagcatgaatgactgtacaattggcctaggacaggtgcttagaccaaaccaatttttatttgttttgtctgtgttgtgtgtgttcattaatcttaattcttaatgagtaagggcatagatagtggaatatttccttgactctattgctcctaacaagtcaattatgttgagataagaaagctgactgttggttatagcaggtacatggtcactggaaatctgcaaggtcaatgcagtgggtgggatgaatcagagccctaagaagagttgatcctgatgagatttttacaataaaatgaccagtgatgttgcttagggtaactagagagcacaaggcagtactctacctgtggtccccctctgttgctggtgtccacattgtccctcagggtgtgtgcacacactttctttttctagttcagtcagggtgtgtgtacactttcctctttttcaatttcagcttctattcttgtccttttcacttcccgttccacagagctctgctgttacctgccactcctgtgcaggcaaagatcccagcacagatgaaggtgcctttcctgcctcttccccaggcagggaggtccctggtgagcaagttcagtgttgactgtgggtggtcatggggagaacagcgtgaggaagagcttgaaagggcctttggctgagagatgggcagagctccaggggcgtgaagtcctacacatgcaccaggattattctgttggataaagtcactctagccaacgcagggagcttacaaaaaggagatcgaaaaggccatagctgaagtgatgagtgttctcagtgtgtggctggagtgaagggagacccaaggattgggcaggacacggtccagatgagactggaaatgttgatgaaggctctgtagagaaaggtttttttttttttttttttctttctgtatttaaatgatatgggcctctatgttattctggggatggtgaaagatgtgtttccttaccttcagtttttcatgcaaaatccaaattttgtttttaacatttctttttgtttaattctaatgttataagagtgttggagcatatctatatttctaatggtatactgtgaataaattatcacagtgatttttagaaatgtacaagcaaatcaccttttaggttcctagaactactgttacttttgtgtccatactttgtctgggatagagattgctgtcgtctgccactgaccagaacttagtgtgtgagaaggtttgctttacttgtcgtccatgttgacccctccagaagctgtagggcaatagtaaacccctggtcccttctaaacgcatctctgagaacacactttcttgtgtatcagtaggattcatggactctatagtcccccagccgtgaattccagatgagggaagtctacagagctgttttacagcatctttcaatggagacgtggatattttggtatttgagaataggtcttgaagcttgtcatgggagtttccaaagaccagctgttgaatgcatttatacatacttaatgaggatttttatgaatggctattaaaagatctgagggcagttatattcaggttcaaagaaaggatgtcctatgggaatttaatatttttgaactgttggcagaccacaaactggtatttactggcattcttgtgttcacgggtctaacataacagctgaaggttgcattgccatgcatttcctctcctcttaactctacttttgtgttcctttttaatgtgaagcatcaaatatttccacacacttgaaaaaaatggaactctttacgttttgtgcctgtaatgatgaatgtacatgcctgatagtttgtgtgggtgcacacggagctcagcatgtatggaggttaacggacagctttgtggagtcagttctgtttaaccttatgtgagcccccaaggattgaagtcaggccactaggtctgtgtggcaatccctacgcccacagaacatctccccagccctgcactcacgtttggaggcttgcttactgtctcactgtacaacacaagatacagttggtagaagaacgtgaccagatgcccagctctgtctcaggtgactctgaggttgttagttaggtgacttaactttcataagctcagcagcacagtaaccattaaatgaatgggccagctcactcgtggcagtttattgacaattttaacacttcttgaggagtagtggcactcttcaaaatttgttctagtgtgtgagcagcatttatgaaagctgtgctaacacgagcacatttagcacggtctgagagtcatgtcacctaaaaggacaagcagggctactataagcactctttgaagaagaatgatgtgtctatgaggtaagaattaaagaccttttaaaagaaaagaaaggttttgaatattctagccacttggatagcaagtcttaaataggagagagtctgaatgcctgataggcttttgcttcattttgtttgtctattacagtgattgatcaatcaactgtatcttgtatcatctatccagtatgcccagccttttgacgttgtgacatgaccctgtcatctacaaagttcatgactgagaactgcccagttgagttgcaaaacaacaataacaaactaaaatacaaacgaaactcaaaatcttatataacagtttaagaattttgtgttggtctacctttatagtttaatcttggctgcaggttagacatgttcatattcttgtggtgcaaattacttttagcccatatggggaaaggggtttgcctagcttttctgctttttctacagagtaataaaactaaatattaaaaatattatcccatagaggtgtcaaaagtgcatatgaaatataaatttctataaaatctcaaaattataaaaaattcttcatgacataattacgagtaggaaacaagttaagcacatccattcactattattatctttgacatacggtgattacaaaacgttagtagtgtgtagtgttaggctcattgttaaagtgtctgggtttgcagaggctctgctcagcttgcacaagtctgtccatgtgccttggggttgactgactacttaccaggtgacctattcaactgatccaaagcatgtccctttgggcagaacacacagtcaagggcagacaaggcactccacccaatagcaatttggcactgaaaagttacaaggcaaagggcatggacacaggaaggaatgagacctgggaccaaaagcagttcattgtacaagagccccttttcaattttatgttatagtcttggcggtttaacacaggcctcaaacatgttagacaagttctgtatcattgaactgtaccccagtctatcttgtaagactgacaaattttatacgtacagctgatttcatatcttaatatcatacttgcagtgttgcttttccttagctctttatcaggaattatctgatgatcagaaaaagttagcttcaagattactatatacatgatagataaggtaacaactgtatggcaccagagagtagacggggaacaccagaaaggacacagatgtgttagactccatcgattgtctcttgtgcagtagagttcatgaacattcttttctttctgctcttggctcttctctttccatctttattgtatgtaggactcaacgtggtcgcctcagtctcaattctgtcaagaattgagctctggggaaaaagaaaaaagaaaaaagaatttgagctcaaccctcacagttacctcattgtctgggtctaaattcatatccccaactccacatggactttttatttcccagtccactcttgagtagagcagagttttgtcttcatctttttctttttagtcactcattctatagtagaagacttttgactttatgttaccatgatgacaaaggcttacaagtttctgcctctagcctggacttctccctccaaccacagactcagcatacagtaaggtgcatatcttgtagacatctcaaacttataccttacctggacaacttgaattcctcttcataaacctgcatttatcagtcatgtcaatgttttgcttgtgtaagccttgggattcttggctaaatggtttttttgttagattggttctgtttgttttgttttgtttgtttgtgctgtgtggctcttgagtctttcccagtcagtctttattaatatcaaatacaaaatgattatagaaagagcaacgaagtccagtaataggaacatgctgtgccccaaattttgttcagccttcagccagctgtggtttaagaaaaaggacatctcagagtggctaagaggattacgactagttttggataattcaaacactaaaacgttgctaactggaatttaaaggggcataggcttattgtgatacttcttaaaggcaatttcaatgaatgtttacagaaaaaaaaagaagttagcaacttcttttcccatttattgctaaatcatttgtaatatgcatatattatagtgttaatatactgtgtatgtattataaaggaaaacagattggaaaacataatctaatgcagatgaaataaaatagttttagatttctgttctttaccatgttttgtgttctcatttcctggcatcttaaacaaaatggatacatattatcatcttatttatatttgtgttgttttttaaaagtatgttgaaattttccagtttgtactcaaaattccatctaacaactcggttttctttattctttttccttgtttgagtagccacagttctgcttctgtttctatgaatttgcttactttgtgtttaggcaggattttgctatgtggcccagaatggcttctaaattccccttgctgctccagcctcagcctcctgagtgctggacttgtggttgtcacagaatgcctagctaatttaggttccacgtgtgcctaagatcagaaaatatctgtggtttatgactgattaatttcacatagtaatcctgtggagcttatctatgttgtagcacataacaggatttcttcctcttcatgggcaaattgctttcattgtttattcatctgccagtcacaccatttaaacagtgtgactattgctgctgaggccatggtggttacacagatatcctttcaaagatatctctcactgcatcctgctttcaattatttgaacatttatccagaagtgggctttgcaggatcataatttttatttttaattttattttaaaagtagtcttcatagttcttccatagttgttttataatcccaataacagtgtacaaggattctaacgtctacacattaagccaaaccttgagatcttagctattgtctgtctgtctgtctgtctacctatctatctatagacaggctctcgcatagaaaataggatttttttgtttgtttgtttgttttggctttctttttcttttcttcctttttaactgtcaatgccagagctcacacagattgctttgcacatacaaggtagtgcaaaactgtatccctagtcccctccaccccttcacgtttcctaaacttggtccataagcaagcccactggctttagatacatagtctatctgtcacttgattgctttttatcctgcacatacatcactgctccacttcccccatccccgtcaactctttttggactgctaccctggtcttctagctgggactttctgtttgcacccttgcacagtgataaattgaacaaatagtctggcactctcctgtcctctatttaaaacccagttgacaaccatcactctgcagagaaggcctgacattttttccttggtttgcagcattcaaagcatcccaccccataagaacttgcttccttgtcacctgccttaagcatagtagataagattttttttcctgcttgcatctggtgtgccctcaatgtgaggggctgtgttcatggacattccttgactcacaccttcctacaattcaagtgctactgagtttaacctcttcagagtgttcccaacccccttctctgaaaagacaatgtctgtgaactgcttctagcttctctgctttctttggtgtaagtactttctcccttcaaagatatcagactgtttatatttgtgactttccttgctgtgttcccctgagcaaatgtaagccttacatatgcagaaattccatctcggtatctgaaagatggcctgctcagaaaatattcatgtgataagcgaataaaagaatatatgtgtgtgctcttacacctgaacagcgcttggcatagaggtagcgatcctgtgggcacatgtgcgattgtcagtagtgttagttttcagggagaacgcctttcactgggctccacttcttgctggactccacttcttggtgatttctgcagctcatgagttctagaccattgtcaagaactttgagcagaaaagtagagatgcctcatctaactgaaaacaactcagggattgatgacagctgtctgtctaggttcccttggccccagatcaccttacctaacttgaatcttggctgcttgttattacctgcaatcctgcttcctattgtcctgtgagagcagagcctcatttgtccacagattgcttgttggaagcgagcatcacagcacaaagccagaaattcctcctgcaggggatggttcattgacaagtctgtggattatacaatggaatttcctcttacctcccttttaatgacaccataatataaaactgtaaacaatgggcttttcttccccatttgtttgggatacttctgaaattctcccatctgctgttcagaactttggggggctgtgggattagaatcatgtatacttgcattgttttctcatggctttgttcactgatggagacatccatttagatatgagggcttttatggtgttgtgagaacagctcttctaccttacatggtcttccccactggggcaaaatgctgctgctgcctcagtcccagtgattgtgtcataggcctggagcatggtctctgcctgttctgcctcctctcggcatggagctatttcagtcttaccagtcctggtgtttaaaacagaactgcaggttgctagggccttgataggtaaccaggtgcctactgattgcaagagacccatggatgtttggacatcagagctggagggatactcctagggtaccagtgtcatttaacttggtctgggggctatttgtataaatgagtttcctttgaaaatcaatgctctctactttatgatgagtatacatgctacaaactcgttttgcctcagtaaacaaaaatctattccccctttaaaaatactgtatgattattgtgtgattattgtgtgtctgtgcatggtatttgagaatgtgtgtgatacagcacacatctagaagcgtgaacacaagcatacacgtctgtggagttggtcctttctttcctcctctgtgtggtttctcggcttgtcaggcttgcttgattacccactgaggtttctcaccactctcttcccccctctttctaggacaggagtcttaccgtgtagcccaggctatgcttgagcttacagacctcttggcttgtcctccaaaatgcttagatcagcatcatgcaccatctgattaaagacgttttcatgagaaaagaaaccaaccacagtccatacttacgaggtctcctgctgttgaagagaatcaaagctcatatgggctcagactactgttaagagttaaaggcagaatattataggaaggcaaattagatggcatcaaactcatcatttaaaggaggattgagagaagtcagctaaaatttaaatatgatttgtctgttcactaccttttcttggcctctacagtagaaagattgggatgatgaagccagaataagccagttacatttgagagctgtaatagtacaatacaatctcatcgcctgaaaggcatcctatccatgctccaggagtgtgttgcttgtcatctctccagacttcacgttagcatagacagcttagtgaatgtgtggataatagaaaccaagagtgggttttgactattgctgtactgtgttattagtgtattattgatatctttaagattgaatggtgggctgcagagatggctcagcaaggaagaagaagcgtgtttgctgctcttccagagtacccaagttcaattcccagatccataggtctatattgtggttcacttctggagatacagcttcctcttctgaactccatgggccccagcgacacacatggtccatataggttagaaaaatactcttacttatcctaaaatctaaaaatactcatacttaaatcttaaaaaacaaaacaaaacaaaacaaaacaacagccaggcagtggtggcacatgcctttaatcccagcacttgggaggcagaggcaggcggatttctgagttcgaggccagcctggtctacagagtgagttccagaacagccagggttatacagagaaaccctgtcttgaaaaaaacaaaacaaaacaaaacaagccaaaacaaacaaacagaaaaacaaacgaaaaaacccaaagcaattaaaagattgaacagtgactttgtattggagaagagtggtgttggtgtttctgtgtgtgtatcaagaatggtggagtggaaatgtctaaaacccctgctgctgctgctgctgctgctgctgctgctgctgctgcttcttctccttctccttctccttctccttctccttctccttctccttctccttctccttctccttctccttctccttctccttctccttcttcttcttcttcttctctctctctctctctctcttttcccccttttatttgatattttctttatttacatttcaagtgttacccctctccaggtctccactctgaaacctcctatcctttctccttccctctgcctctgtgaggatcctctcccacctacccacccactcccaccttcccgccctggcattcccctactctggggcatcaaatcctctcaaacccaagagctgctctcccaccgatgttcatcaagaccatcttctgccacataagtggccagagccctgggtacctccatgtgtattctttggttggtggtccagtccctgggagctctgaggggtctggcctcttgacactgttgctcgtgcccccccccccctcattgggactgcaaaccccttcagctccttcagtcccttctccaactcctccattggggaccccatgctcagtccaatggttggctgtaagcatctgcctctgcacttgtcaggctctgatagagactctcaggagacagctatatcaggctcctgtcagcaagcacttcctggcatctgcaatagtgtctgggtttggagactgtatatgggatggatccccaggtggggcagtctctggatggcctttccttcagtctctgctccacacttggtctccatatttcctcccgtgagtattttgtttctccctctaagaaggactgaagcatccacactttggtcttccttcttcttgagttttatgtggtctgtgaattatatcttgggtatccgagctattgtgttcttttgtgaccgggttacctcactcaggatgatattttctagttctatccacttgcctaagaatttcatgaagtcattgtttttaatagctgagtagtactccattgtagtactccgttgtgtaaatgtaccacattttctgtatccattcctctgttgaggatgtttctttttcaaaatggtgctggtcacagtctggggagatagcttataggcaaggtgcatgctgggcaagcatggagacttgagctcagctcctgagcaacgatgtataagcttgagctgttcatttatacctgtaactgcagtactgggccagcgaagggtaggaagagacagatctagggaccagctatggggctgaaatggtcatctcctggttcagtgaggaatggtctcagaaaatacggtgaatatgtatcacagtttcagctgaggaacatttttattgtttctatttcttatctactgtggattgtgaagagatgagcatggccgagcaagtacctgtgggggagaatgactagatctttggacatatgacaagaaatggtatagctggaacatatggtagattatatttttagatgatttatcattgctcaagctgattgaattcagaaaagggagcaaggtgggagcatggaaggggttgagggaggaaagggaaagtgatgtaattatatttgaattaaaaataaaaaaataaaatttatctccagggtataatagtagtaataataataataacaaaaacaacaacaataataattgaagaaaacatctcagtgtcacctctgacctcagcattctgctacatgggtgagcacacctgcacatatctgtgtatgcaacacacacagacaacacagagtgctggttgggtttatagtctagggtgttacagaatgttttaattgctcatattttgtcttgatataaataatattatactaggtagaggctagcatgtagaaactgaagttctttgctgaaatgcaaggaacaattgtatctacaaatagaggattggtggatgaacactgagacccttggcatcacccaggcaggactgagagtgactcgggggcaagtgagaaaaaaaaccctgctggtcataagtcaacagtgggattccagtccaagcagatgtgagtggatcatagataggtcatgcagaaaggatttctggggagaatccacaccagatagggaaaacacatacctgtcaggaagaacgggtggcattctgagagaaagcagataaatttctgagacagaagagggacctgaaaggagcaagtgcagaaggactcgtagggcaggtctggtaagaccggagcttgctgcccacccttcttcattgctccgctaatgtttttatctgaaggtgggttcagtacttaaatgaaaactgctcttggcggggatttttgtccattcgtaagatcaggaacaaaccttatagatgacttcttccacctgccatgtaggagaggcgtcttgctgaggggtgagcagaggctgctttgctttgtttggtgctttctttcttgagacagagttttgctatgtagcctaggtggtctcagtactaggattgtaggtgtgcgccaccatgctcacctttagaacttcttgatgggaaaatatttcagttaattcatatgttcatcaagtactgtttaagcatgtagctcctatgggcttagctctgggctcagccttgaaatgttgctgcagcaaggatcccttccctgtcagaaccacccttggctacctctcagagtctatacatcacaggggtttctactgcagtgagtgccgtttgcaagatgctagctaaatgtgacaaggtttgggttccataaatccctcctgtgtttttagtattactgaaatggggacttgaggacacagagagccattcagctgaactgtgtgagatgcaggctgctatctgcccttgagctctttcatgccatgtcatctgcactggtgttatttggatgatgtagactgttggtttgaaactttaccgtgcaaggctgtcttgttcacagtgtagattctgcagatctacggtgcgagttgaggtctcacatcttgagcaaactaccggtatcactgatgccagagagtgggccatccagcatagcgccgttatagatgcctaaatctgcaaggctgtctttggctcagtaaggagctctttggtggtagcttgattttcattagtttgggttatcttatttgaacttttctagcttatcatgaaaagatataatctaatacattatatacttatatctgtacattaagcaagattgcccacttgaatccagagcttgacagtttgcctagttcagacagaggacttattccaagcatcccctgtctgtgctccagagcactggattgaaggtggccacacccaccctgcatgtatgtgaacgctaggcatgtgcactctatccctcatgcttttctagcaagtgcttacccactgagcccctctgcagtcacactccagacttacagtagtaattaaaccattctgtgctggctcagagactcgaagggtggtaaccttcttatctgaagctcatacaataaccagtgacagcaaaattatacattttacaaacatcttgaaatattagcccttccgactcataatttgtttatggcatgtagaacgagaaaaattattattttcgcattgctctactccttgacaacccttgggccttttaaaggttgcaaagtacgtaggtgtgtttctttttacaaaaattatttgatatgggtttaaaaattttaattacgtaagagcttatagaaaacagctcttttaggtgattttttttcaaaaaagtttctaaagtgatttgattgttgttgttttcttttgagtgacagtattggggaattcagcaacgttggagcaaacagttcagattcaacctttttcagttaatatcctacctttctggtgcttagtaatatcacctgtctgtgaagtttctagatgaagttaactgtgataggaagaaccaccctaattgtgggtgaaactttcccaaggcagagacctcaaactatataaaaacaagaaagcagggactgaaggagctgaaggggtttgcaaccccataggaagaacagcaatatcaacaaccagactccccagagctcccagggactaaaccaccagagtacacatgaaaggatctatggctccagctgcatatgtagcagaggatggccttgttgggcatcaatgggaggagaagcccttggtcctgtgaaggctcgatgcccaagtgtaggggaatgtcagggcgaggaggcaggagcaccctcatagaagcaagaggagaggggatgggatagggggtttccagagaggaaaccgggataggggataacagttgaaatgtaaataagtaaaataaccaattaataaaaaaatcaagaaagcaaatttgagtgtcagcattcctccagcactgcatcttaaactgttaaagcaatataaccagattccccaaactgcatgctgtccttgacaggattggccccatgctctttaactataagcccaattacacccttttctgtttaatctgctctccttgggtacttttgtcacagctggaatgtaactgacacctcctgggcttacccgtggaagtccctcaaataacaagactgcaaattgtctctctagtccagattgccctgccagtgagaattggggagtttgagatctgctcagagctaggaaaggtagctctaagtacctgcagtctgggctgagcttctctagggtttgagtccttgttgctaatggagcctttcgtgccatgatcttcccttcgacatttgtgcatgaggtacaagcgttgagatgtccctgagacagttatggtgaaaggtagagttcctgtcctggttagtgtttggttgacttgacacaaatctagacatatacgggaagattgacatgacaaaatgcctccataagattggtctgtaggaaatcctgtattcacgtgtgatgtggagggcagtgccatcccttggcaggtggtcctggatagaatgaaaaagcatgctaaactagccatgaggataagccataagcagcggtcctctatgtcttctgcttcagttcctattccaggttcctgccttgagttcctgtcctgacttccctgatggtggattgcaaggctgtgagctgaaataaaccctttgctccccaagttgtttggtgttttatcccagcaacaagagaaaccctaagatgttcccaagaacaactgttacagataacgtatctcagaaggtttgctgtgttgaaggttttctgtctcttagattttatatgtaagactactcagtctttgtgtaaccttgtgctggaagacatttctgtgaactactgattttagcatattgtaacattatgtttagctccatgtagtcagtacagtgagtggctctatgaccactgctgtctgaactttcagactcaaatgcagtagctttgagagctttggaaggcatggtggggtcaaattgccatgggttagttcctggctgtgtgatactatgaaattccttaagttcttgcagtcttagattttgctaaaggatgtttgttttgataattaaatgagacaattactgtgaagtatttatatagctcataaaacattgccggaaataaattaaagtacaagtaggtacttttagcattgtaattattagttatataatgataataccttttaatgccaataactctttataaatagagctatagcttggtagccacagagaattaattctaggaccattagaggtagcaaaagcagccactgctcaaggctttatataaaatggcatagtatcttcatgtaaactaggcataatctcctatatactttaatcatctcgaatttatttgtaagacctaatatctcatcaatgctatacattagtgataaaatttagataacaataagcaaactagctttacatgttcattataagcacaactttctttcctcaaaggttgtttctgccagtgtttgatttatgcatatggaatccctggatacagagggctgactgcacttgttatttccattagcttaatgtgtgtatgtgtgggtgtgtgtgtatagtcatatcacatgtatcatatgtgttgtatagcaccaaagttaagaataatagaggaaggatcatatagattatgtaatgacccagaggtgactttacggaaaattactgggaggttctagggaggttatggacagctccagggagtgatcgccctcactgttacagctcgtgtctgtgatgccgctgccccataagtgtgttttccacaaccacccttgttctccttccctttgcctatggggtgagtttgggtggggcgctcatcacagaagcctctctcatcagacagcttgcagagactgagctaagcatgcacagacttggcagtcattggacagagctgcctttcactgagaagaattgagcagacgcacagaaaccaggactggtggccttgaaggtagatcctcctcactatgggagacgtcagcaaaaaggagtgaaggtttcctcttccagccagcaaaccccatttcctatgaacagcaagcattatgtcagctgccagagcagcttgaatttacctctcttccctggattacgtaacgcataggattcaactgtgaggaccctggggtgtaaagcagtctttttcagggtaaaaccactcagagtttcagaaaaggaaaataaccacctatatcaagtagacaaaatttccaagtaattctatggagaaactttggaaggggctcagcaaccatgacagcctggctaccttggagactgcctttgtggttgcagctagaggcaggttagccagaccagtgctaaaggcagcaactgcagtaaccagaggctccaaggtccagtcccaggaggaacccttgtatgggtgaagctcatccccggagaggatgcgtttgttattcctgagctgtgctgtctttaggattcatagctcctggcaccagggctctcggctcctagacaagcgtggtgtatgccgtttcttgtgttcagattgcttgccatgttctacataagtctcttttagaaagatgggagatgatagtggtaatctatattgggatcatctcaattcagtattaaataagtctgggacaacaagtaacgcccaccccattacaagctttatatgaagcaaacatctatttttgctttgtgcagactccactgtatgaagtgctaaaaataagccaatgctcagaaatcatttgcgatgcaaaaatgactgtggtggtggtggtggtggtggggggaaccatgttgttttctgtcctggatataagttaatcttacaggtcagaaatcgtgccctagaactgtatctgctaggtcattgcaaggctttgctgggttggagggacctacactgctccctgtggactagaaatgccatctcgtcaacagaagctgctatcagattctctttccgctattttttattatctaaaagaaatctacttgagtcttgggttttaaaggttttatttttgttattgttgttccccctttttgaaaagtaggataggagctagatgtttataagtagagcacaggttagagtcactgaacatcaggatcataggagcttttaaagggctctgttcatttcctaattctgacagtgtcccttaaacttatgctctatgccaggcctcaaaagatccaatcctggccttaatgcattgacaaatactgagctgtcaagtcagatcaagtgtgctccatgcagtcacacaactaaccttagataccaatctccgaacctagagattggacacctctttgcttttgtcaagtaccccttccatccccgtaatgagctttctgatgtagcaacgttggaacgcgccagagaagtagctgggtagtttacagcctgagggctgggtttccgctgagagtgagacacctcctacctccctcagtgtgtccagggtgagccagctgacccagttttgagtctatttaggagatagatggccactttctcctctcccaccagcctgtatatcttgctgcttctgccttcggtcagggtcaagatgcagatagccttgagcatcttcctacactgctgaggttggcaagattctttccagactcccgaaacataactaatgccggagaatgagtgagagagggcattgcacagaaaggaagtggataggccggactctgatcctggaaggcagacactgttaactaggtgacagactgttttctgagcacttaaccctttacaaacctctcttcccgactgatggtttgttaatggtttgttacagtttccagtgagccgctttgcttttagaaatctacatggctcaaggagaggaaaagcagggctaggtttttctggaaaaatctatggaatgtgctctcctcccatctgtctgggtgcttctgtcttctcttgtcatatgcccacactctggcttggtgacatttctaaaaacccacaggagacagtggcagaatctaagcttgaaccctgtattagagagttttgttttcctcccccacagccaacctttattataacaacagcaatcatcccctctgctatttattgtaaattttctcagcatataaaggactcttggcataagggaggaggaaaatatagtttaaagaaccgagttgtttcttctataaggagagttcctaaaacatgaactttggacttagtttggaaggaaaaaaagtgaaataaacacttagatgaaatcagccttgtaaatgtttttatttgaaagatggaaattgattgtgtaggttcatatgtaacacccgaggtcctatataagctgtagactaggtcctatttaagctgtagactatgagtctgtacttggggatttgaaaaaagcagttacttttgaattctagtgccagactctgcccgtttgcacagtttcacagggtctgtgcacagcagcgcacagtgtctgaaggttcccaggccaagcctgttccccggctggaaacagcgcaccccggcttctcctttggctccctccgtgttttcgcttttgtagctcttagcattttctcttcctgtccacaatccagacagtccaggctcgagttggggtgtgtgtccctgtcccttatccggctgctccgaggaagagcctccctggccttttgctttcatttgccttatatggtcagctgtggagttcgttattcctggaaagggccttttcactgtttcaagcactattgccctccaccatctcctgaggagaactagagcttgctggaagcttggggttcctggttctaatggggatcctaatggattctcactggttccagggcaggtgatgtttggacctcaggctaatgagatgtttaacaataggtgtatagttaagaataaacttccttttgaaaccagggactccagagtgttccggtgttttgtttgtttggtttctgttgttgtttgtttgtttggtttctgttgtttgtttgtttgtttttcctttcttccgagccccaagtgggctggtccttctcatttcccaggatcctgctgcctagattgcctttcccctcgttattctctctggctctgcttcttggagggctttatctaccacaggatagatgacattgatttcagtcagatccatgtcctcagttatcttctgaagtacggcttccggtgtcataaagaaacagtcatcttagtggttcccactcaggcggctgcccctccccttcctgctcctcttcctggtgggatctagcctcccgacctgggcaagccgagcagcagcactttaaaaataattagactgaacacaagagtgacaagaaggtgtggtttatctttcaggccatggttagtttgtgctttagcctaaaaaggaagtttgtagtgtgttgaatgcaagttagatgtttctggatgaaaggtggagctgaagatgagggtggagttaatggagtagtccttgctcctggctcagacaggaacatttctctaaaaaacttttatttatttttaaaaagggaagttgaatttggtaatggtttgaggcggctgcctagctaccctgagaccggtttttccctcccatctttcatggcctgcctctccatggtggtgaggattgggcaagctttgaagtcactttcgttttctagaacttgttggtgaagcctaccccccacaccccctacccccggtcacccctctttttttaaagcatgcctacatttctctcttccagctctgcctgtccaaaatgacttccctcttttcccaaatccccagcagttcactgtctggcaaaggagtgacatctggcagcttgctagggtagagggagagagatgtagaagggaagactgcgcgtgttcaataccacaattaccctgagctccatgctgtcaggatgtattacccacccacccaagccaggggaggcacactggagtgacccacctgcacgattgtgtgtgcatgcctgcgtgcctgcgtgcctgcttgcctgctct

SEQ ID NO: 1409 - DNA, 9841 bp, Mus musculus
gctgaagcgtttcctcaagcctgccggggtgggaggagaggaggaggtggtggtggtggaggaggtggaggcagagggtggagagagagaaagcgcacgccgagaggaggtgtgggtgttccgctcccatcctaacggaacgagctccctcttcgcggacatgggattgcccagcggctgctaacccctctcctggtcctgatcccccaaaccggcgtggctccccggtcaccaaggagctgattacaagggaccaggatttgcatccttggctgggcgtccattggctacagagtgcctgacctgggtcaggctttccaacacggacatgtctgacaaaatgtcgagtttcctacatattggagacatttgttctctgtatgcggagggatctacgaatggatttatcagcaccttaggcttggttgatgaccgttgtgttgtacagccagaagccggggaccttaacaatccacccaagaaattcagagactgcctctttaagctatgtcctatgaatcgatactccgcacagaaacagttctggaaagctgctaagcccggggccaacagcactacagatgcagtgctgctcaacaaattgcatcatgctgcagacttggaaaagaagcagaatgagacagaaaacaggaaattgttggggaccgtcatccaatatggcaacgtgatccagctcctgcatttgaaaagcaataaatacctgactgtgaataagaggctcccagccttgctagagaagaatgccatgagggtgacgttggacgaggctggaaatgaagggtcctggttttacattcaaccattttacaagcttcgctccatcggagacagtgtggtcataggcgacaaggtagttttgaatcctgtcaatgctggccagcctctacatgccagcagtcatcagctggtggataacccaggctgcaatgaggtcaactccgtcaactgtaatacaagctggaagatagtgcttttcatgaaatggagtgataacaaagacgacattctcaaaggaggtgatgtggtgaggctcttccatgccgagcaagagaagtttctcacctgtgatgagcaccggaagaagcagcatgtgttcctgaggaccaccggcaggcagtcagccacgtcggccaccagttctaaagccctgtgggaagtggaggtagtccagcacgacccatgtcggggtggagctgggtactggaatagcctcttccggttcaagcacctggctacagggcattacttggctgcagaggtagaccctgactttgaggaagaatgcctggagtttcagccctcagtggaccctgatcaggatgcatctcggagtaggttgagaaacgcgcaagaaaaaatggtatactctctggtctccgtgcctgaaggcaacgacatctcctccatctttgagctagaccccacgactctgcgtggaggtgacagccttgtcccaaggaactcctatgtccgtctcagacacctgtgcaccaacacctgggtacacagcacaaacatccccatcgacaaggaagaggagaagcctgtgatgctgaaaattggtacctctcccctgaaggaggacaaggaagcatttgccatagttcctgtttcccctgctgaggttcgggacctggactttgccaatgatgccagcaaggtgctgggctccatcgctgggaagttggaaaagggcaccatcacccagaatgagagaaggtctgtcacgaagcttttggaagacttggtttactttgtcacgggtggaactaactctggccaagacgtgcttgaagttgtcttctctaagcccaatcgagagcggcagaagctgatgagggaacagaatattctcaagcagatcttcaagctgttgcaggcccccttcacggactgcggggatggcccgatgcttcggctggaggagctgggggatcagcgccatgctcctttcagacatatttgccgactctgctacagggtcctgcgacactcacagcaagactacaggaagaaccaggagtacatagccaagcagtttggcttcatgcagaagcagattggctatgacgtgctggccgaagacaccatcactgccctgctccacaacaaccggaaactcctggagaagcacatcaccgcggcagagattgacacgtttgtcagcctggtgcgaaagaacagggagcccaggttcttggattacctctctgacctctgcgtatccatgaacaagtcaatccctgtgacacaggagctcatctgtaaagctgtgctcaatcccaccaatgctgacatcctgattgagaccaagctggttctttctcgttttgagtttgaaggcgtttccactggagagaatgctctggaagccggggaggatgaggaagaggtgtggctgttctggagggacagcaacaaagagatccgtagtaagagtgtccgggaattggcgcaagatgctaaagagggacagaaggaagacagggacatcctcagctactacagatatcagctgaacctctttgcaaggatgtgtctggaccgccagtacctggccatcaatgaaatctccgggcagctggatgttgatctcattctccgctgcatgtctgacgagaacctcccctacgacctcagggcatccttttgccgcctcatgcttcacatgcatgtggaccgagatccccaagagcaggtgacacctgtgaaatatgcccgactgtggtcagaaattccctctgagatcgccattgatgactatgacagcagtggaacatccaaagatgaaattaaggagaggtttgcacagacgatggagtttgtggaggagtacctaagagatgtggtttgtcaaagattccccttctctgataaggagaaaaataagctcacgtttgaggttgtgaacttagccaggaatctcatatactttggtttctacaacttttctgaccttctccgattaaccaagatcctcttggcaatcttagactgtgtccatgtgaccactatcttccccattagcaagatgacaaaaggagaagagaataaaggcagtaacgtgatgaggtctatccatggcgttggggagctgatgacccaggtggtgctgcggggaggaggcttcttgcccatgactcccatggctgcggcccctgaaggaaatgtgaagcaggcagagccagagaaagaggacatcatggtcatggacaccaagttgaagatcattgaaatactccagtttattttgaatgtgagattggattataggatctcctgcctcctgtgtatatttaagcgagagtttgatgaaagcaattcccagtcatcagaaacatcctccggaaacagcagccaggaagggccaagtaatgtgccaggtgctcttgactttgaacacattgaagaacaagcggaaggcatctttggaggaagtgaggagaacacacctttggacctggatgaccatggtggcagaaccttcctcagggtcctgctccacttgacaatgcatgactacccacccctggtgtctggggccctgcagctcctctttcggcacttcagccagaggcaggaggtccttcaggccttcaaacaggttcaactgctggttactagccaagatgtggacaactacaaacagatcaagcaagacttggaccaactaaggtccattgtggagaagtctgagctctgggtgtacaaaggccaaggtcccgatgagcctatggacggagcctccggtgaaaatgagcataagaaaaccgaggaggggacgagcaagccactgaagcacgagagcaccagcagctacaactaccgagtggtgaaagagattttgattcgacttagcaagctctgcgtgcaggagagcgcgtcggtgaggaagagccggaagcagcagcaacgactgctgaggaacatgggcgcacacgctgtggtgctggagctgctgcagatcccctacgagaaggccgaagacacaaagatgcaagagatcatgcggctggctcatgaatttttgcagaatttctgtgcaggcaaccagcagaatcaagctttgctgcataaacacataaacctgtttctcaagccagggatcctggaggcagtgacgatgcagcacatcttcatgaacaacttccagctgtgcagtgagatcaacgagagagtggtccagcactttgttcactgcatagagacccacggtcgaaacgtccagtatatcaagtttctccagacgattgtcaaggcagaagggaaattcattaaaaagtgccaagacatggtcatggctgagcttgtcaactctggagaggacgtcctcgtgttctacaatgacagagcctctttccagactctgatccagatgatgcggtccgagcgtgaccggatggatgagaacagccctctcatgtaccacatccatctggtggagctcttggccgtgtgcacagagggcaagaatgtgtacacggagatcaagtgcaactccttgctcccgctcgatgacatcgttcgtgtggtcactcatgaagactgcatccccgaggttaagatcgcttacattaacttcctgaatcactgctatgtggatacggaggtggagatgaaggagatttacacaagcaaccacatgtggaagttgtttgagaatttcctcgtggacatctgcagggcctgtaacaacacaagcgacaggaagcacgcagactccattctggagaagtacgtcactgaaatcgtgatgagcatcgtcaccaccttcttcagctctcccttctcagaccagagcaccactctgcagacccgccagcctgtctttgtgcaactcctgcaaggcgtgttccgagtttaccactgcaactggctgatgccgagccaaaaagcctcggtggagagctgcatccgggtgctctctgacgtagccaagagccgggccatagccattcctgttgacctggacagccaagtcaacaacctcttcctgaagtcccacaacattgtgcagaaaacagccctgaactggcggttatcagcccgaaacgccgctcgcagagactctgtactggcagcatccagagactaccgaaatatcattgagaggttacaggacatcgtgtctgccctagaggaccggctcaggcccctggtgcaggctgagctgtctgtgctcgtggatgttctacacagaccagaactgctcttccccgagaacacggatgccaggaggaaatgtgagagtggaggtttcatctgcaagctaataaaacataccaagcaactgctggaggagaatgaagagaaactatgcattaaagtcttacagaccctcagggaaatgatgaccaaagacagaggctatggagagaagcaaatttccattgatgaatcggaaaatgccgagctgccacaggcaccggaagctgagaactccacagagcaggagcttgaaccaagtccacccctgaggcaactggaagaccataaaaggggtgaggcactccgacaaattttggtcaaccgttactatggaaacatcagaccttcaggaagaagagagagccttaccagctttggcaatggcccactatcaccaggaggacccagcaagcctggtggaggagggggaggtcctggatctagttccacaagcaggggtgagatgagcctggctgaggttcagtgtcacctcgacaaggagggggcctccaacctggtcatcgatctcataatgaatgcatccagtgaccgagtattccatgaaagcattctgctggccatcgcacttctggaaggaggcaacaccaccatccagcactcgtttttctgccggctgacagaagataagaaatcagagaagttcttcaaggttttttacgatcgaatgaaggtggcccagcaggaaatcaaggcgacagtgacagtgaacaccagcgacttgggaaacaaaaagaaagatgatgaagtggacagggatgccccgtctcggaagaaagccaaagagcccacaacacagataacagaagaggtccgggatcagctcctggaagcatctgctgccaccaggaaagcctttaccaccttccggagggaggccgaccctgatgaccattaccagtctggggagggcacccaggctacaaccgacaaagccaaggatgacctagagatgagcgctgtcatcaccatcatgcagcctatcctgcgcttcctgcagctgctgtgtgaaaaccacaaccgagatctgcagaatttccttcgttgccaaaataataagaccaactacaatttggtgtgtgagacactgcagtttctggactgtatttgtgggagcacaaccggaggccttggtcttcttggactgtacataaatgaaaagaatgtagcacttatcaaccaaaccctggagagtctgacggagtactgtcaagggccttgccatgagaaccagaactgcatcgccacccacgagtccaatggcatcgatatcatcacagccctcatcctcaatgatatcaaccctctgggaaagaagcggatggacctggtgttagaactgaagaacaatgcttcgaagctgctactggccatcatggaaagcagacacgatagtgaaaatgcagagaggatcctgtacaacatgaggcccaaggagctggtggaagtgatcaagaaggcctacatgcaaggtgaagtggaatttgaggatggggagaacggtgaggatggagctgcctcacccaggaacgtgggccacaacatctacatcctcgctcaccagttggctcggcataacaaagaacttcaaaccatgctgaaacctggaggccaggtggatggggatgaagctctggagttctacgcgaagcacacagcacaaattgagattgtcagactggaccggacaatggaacagatcgtcttccctgtgcccagcatctgtgaattcctgactaaggaatcgaaacttcgaatatattacaccacagagcgggatgagcaaggtagcaagatcaatgacttcttcctgcgctccgaggacctctttaacgagatgaactggcagaagaaacttcgagcccagcctgtcttgtactggtgtgcccgaaacatgtctttctggagcagcatctccttcaacctggccgtcctgatgaacctgctggtggcgtttttctatccatttaaaggagtgaggggaggaacactagagccacactggtcaggcctcctgtggacagccatgctcatctctctggccattgtcattgctctgcccaagccccacggcatccgggccttaattgcttctacaatcctacgactgatattttcagttgggttgcagcccacactgtttctgctgggagctttcaatgtctgcaataaaatcatcttcctgatgagctttgtgggcaactgtgggaccttcaccagaggctaccgggccatggttctggatgtggagttcctctatcatttgctgtatctactcatctgtgccatgggcctcttcgtacatgagttcttctatagcttgctgctttttgatttagtgtacagagaggagactttgcttaatgtcattaaaagtgtcacccgcaatggacggtccatcatcttgacagcggtcctggctctgatcctggtttacctgttctcaattgtgggctatctgttcttcaaggatgactttatcttggaagtagataggttgcccaatgaaacagctgttccagaaactggcgagagtttggccaacgatttcctgtactctgatgtgtgcagggtagagacgggggagaactgcacctctcctgcacccaaagaagagctgctccctgccgaagaaacggaacaggataaggaacacacgtgtgagaccctgctcatgtgcatcgtcactgttctgagtcacgggctgcggagtgggggaggggtaggagacgtgctcaggaagccatccaaagaggagcctctgtttgctgcaagggtgatctacgacctcctcttcttcttcatggtcatcatcatcgtcctgaacctgattttcggggtcatcatcgacacctttgctgacctgaggagtgagaagcaaaagaaggaggagatcttaaaaaccacgtgcttcatctgcggcttggaaagggacaagtttgacaataagactgtcacctttgaagagcacatcaaggaagaacacaacatgtggcactatctgtgcttcatcgtgctggtgaaagtgaaggactccacagagtacaccgggcctgagagttacgtggcagagatgatcagggaaagaaaccttgattggttcctcagaatgagagccatgtccctggtcagcagcgattctgaaggggaacagaacgagctgaggaacctgcaggagaagctggagtctaccatgaagctggtcaccaatctttctggccagctgtcagaactaaaggaccagatgacagaacagaggaagcagaaacaaagaatcggccttctaggacatcctcctcacatgaatgtcaacccacagcagccggcctaggcaaatgaggcagagggactctgctcagccctctgtatatcactgtcagggtgggtacggctcattggttctgatttgcccactaagggtacatgtgcgcttagtacatttgtaaatactcagttttgtattgtatgtatatgattgctattctcagaggtttggactttcgtattgtaattagctctgttggcatggtgacttgtcactcctgccaaaaatattaaaaatgccttttttggaaggactacagaaagtacctgatttgcacttgaaccagattatagatttaaaagtatatgacatgtattttgtatttaaaactagaatagccagtatttatgttttttataaaactgtgcaatacaaattatgcaatcaccataactttgtaactcctgagtgtcctaagggagtacacatctttgaagctgatttgttgatactcgtgtaataaatggttaaatatcaaatgctgctgctgctgccaaaattatattaatagcgagtttctggcccctgggcaattttgtaccttgtaattatcctatggtgatgctgtttctcgttgctaatggcattagtgcccctgtatcctagtgataactccaggtctgtgaaccattcaaacagcattcattttgagaaaagcaactttagtttcaaggataattttaagcttcaaaattaatcatttaaagtgtttctttaagagagccatgttagaggctcacactttagcttgaaaggagttgatgaattaattttttaaagggaactttttacatgacgtttggaataacagcatattgctgaccagtcagtgtcatctcccgggtgaattttgatgtcacgttatagtcaaatgagttagctgatggtttctagattttcttcctctgaaccatgatgcagtaggtaagaagttattatgcgtatatacatatatacattcatatacgacaaagtaggagctgtccccttaggatgcatagctgcccctagggtacgtagctgaacactgacaatggcgttcttctgaaagagccacgtttgggttttatttctttgtcacatgatttcttttctggatgggtgcaaagtatcacaggaagtgttttctctctgtcgccttgttttgtacctgggtctcgctttactagaccgtctctgcacaaaagtttaaaaactgaaccgtatgcagagttccgaagcaagtcaagtttgtaaatgcatacctaaaaatatttaataaacgatgca

SEQ ID NO: 1410 - DNA, 8250 bp, Mus musculus
atgtctgacaaaatgtcgagtttcctacatattggagacatttgttctctgtatgcggagggatctacgaatggatttatcagcaccttaggcttggttgatgaccgttgtgttgtacagccagaagccggggaccttaacaatccacccaagaaattcagagactgcctctttaagctatgtcctatgaatcgatactccgcacagaaacagttctggaaagctgctaagcccggggccaacagcactacagatgcagtgctgctcaacaaattgcatcatgctgcagacttggaaaagaagcagaatgagacagaaaacaggaaattgttggggaccgtcatccaatatggcaacgtgatccagctcctgcatttgaaaagcaataaatacctgactgtgaataagaggctcccagccttgctagagaagaatgccatgagggtgacgttggacgaggctggaaatgaagggtcctggttttacattcaaccattttacaagcttcgctccatcggagacagtgtggtcataggcgacaaggtagttttgaatcctgtcaatgctggccagcctctacatgccagcagtcatcagctggtggataacccaggctgcaatgaggtcaactccgtcaactgtaatacaagctggaagatagtgcttttcatgaaatggagtgataacaaagacgacattctcaaaggaggtgatgtggtgaggctcttccatgccgagcaagagaagtttctcacctgtgatgagcaccggaagaagcagcatgtgttcctgaggaccaccggcaggcagtcagccacgtcggccaccagttctaaagccctgtgggaagtggaggtagtccagcacgacccatgtcggggtggagctgggtactggaatagcctcttccggttcaagcacctggctacagggcattacttggctgcagaggtagaccctgactttgaggaagaatgcctggagtttcagccctcagtggaccctgatcaggatgcatctcggagtaggttgagaaacgcgcaagaaaaaatggtatactctctggtctccgtgcctgaaggcaacgacatctcctccatctttgagctagaccccacgactctgcgtggaggtgacagccttgtcccaaggaactcctatgtccgtctcagacacctgtgcaccaacacctgggtacacagcacaaacatccccatcgacaaggaagaggagaagcctgtgatgctgaaaattggtacctctcccctgaaggaggacaaggaagcatttgccatagttcctgtttcccctgctgaggttcgggacctggactttgccaatgatgccagcaaggtgctgggctccatcgctgggaagttggaaaagggcaccatcacccagaatgagagaaggtctgtcacgaagcttttggaagacttggtttactttgtcacgggtggaactaactctggccaagacgtgcttgaagttgtcttctctaagcccaatcgagagcggcagaagctgatgagggaacagaatattctcaagcagatcttcaagctgttgcaggcccccttcacggactgcggggatggcccgatgcttcggctggaggagctgggggatcagcgccatgctcctttcagacatatttgccgactctgctacagggtcctgcgacactcacagcaagactacaggaagaaccaggagtacatagccaagcagtttggcttcatgcagaagcagattggctatgacgtgctggccgaagacaccatcactgccctgctccacaacaaccggaaactcctggagaagcacatcaccgcggcagagattgacacgtttgtcagcctggtgcgaaagaacagggagcccaggttcttggattacctctctgacctctgcgtatccatgaacaagtcaatccctgtgacacaggagctcatctgtaaagctgtgctcaatcccaccaatgctgacatcctgattgagaccaagctggttctttctcgttttgagtttgaaggcgtttccactggagagaatgctctggaagccggggaggatgaggaagaggtgtggctgttctggagggacagcaacaaagagatccgtagtaagagtgtccgggaattggcgcaagatgctaaagagggacagaaggaagacagggacatcctcagctactacagatatcagctgaacctctttgcaaggatgtgtctggaccgccagtacctggccatcaatgaaatctccgggcagctggatgttgatctcattctccgctgcatgtctgacgagaacctcccctacgacctcagggcatccttttgccgcctcatgcttcacatgcatgtggaccgagatccccaagagcaggtgacacctgtgaaatatgcccgactgtggtcagaaattccctctgagatcgccattgatgactatgacagcagtggaacatccaaagatgaaattaaggagaggtttgcacagacgatggagtttgtggaggagtacctaagagatgtggtttgtcaaagattccccttctctgataaggagaaaaataagctcacgtttgaggttgtgaacttagccaggaatctcatatactttggtttctacaacttttctgaccttctccgattaaccaagatcctcttggcaatcttagactgtgtccatgtgaccactatcttccccattagcaagatgacaaaaggagaagagaataaaggcagtaacgtgatgaggtctatccatggcgttggggagctgatgacccaggtggtgctgcggggaggaggcttcttgcccatgactcccatggctgcggcccctgaaggaaatgtgaagcaggcagagccagagaaagaggacatcatggtcatggacaccaagttgaagatcattgaaatactccagtttattttgaatgtgagattggattataggatctcctgcctcctgtgtatatttaagcgagagtttgatgaaagcaattcccagtcatcagaaacatcctccggaaacagcagccaggaagggccaagtaatgtgccaggtgctcttgactttgaacacattgaagaacaagcggaaggcatctttggaggaagtgaggagaacacacctttggacctggatgaccatggtggcagaaccttcctcagggtcctgctccacttgacaatgcatgactacccacccctggtgtctggggccctgcagctcctctttcggcacttcagccagaggcaggaggtccttcaggccttcaaacaggttcaactgctggttactagccaagatgtggacaactacaaacagatcaagcaagacttggaccaactaaggtccattgtggagaagtctgagctctgggtgtacaaaggccaaggtcccgatgagcctatggacggagcctccggtgaaaatgagcataagaaaaccgaggaggggacgagcaagccactgaagcacgagagcaccagcagctacaactaccgagtggtgaaagagattttgattcgacttagcaagctctgcgtgcaggagagcgcgtcggtgaggaagagccggaagcagcagcaacgactgctgaggaacatgggcgcacacgctgtggtgctggagctgctgcagatcccctacgagaaggccgaagacacaaagatgcaagagatcatgcggctggctcatgaatttttgcagaatttctgtgcaggcaaccagcagaatcaagctttgctgcataaacacataaacctgtttctcaagccagggatcctggaggcagtgacgatgcagcacatcttcatgaacaacttccagctgtgcagtgagatcaacgagagagtggtccagcactttgttcactgcatagagacccacggtcgaaacgtccagtatatcaagtttctccagacgattgtcaaggcagaagggaaattcattaaaaagtgccaagacatggtcatggctgagcttgtcaactctggagaggacgtcctcgtgttctacaatgacagagcctctttccagactctgatccagatgatgcggtccgagcgtgaccggatggatgagaacagccctctcatgtaccacatccatctggtggagctcttggccgtgtgcacagagggcaagaatgtgtacacggagatcaagtgcaactccttgctcccgctcgatgacatcgttcgtgtggtcactcatgaagactgcatccccgaggttaagatcgcttacattaacttcctgaatcactgctatgtggatacggaggtggagatgaaggagatttacacaagcaaccacatgtggaagttgtttgagaatttcctcgtggacatctgcagggcctgtaacaacacaagcgacaggaagcacgcagactccattctggagaagtacgtcactgaaatcgtgatgagcatcgtcaccaccttcttcagctctcccttctcagaccagagcaccactctgcagacccgccagcctgtctttgtgcaactcctgcaaggcgtgttccgagtttaccactgcaactggctgatgccgagccaaaaagcctcggtggagagctgcatccgggtgctctctgacgtagccaagagccgggccatagccattcctgttgacctggacagccaagtcaacaacctcttcctgaagtcccacaacattgtgcagaaaacagccctgaactggcggttatcagcccgaaacgccgctcgcagagactctgtactggcagcatccagagactaccgaaatatcattgagaggttacaggacatcgtgtctgccctagaggaccggctcaggcccctggtgcaggctgagctgtctgtgctcgtggatgttctacacagaccagaactgctcttccccgagaacacggatgccaggaggaaatgtgagagtggaggtttcatctgcaagctaataaaacataccaagcaactgctggaggagaatgaagagaaactatgcattaaagtcttacagaccctcagggaaatgatgaccaaagacagaggctatggagagaagcaaatttccattgatgaatcggaaaatgccgagctgccacaggcaccggaagctgagaactccacagagcaggagcttgaaccaagtccacccctgaggcaactggaagaccataaaaggggtgaggcactccgacaaattttggtcaaccgttactatggaaacatcagaccttcaggaagaagagagagccttaccagctttggcaatggcccactatcaccaggaggacccagcaagcctggtggaggagggggaggtcctggatctagttccacaagcaggggtgagatgagcctggctgaggttcagtgtcacctcgacaaggagggggcctccaacctggtcatcgatctcataatgaatgcatccagtgaccgagtattccatgaaagcattctgctggccatcgcacttctggaaggaggcaacaccaccatccagcactcgtttttctgccggctgacagaagataagaaatcagagaagttcttcaaggttttttacgatcgaatgaaggtggcccagcaggaaatcaaggcgacagtgacagtgaacaccagcgacttgggaaacaaaaagaaagatgatgaagtggacagggatgccccgtctcggaagaaagccaaagagcccacaacacagataacagaagaggtccgggatcagctcctggaagcatctgctgccaccaggaaagcctttaccaccttccggagggaggccgaccctgatgaccattaccagtctggggagggcacccaggctacaaccgacaaagccaaggatgacctagagatgagcgctgtcatcaccatcatgcagcctatcctgcgcttcctgcagctgctgtgtgaaaaccacaaccgagatctgcagaatttccttcgttgccaaaataataagaccaactacaatttggtgtgtgagacactgcagtttctggactgtatttgtgggagcacaaccggaggccttggtcttcttggactgtacataaatgaaaagaatgtagcacttatcaaccaaaccctggagagtctgacggagtactgtcaagggccttgccatgagaaccagaactgcatcgccacccacgagtccaatggcatcgatatcatcacagccctcatcctcaatgatatcaaccctctgggaaagaagcggatggacctggtgttagaactgaagaacaatgcttcgaagctgctactggccatcatggaaagcagacacgatagtgaaaatgcagagaggatcctgtacaacatgaggcccaaggagctggtggaagtgatcaagaaggcctacatgcaaggtgaagtggaatttgaggatggggagaacggtgaggatggagctgcctcacccaggaacgtgggccacaacatctacatcctcgctcaccagttggctcggcataacaaagaacttcaaaccatgctgaaacctggaggccaggtggatggggatgaagctctggagttctacgcgaagcacacagcacaaattgagattgtcagactggaccggacaatggaacagatcgtcttccctgtgcccagcatctgtgaattcctgactaaggaatcgaaacttcgaatatattacaccacagagcgggatgagcaaggtagcaagatcaatgacttcttcctgcgctccgaggacctctttaacgagatgaactggcagaagaaacttcgagcccagcctgtcttgtactggtgtgcccgaaacatgtctttctggagcagcatctccttcaacctggccgtcctgatgaacctgctggtggcgtttttctatccatttaaaggagtgaggggaggaacactagagccacactggtcaggcctcctgtggacagccatgctcatctctctggccattgtcattgctctgcccaagccccacggcatccgggccttaattgcttctacaatcctacgactgatattttcagttgggttgcagcccacactgtttctgctgggagctttcaatgtctgcaataaaatcatcttcctgatgagctttgtgggcaactgtgggaccttcaccagaggctaccgggccatggttctggatgtggagttcctctatcatttgctgtatctactcatctgtgccatgggcctcttcgtacatgagttcttctatagcttgctgctttttgatttagtgtacagagaggagactttgcttaatgtcattaaaagtgtcacccgcaatggacggtccatcatcttgacagcggtcctggctctgatcctggtttacctgttctcaattgtgggctatctgttcttcaaggatgactttatcttggaagtagataggttgcccaatgaaacagctgttccagaaactggcgagagtttggccaacgatttcctgtactctgatgtgtgcagggtagagacgggggagaactgcacctctcctgcacccaaagaagagctgctccctgccgaagaaacggaacaggataaggaacacacgtgtgagaccctgctcatgtgcatcgtcactgttctgagtcacgggctgcggagtgggggaggggtaggagacgtgctcaggaagccatccaaagaggagcctctgtttgctgcaagggtgatctacgacctcctcttcttcttcatggtcatcatcatcgtcctgaacctgattttcggggtcatcatcgacacctttgctgacctgaggagtgagaagcaaaagaaggaggagatcttaaaaaccacgtgcttcatctgcggcttggaaagggacaagtttgacaataagactgtcacctttgaagagcacatcaaggaagaacacaacatgtggcactatctgtgcttcatcgtgctggtgaaagtgaaggactccacagagtacaccgggcctgagagttacgtggcagagatgatcagggaaagaaaccttgattggttcctcagaatgagagccatgtccctggtcagcagcgattctgaaggggaacagaacgagctgaggaacctgcaggagaagctggagtctaccatgaagctggtcaccaatctttctggccagctgtcagaactaaaggaccagatgacagaacagaggaagcagaaacaaagaatcggccttctaggacatcctcctcacatgaatgtcaacccacagcagccggcctag

SEQ ID NO: 1411 - DNA, 96596 bp, Homo sapiens
gtcagaatgtacacattcttcctttaaaaaaaaaagtgaagacaacaaacataatacaaagattttctatttttttaggttggtgcaaaagtaattgtgtttttgccattgaaagtaatggtgaaatctgcaattatttttgtaccaatctaataatagcaacttctcaccctacttctctaaccaagtgaagatttccaaaaccagatggacttaaactttttttttttttttttttttttttgagatggactctcactctgtcgcccaggctagagtacagtggcgctatctcggctcactacaacctctgcttcccaggctcaagtgattctcctgcctcagcctcccgaatggctgggattacaggcgcctgacaccatgcccgggtagtttttgtattttcagtggagatggggtttcatcatgttggccaggctagtctcaaactcctgacctcaagtagtcgacctaccttggcttcccaaagtgctgggattacaggcaggagccactgtaccaggcccattttgctttttctgaaggccaaatgagtgttcaataatacagaagttaaaaatgattaacaaatcccacccccccttgtttttttggaacaaaatcttgttcttctgaccagactagtgcagtggcataatcatggctcactgcagcctcaacctcccgagtagatggttctacaggtttgtgccaccacactgggctaatgtttttattttttattttgtagagagagagtctcactatgttgcctaggttggtcttgaattcctgggctcaagctcatcttggtctcccaaagtgccgggacagtatccttttttggaaagaccaaatctatttacatattaccacatggaaattttttcattacgccttataacaatgtttcctcattcaggctcaaaagagtatattcagaaatttagaaagaaaagccttgatttgcctatgagtgagattcttttggaaacaacaatctttttcttttaaatatctttatttatttatttatttatagagatgaaatctcgctctgtcgcccaggctggaatgcaatggtgtgatcttgtcttactacaacctccgcctcctgggtcaaagcaattctcctgtctcagcctcccgagtagctgtgattacaggtgcctgccacgacaacctactaattttttatatttttagcagagatggggttttgccatgttgaccaggctggtcttgcgctcttgacttcaggtgatctgcccacctcggcctcccgaagtgcagggattacaggcatgagccaccacccttatttatttttgattataagagtgctatttgctgtttcttttttttttttctaataaacactgatctttatagaatctttatagaatttgctttaagatagccaatccctctcctccccatccctctcttccccttccctcccctttccttttatttggatagaccctcactctgttccccaggctggagtgcagtggcatgatctcggctctctgcaacctctgcctcctaagttcaagtgattctcctgcttcagcctcctgggtgtgcaccaccacacccagctaaattttttaaatgtatttttagtagagacggggtttcgccatgttggccaggctggtctcaaattcctgacctcaagtgatctgcccacctcggcctcccaaagtgctgggattacaggcatgagccacggtctttttctgtttcttaaggtatttcaggtattgagtaagacttagactacttttaaaatcgatgcactttctgttgcctcctcctcctcctccccctcttccttctaagaggtaacacagttaaaaaaaattgaaataaaagggcttgtttggaggacagttgagcagagaaactactcagaagaaggtatttccctcattgactcgctatgttatattcaacataaatgtttcaatgacaaagaatcatcttgataatatggcctataatggagaaatattccagtgtgaatggacaggtgcctggatggtggtgaagaaaccaaggaagatcagaggaccacagcaccagccgtttcctaggtcacaactgctaggtctgcaaactcttacttgaaagaagaaacaaggagggaaatggcatgagagatcagctgatgacaataacctctgataaaaaagcagccagtcttcttatgtgtcatcctctaagcaccatgtatgaaattcctctgtaagaaaggtagtgatcaagaaaaaggcagatagtaaaagttctatgcattccgttcagtctttttagtgcctagtgtagcacctgctagggtaggtaggtacctattaaacatcagtttaataatgacagacatgaaaccaaccaaatgttcttaatagctccctctaccctattcctcaccagtccaatcccacttccctgggctgaccctacccaaatgatctgtttcataaaggattgactcaaattctctgtctggattgaactcatgatacaggttacctatatcctaaaactaaagttagagggggaaatactacttaaaatcttgaaataaaattaagtgggagcaaaacaaagcagttaatttgcatgagtctacactgatagagcatgagaagtgaaaaaagctataagttctacttcgctggtaactgaattacatagaattcactgctcagtttagtaactaagtctaatgatcattaaaaagctttcccaggagaagggaaagatgaagcctgcaatactcaagttttccacttcctttttggagatggagtctcgctcttgtcgcccaggctggagtgcagtggtataatctcggctcactgcaaccttcgccatccgggttccaggattctcctgcctcagcctcctaagtagctgggaccacaggcatgtgccacctaacctggctaatttttgtatttttagtagagatgtggttttgccatgttgccccggctggtctggaactcctgacttcaaatgatcctcctgccttggcctcccaaaatgctggcattacaggcatgagccactgtgcctggccttccatttcccttttcttatgcataattctttttgcttttctggttgatttgtaaagaccctaagaaggacatattgcaacaaatacaattactcctaacttggagactgacacaaaagttgtttagttataataagtaggttgttctgcattttacccaaaaagctaagtgtaaatttttcaatcatttgttgaaacatcactatcaccttcaaaggtaaaaaataattacttctccagcataactgtaaaactatcacaaaaatgggcacagacatctccacgaatgtggcaagattttagataattttttgaataagataggtaagtgtaatcatatataatttttagattaaattggcatgcattttatttttttttgagacagaatcttgctctgtcacccaggctggagtgcagtggtatgatctcggctcactgcaacctctgcctgccgggttcaagggattattgtgcctcagcctcccgagtagctgggactacaggtgcatgccaccacacatttgtggagagtgagtttcagataccatgagatttcacttcaaaatactttagtatacatctcttgaggacattttcatacataaccacaatgccatcatcacacctaagaaaattatttacaatttttataatatgcaaattgtttacagttgctcagaaatgtcttctatagattcattttaaaatttcttttaatccaaaattcaaaggtcacatgttgcatttagttgtaaagtgtgtttcagtctttttaaatttttaatttgcaattgacacataattgtccatattcatggggtaaaatgtgatgtttcaatgcatgtatacatagtataatgatccagtcagggtaattaccaaatgcatcactttaagcatttgcatctagataatcctcctgccatattttttaaatgacactgattcatttgaagaatccaggccaatggtcttgtggaatgtcctgcattctgagtttgtttgattgtttcctcacgaatatttttggcaagaacatttcatatgtgatgttgtgtacttcttatagaatcatatacatatgtaaatagtgtctagttgtcccagtattgctggtaataaatttgatcacgtggttatgtgggtgaatcgtgggtgattgccattatctctttactgtaaaggtccatttttcacttcataatttgtgtgtgatgtatggagtgatttttaggaccacatgactatcttattcctcatcaacattttccccagagtgtttggcatctattgataatctgcctaaataattttttacttatttatattttgagacggggtctcgctctgttgcccaggctggagtgcagtggcatgatcacagctcactgcagccactatctccctgggctcaggtgatcctcccacgtctgcctcccaagtagctgggactacaagtgcatgccaccacgaccagctaatttttatattttttgtagagatggaattttgccatgttgcccaggctggtcttgaattcctgggctcaagtgatctgcccaccttggcctctcaaagtgctaggattataagcttgaggcactgtgcctggcctatctaaataaattattatactggaagctgcaaatttgctaatgttattatttcttctacatgtattagctgaattattctgtaaggaagagctttatgttttttctttgatacacagatttcatttcagtttaaacactaggataagacaaaaaagccttttccaagatttcttcaagtccccagatctagcttgtctaccagagcaatttaggatgacagtcttgcagatgggaggcaggagatggggtagttaataatagacccctggctctgcatgttttacaggaaaataatgaataagaaaataatagttctctttacttgcttacatgattctagacaacactggcagcaatcatcagagatggtatagcagctacttccatattgcatagagtactaagaattcttaatttttgcattattttgtagttatcatgctgccttccagattttaaattattgacattttgtccatgttccctccactcacaaggtgactgaccagcagtttcttccgcacttcagagataggacaacaaaaataggccctcttgctgtgtcttctctcattctcacaggatatctagagcctggattcagaaaacatcttactttctatagctccataccaagtcgtcctctctcctgcccttgttcgaatagcaactccactttttccatgtcaagtagggttgattaagtgtctgtaggtcatttcttctggtcatctttgtaagttccaattagccagtaagtgctgaatgcttactctgtatccagagcagaacaagatgctgcaaagggtcctacatttataggacttagtccctatcttcaaagaggttatctgaatggtgagacaaaaatcaccgaaaaatacagctaaaagataatctagtcttgtgggagtatctatgaatgatttttagaggactggtacaagaaacttaagaactggtgcagaaatttgcagtatctgtgttgtgctggggcaagtgcccatggattttgtgagtttccacgagggctgtgactctatccctccaccataaaacattcacaatgaccaagagagactagttggactagctatgcagtagctatttgtctttgctgatgttttccatggtcaatggtagtccatcacattagataatatagtgtcagtgccaaaatatagattgaattctatgattgggtgttggacattctttcttgccatttaagtgtcatttagagttattaattaaagcactcaaggctcattgtgacattcataggtgattctgttctttttttttaaattttttacaggtacatagtaggtgtatacattttggggtacatattttgatataggcatgcaatgtgaaataagcgcatcatggagaatgggctatccatccccctcaaacatttattctttgagtcacaatccaattacactccataggcaattgaaatcttatgcctgagagaaaattgggaatagtgctgccccaataatctgaagtttggtttggaactgagtactgtatcaggacgcatcaacattatctccattcttgtcaataatattctcttactttagtatagcgagggtgagtttgcaaagccctttcatgtcctatgacccattgacccagtgagattgacaaggcaaggattgttagtatcactttatcaaacaaaacaaaacaggatataaatggtacagctgggtgtcaaaaccattttctccgatccctcctttctccagcttatcttgctctcttaaccagggcagcatttgaggtgggcttctaggcagatgaattcagttagagttttcagctgtgtactgctgatgaaacctgcttctatttgtaggtcttccctgggggtaggctcaagtgctagttttggactttcttcagacttctgctcagtctatgatactgtactgaccttgcaaagccctcgtagttccctgcatgaacatttcaagggcaaagtcataaatggccattttaatgggctggtcatcatctcgaattgtgatcctgggaatcagattcttggttttctagatcagtgctgcataatatatgatatgagctatatatgtaatttttaatttcctagtagctatattaaaaaaggaaaaagcaggtaaaataaattctaataatctattttatttaacacaaatatccaaaatattaccacttcaacatgtaatcactatacaaattaagatattttgcttttttttgtactaagtctttgaaattcaatgtgttaacatctatttcacatctcagaactagccacatcttacgtgcctaaatggctagtagtcactatactggaaaacacagggatagaaaattcttctagaaaaaaatagtgaagagaaagcagctcctttccctctactgataacagagaatgagttaggcagtgacccttatattctgacattaatcatcataatttatcagtcatacatcatcatagagaacctcttcacatcatagcaaaattactttctagtgacctagcagcttctagaccttaaaaatgttgaataggattatccatacatacaggcggagaaaataggctatgatagagatgggctacaaggtgttgcatgctccaaaaatatggtcatgtatcctgccatatgcctgacacaccttccattaaaacatcttcttaacaaacttttttttttttttttaacacatctactaaaatgtgcagaaagaagaataagtccttctgggtcaggggaggtagagagcacaagcatgaataagacatagatgctgccttcagtgaaatttgtggtctccgagggaagacagtggataatgcaggtaggagataaatgtccattatatgatgaaaatgaaaattgtccaactggatcttcagaaaaccgctgttaatattccattgtttctgagttagaagcacatgaaataattacccttcactatttaccagttacacaggcatacactgatttgttgaatttgcttgaaaagtagagccgaagatcctttgaaaatggaagaggttttcatgggggaagagatgagtgggggcgaatgagaaacatctcctttatatggcagatgcggcagtttcttgatgatggggagaagcagcttaacgtattaggcactagaccccagcgtccagtgaccaggggataatgctgacagggaacggagggcaggagtgaatatcgtgaacacaaactttgtctatttcaagagctttgccccttcctggactgacattaaatgcttatctgagcaggcaaatacagtgcacatgtttacattggggaggtagcggagactagtagtttaggaccagggttcaagactcagctatttgtgtgactttggaggaagtaatttaatcgctttgtgccccccctcagttttctcataagtaaaaaatggcttaataggatttaattaggtgctatacagaaagagtttagaccaatgcctgacacatggcattcacccaataagtgtcaataattatgattcgttttggcattattatgtcagtaataactattagctatgattctcctctaatttgttcctaaagtttcatgagactcgattttatattaaggaatcctgctaaaaagtagacatattctaataagaatttccttcagatggcaaaactggggcaaagagatgaaaatgacttgcccaagggctcagaggctgctcctaaatggggagagaggctatttaaggcaatggcggtggatttccccaaagacaagggtttcatacacgtagagtctggaacgggagtccaggctgtaccacttaactcgaggggtcatttgggaagttacctgatttctctgagccctggattgtgcacctgccaaatagatataataaatatacctacagttggtaaaactcaatagcatgacgcatgaaaactgcatgtggtctgggctcaataaaatcagcctccccattgattattatcattattattactattgttataacagatctttaggcggcgtcaggaagtgcctgtctgggatgctataatgcgtttggctcaccactatgccccagcgcctggcacctagtaaacactcaggaaacgtttgaggaatgaatatacgtcatttgaggcaagacagggcagtcggctgactgcctccgggcttagctcttcccctccttgcaaaagccggagccctaagcagcgtgtagcccgggagcccaggcattacttggcagcgggtgaaacccaccttgccccattcggagctcttggagagcgccccgcctggatgcgcatctctgtgtgagcggctctttcctaagcccttatttttctggtttgcggtttatttacttaagcatttacagctcccaggagcagaggggctgctagaggtacggtcaggactgaggtcgcggtttgtatttattttctgcctcccaatctcagagccggcaagtcacaacacggctcctttatttgtgcaccggagaggtctgcctttctttacctcctcacgggcgataaaagacaagcaactcgggctcagaaaagtgctctcacgcgacttgcctgtgtctccgcttgcgtggaccgtcgctcccaggcttggtttctcgtgcaaacccgagcagggcggagcagattaaataaagacacctcgcgcctttaatccttgaccgcaaacactggcgtttttgtgccccggatttctgaaattcttggctcggggaaccaaggcagggggagggtgggcttgtaaaaacttcccaaagcagaaatccgagctcctagcccctccccggccccagtgacacctggattccagggaaggggggcagccggaggagaggcgtccccaagggttgcgggcgcttcccaggggtgactttgaacggctggctccaagccctaccgaccccagccaaggaacaggctcagcagcctgaaagcctcgcaggacgcccctcccctgtccccgcacgcgtctatttagggcccagcccgggcgcccaggggattctgggacttgtagtccctccccgcagcctcaggcgccgccacgacccgctacttggactacattgcccagggagcttcccggcctatataagccacccggagccgctttaaagtgcagtaaccatgtggatgtgctgctgaagcgtttcctcaagctcgctggggtgggaggagaggaggaggagaaggtggtggtggaggaggaggcagggggtggagagagagaaagcgcacgccgagaggaggtgtgggtgttccgcttccatcctaacggaacgagctccctcttcgcggacatgggattacccagcggctgctaacccctctcctcgccctgctcccccaaaccggcgtggctccccgggcaccaaggtagcggctggggccgggcagagggcgcggggagttggcactggctccccgggcgcagaagtttttgccccgctctcggggagatcttgagggatgtgcatgcacttggcatgcatttgggggttcctttactgcgggcaattgttttggggggagctcatttgaagcttaaaaaacaaatatcctctactctagtgcgtggctttgggggctccccattctggtctgatgtggcattcccccaagttggaaactgttgctgcagctgcaggaaatagttctttttttttttttttttttgaagagaggttgtgggggtgtcatatgtgagtctgctcaaggaaataatctttctaaaaatgtatccctctcttgcgctccgtggttgggagaataatgcatgtgtaggggccccccgtggggagggtttttaaaaacggaagaaaaccggagaagcggtgagggatgaagtgtggacgaagctcatgtccaatgaggatgcgggcttcggatacttggccttctcgccgggaaacaagtgctttgggatctgccaaacacttcccttagttccagcctcccgcacgttcgaagtttgtgcgtgcctagtctcaattgtcagttacatcctggaaataagtaagcgtagttacctggaatcttcgcccaagcgatcccaccaacttgcctaccaagtttgggggcgggggggctgtccccagtgaaggaggctaaagaaggtggaaacttgtaatttggagcatttctgttagagctcatcttccgcggtctggtactcagtcttctttctttctaaatatttaggagctgactacagaggagcaggatttgcacccctcgctgggcttgctttggcaacagagtgcctgacccaggtcaggtgagtgtggaagcctgagtgctgtagtcaataatgagtttttgtcctaagcctattttaagttctatctaaaccgccaaggaggtggggagtaagaaagaaaaagaaactccgtggctcagtcttcaaaatttgcctctgcctttggtgagggcttttgggagcagaggtccagtggacagtccgtttcttggaagtagctgagaattgaaggagcctgaaagtttatgagagaggaggggaaaaggccattaaatggagcaataaaacggcggcccattgccggtctgaaaagcatgctgatgatttaaattctgaaggatacagtgcatttcatatgccaaaatgtgtaagcagtattaactgcctctctccttcaagaaatagtcactcttttctaattttgaacgtgtgcttaatcagagtaggttggattgcaagaaatgaaagtggttgctgcaagttgaaagaattagaactttaaaaagggaagtgagttattgaagcttaaggtggtagcatccagcccttgactcaagccacctgagtgtcaaggaatctggcaggtccctgttgttttggggcccgtggtggaatatgagctgagagcagcatttatctgtaaacacaacagttcctattttttccccaaaatggtcagactgcatttgaagagtgggaggtttcaacgggtgcacgtacatcactattgctgcagatttggctatcaggagttttttctcctgaaatgttcaggaacatggtaaataacagggtaacagaggtaggtgggggtgggtggctgggtcttaataacttttttaacattctaaatatttagctgttccctgggctacaatctttgggcttttctaatgagaaaataaaagtcagacacttcattatagtggtatagtgcttttgtttcctgttgataagatcctcaggagtactggcggagtgagaagcatttggatgtgagaactctagtttcttcttggagttctgttgactcacatggctgtgtgggtgctcatagagccaaggattaggcccagttccccttttcagaattagctgtacagcaaggaaaaactggtccacagactcttttctaactggttgctaaaaataataagatggacacattaagtacttgtaagccaggtccagagccatgtatctcagaaaccctgtgcgtcagatgcaggtgaagaaactgaggtgcagagagtgaaatcacttgcgcagtagctagtacaaagtaggagcagggtgtaacctcaggcggtgaggctgtactgcatcccacaaatggacctcagttgatttggggatgctggtggtgagagggaagctaggaaaaatggtaaacttactgctactgatgaaataacttgcatacctcccaccaatgatgaaataatacataacattgatgtaagaaggaaaggatgtagccacaaacatagggataaaagagtgcagatatttgaggaggtattagatactgtaatgagttcattttggaaagcctgaatggggagagtaaaaagaaacaaaaccacaaggaacattatgtaagttaagcattaggctcacctcctagctgaaatacatcttgattatttacatcaaagaatctgagtaggttaaaaggatcaggcgtttccccatctgaataattcgaaagtttaaactgcagttagactgcaatgtgaaatgttgataccttttcatataccttccagtttgctttgcagccagttgtgcagatgtttttgttctccattttttctttcaagttcatgtgtgtgtgtgtgtgtatgcatatgtacactgaaagtacaatctgctctttgaataattcaaatcagaacagaaaatcctttcaagatatcattcttgtcaggcagggaaagttcttcatgttctaagtgaattactctggctcttgccttgagacccatgaaagtcatttggggttgacaatggtatctatttaaaccaagtgattgtcttttggagggaattggcatcttttctttaggaatgagaagtggaatggttgcttagaaaaaaagagatagatgaactccacagaaagatcaagagtcttttcttcaaaatatttttaagtgaggaagatcagggtgttggtattgcggggagggaggagagtgggcagagagaaagataaaaaagaaacctttaatccaatggtgtgcaaccaactgacttccagaggggggaatatcacatggcttttcaactcatttataaagatatcatggaaactgtctgatttcttcatgagcagctcttagaaaacaaacaaaaataaaacaaacaccaaatatgaacaacagaaaaaaacagccaaaataaaagtaggcctggagttaggtttctaggtcaagctgtctttggctacatctaattaaggagtctccacagggccagtgtctatcttgtttactattggtttgatttttaaaaataaaacacattgcatttgcaggctgtctgttaaccagaagtccatgcagttttttttttccatttttgctgttttaagtttgtgcatagctcaattgatgaatgcaattaaggcttgaagtcagtgatgtgaatgacataacttctatgattccttacaattctcttggtttctgtggttctgagatgattgctaatgagaataagccagatacaccactgaaaccgtcacccattcaactttgagatttctaaattggatgtagtttaaggcacatggtgtggtaaatctatttaacagactctaagacctgttcaagttgttgtgtgcgattcaaatgttttattctttattcaacaaatttcttgagcacctgctatgtactaagatgtattccaggtgctcaggatatagcaatgaacaaaccatcccgttcccaagaggcttacatctcagttggtgggaggcagccaatataaataaacaagtaagtattatagtattagaggtagtaaaagctatggagaaaaagaaaactggttaaagggggaacagaaaataacaagtggagaaattagatcccttgtgcattgccggtgggaatgtaaaatggtgaagctgctgtggaaaacagcatggcagttactaaaaaaaattaaacataaaattactatatgtcccagcaattccacttcaaggtatatactttaaaaaattgaaagtagggacgtgagcagatatttgtacacctgtgtcagtagaagcattatcacagtagccaaaaggtagaaacaacacaagtctactgatgaatgaacagataaacaaaatgtgaaatatacatacaatggaatattattcagccttaaaaagggaattctgacacatgctacaatgtggatgaaccttgaaaacatgctaagtgaaacaagccagaaataaaaggacacatattttatgatttttcttatagaggcatctagagtagtcagatccctgcagacagaaagtagaatggggattgctgggggagatagaagacaggaagggggagttagtgtttattgaggatagagtttcagtttggaaagatgaaaaagttctggaaatggatggtggtgatgtcacacaacagtgtgaatgtacttagtgccactgagttataacatttcaaagtggtatattttatgttatgtatattttacagtaattttaaaaagcaacaaaacatgatgaggggtattaagggagtactcaggtggggattagatctttactacatgacatctcagcacagatctgaaggaggcaaacgagttgaccctgtagctgtcagggaaaaagtgtgttccaaatgtcagagcagcaagtacagaggccctgagataggagtgtttgtgacatgttggaggaaggagaagaaggccaggggagagtgctaggagttcaggagggagagggagtcaaggtccagacctgtagggaccagattttgcaggtcaacagtggtttatctgaggacttgtaaactctcacggaattctcagtgtggttttcaacatcacaaaactacattgtcctttctgaagagactctggtaaggttggcaggatcacataccagatgggaactcgatagggggtaaaacccagatttctggactgtctggttaatgacaggacttacctggagttgtaattcacttcagtagaaaaggaaagtttgacaaataggtgaacgtacagttgacttggagagcaaatggtaagaacataatgataatcctggagtttcaacacaaacctatgtcttaccgccaccctgcgttgtatccagtgtcgttttaagagatatttacaaggaggactaatattctgctctccagcatccttgaggaattagaagcttcacatcagtgattctccttaataagtgaagtggacccctgcacatgtgcaaacttaaagcaaacctcaaattttgttacttattacataagatatacatattcatgtagcacacaccttggactcggctactcaggggacggaggcaggagaattacttgagcccgggggtttgaggctgtaatatactatgattgcatctgtgatagctactgtactccagcaagaccccatctctgttaaaaaaatttttttaaggagaaaaagatagcatattcattgtagtgcaacattaggaaataaagaggagcaatgaaacaaaacaaaacaattcaactattagagattagggtttcaggcttttcctctaagtatgcatatgtaaaatttacgtatatatttaaatttcataaaaagggactaacacagtatctctcatttggtaaattaccttttgtacatcttgaacatctttttaataaacagacatctgtgtctcatttttctaaatgtgcctacccctttgatggcctttcatttttattgagtctaggtttatacttccctgatatatatacatatataaatagatatttgtaaaaaatacataatataataattttacacatacacgtatttaacagtttgaattaggatccaaataaggtaaatacattacaaatggttgatgttcactaatctctgtatttcctctacagatcttttttccatgcattttttttgttgttatcgaagaaactgggtgatacacgtctccacagtttagactttgctgactgcatcagtgcaatgtggtttaacatgtttctgtatccccttggggtaccataatttggtagttagatgtagaggcttcatcaaagttaggttcttttcttttttaaattgagaaggggtctcactatgttgcctcggctggccttggactcctggtctcaagcaatcttcctgtgccagccttcccagtagctgggactccagtaagtctgctctgtaaactttgcttaggggggtgtgagatgttggatgtctactcttgttatatgagcaccccttgatgctcactacctgaatccattagttctctcgtcagtgagaaatgggctggtaaagttcctgagatttcgacacagcccttgttgtctttgctagcttttttgatttctgtataacaagatgttccaggctcatcttctctatttcttatcccagaccaagaatcggccttttctccaaggagcctttgctcttttaagagggaaattttgtttgttttgtttttttgagacagagtcttactctgctgcccaggctggagtgcagtggcatgatttcagctcactgcaacttctgcctcttgggctcaagctaccctctcacctaatcctcctgagtagctgggactatgggcattcaccaccacacctggctaatcttttttgtttttttgtagggacgggatctcgccatgttgtccaggatgctctcaaacacctaggctcaagcagtgttctcaccttgacctcccaaagtgttgggattacaggcgtgagacatcatgcctggccaaaatggtatttagagatctccacctagggccaagtaggtactcttgtcatcctcatcttacagacgagaagacaaattaaaatgaagaaaacttaaaacttgaatttcctaggtgaaagtatttccaaaatgcaattgacctatccttgcctttttgcaaagaattctgaatataatctaaactttttttaaaaattggttttgggtttagccttagtgtcctgaggctaagacatcattgttctccccagatgagcaggaatgttactcttgttctgtatccgtgtttttcaaactctgtggaaacccactaagaggttgttaaatcaatttagtgggccttgatgaactttttatttttagtttttgaaacagggtcttgctctgttgccaaggctggagtacagtgacatgatgttggctcactgcagcctcaacctcccaggcacaagcgatcctctcacctcggtctcctgagtagttgggaccaccagcgtgccccaccactcctggctaatttaaaaaaaaaattttttttgtagagattgggtctccctgtattgtccaggttggccttgaacttctaggctcaaacgatcctctcgccttggcctcccaaagtgctgggactggaggtgtgagtcaccgggcccagccaaactttttttttttttaatgacatgcactagaatagaaaacatggaagtgtatttcgtggatacttaaaaagaactgtgtatgttgcaacaaaattctttgtctcacatacacaatgaacattgggttgtaagttcaatagttttcttactctgagctgcagtcaaaagtttgagaaacactgtactacatctttgccactccaagtgtggtccccagaccagcgttactgacattaactgggaacttgctagcaattgcagactctcagaccctactccacattcaatgaatgagaacctacatttttgcaagatcctcaagtgattcacacacacgtgaaaatacgagaagatatgcattggaggatgcctgtccctgtgctttttcagtccttgtcatttagtggttcctttgctttttcatggctagctctcacctgttcaggctgaagctgacctttgtacttttcccctgcagccttattttcagtgaagtggaaaggtaggctaatcaccaacctgaggtgagagtaagtagttttcacatgattccctctccaacaaacatgggaactttgatgcttacatttgggggagcttttattcgctgttcacatgaaggcagaaagagaccagaaggcacatgtacccctacttagagttgtgaagtcactgctgttcacctgctgtcatgggacaatgaggaacttatgttttatcatactttctgacctgtcccatcagcagaacttctggatggcttgatataatgcggcttatcagaagaagatgaacataagaaaaatatcactagtctccaagtttcttgctgttcttttgcatttcagaaggagctttgtctgggaaatgattttcttttgcaagaacagcttaaaagcatcccaagcacatatttctgaacagaaaaagctgatacgacacccagacgacggacattcatttgtttgccttgtcgtgtgtgtgtatgttgtacctcatgtgtccctccccacccccgtctgtccacctcgccagatccttctattccttagggcccagcccaaacgcttcctcctccgggaagttttttatgatacttgaaaatctgtcatttgaaactccagggccctaaaacctattttccttttgggccttttgtgtttttttaactcataagaatacctggcacacaggaagtgcttacacaataagtaatttgtatatatgttttttctccctttgaaggctgcttggaaaaactaattttttgtacccctctctcctttttttttttttgagaaggaatctcgctctgtcaccaggctggagtgcagtggcctgatctcagctcactgcaacctccgcctgccaggttcaagcgattctcctgcctcagcctcctgagtagctgggtctacaggcatgtgccaccatgcctagctaatttttatatttttagtagagatgggatttcaccatgttggccaggattgtctcgatctcttgacctcatgacctgcccaccttggcctcccgaagtgctgggattacaggcgtgatccactgcgcctggcccctgtacccctctcctgattaaatatttcttgaactggcatctttctttgaaaagccttacagccaggcatcgtggctcacggctgtaatcctagcactttgggatgcacaaggtgggtggatcacctgaggtcaggagtttgagaccagcctggccaacatggtgaaaccccatctctactaaaattacaaaaaaaattagctgggcatgatggtgggcacctgtagtcccagctacttgggaggctgaggcaggagaattgcttgaattcaggaggtggaggttgcagtgagctgagatcgcaccactgcactccagcctggggggcagagtgagactccatctcaataaaaagaaaaaaagaaaagccctttattgcagagggtgacgtgaggaccatgtagagatattaagcatttccttttgatagttttgaggtgttgttcagtacaaatctctgcaggacatttgtcttgggaaactgttgagtattcataaaagggagtggaaaaatcaggtagtgaaaccaagctgctttcaggtcatattggtattgccctggtgagccacaggatggggactccgcagtaccgagtgttgactgcttcttgggtaaggggcaaaacatggaacatctgtgcatctgtttcctcttctgtagaataggtgtaaaaataaaaatacctgcttcgggtcattgctgccgagttgtctaaaaacaaatgtttgcagaaggcgttacagataaaaaaacaaagcaaaacctatctatgtcctagagcagtggtctcaatggggacagggagagtgatttgtgtcctccaggggacatttggtatcgtctggagatatttttggttgttctatctggcaggcaggggtggggtgctactggcattttgtgaacagatcctatggtgcacaggatagccccccactcccctgccccaccacacacacacgcaacggagacctctctgccctagaatgtcagtagtgaaccggttaagaaaccctgtccttgagtgaatttttctggcttggtgagacttttgtctctctctgaggatattgacctaacttcatttgctggttttttgaggtttgggctatgtgggcagaggggtgtctcttcaggctgggactgacttcaactttttaacaaaataagcaccctccccctctcgccccctcccaaaaccaaaaaacactggccttggtatctggagccctgtggtctatctttggccactcatcagctgtgtgacctccaagaaatcactaggcctcaggtttgttttttctacccgtaaattaaagagttttagctaaatgccctccactcaccaaatctgcagctctttgccttggaaatattgagcttttggttggcttctcttactttggccttgaagaatagaagccatgagaccaaatgtcagtgcgggcatctttttttgagaaataactttgtagatattgtacctggttggggaaaaggttatttagcagacatgtctgaaaaagcgagtaggtttatttttgtgtgtgtatgtgtgttgcggcggggggaatggagaatgagcaacgttgtattatactagagaatcactcctctgaacttcagatttacagctgctgtttctgggaggccatgaagggccttgcttaaagatgaaacttctgagttggtgacttcctttgggactgcctgaaaacgaaagcataatacaattttctatgctcccagagaagtgctttttgcaagagaataaattatctgatgatggggacatgctgcatttctgaggacgatctgattagcagctaatgggacaagaaggcaaggagggggagctgtgtgaaaacgtgtggggaggagggtggcattatgtccaagtcaaaaatgtgctgttcctcctcatttcacaataaagatgatatcgccaagcatctttgctcaaaggaagtccaaaattaaccctgagtgcccaggaacaggagcagagactgttgtaaagggagcctttttctccctcttgaaaaagtcaaccgtaaatgcgttaggttttctctacctcgtatttacagccatattaccatatatgtacctgggtgagggcatcgcagggagacttgtgctcactctgtagggagtttccttggcctcttgccaggagattgatcaaatgccagcagctcttcctttttctgggcatactcctttttttttttttcctgtgaaagacctcatggtttgccaggctcggcccatcgttaacctgccctgctgggtgctgcttgacctaaaaagtgaaacggtgcctttttgtcttcgtccttatcctccgttctgaggggccaactgccttatggcctcttggcttgccaggtgctttgagcaaaagccctgtgtgtaagcccctctctttgctgcctaactttaaaggaagcttttttccccttgtttttgagaaggagtctcatctgtcgcccaggctggagtgcagtggcatgatctcagcccactgcaacctccacctcataggttcatgcgattctcctgccttggcctcccaagtagctgggactacaagcacaagccaccacgcctggctaatttttgtattcttagtaaagacggggtttcgccatgttggccaggatggtctcaaactcctgacctcaagtgatccacccaccttggcctcccaaagtgttgggatgacaggcatgagtcactgtgcctggcctaaaggaagctttttgatttttattatttttaaagcaagcagcaagaaaaccagcaccaaaggacgttggcaagggccttttgttttttaggaggtggaggtagtgtggatatgccaagaaagaatggggaaggctgatggacttgttgttggctccattttttagcagaagaatgactgtccaaatgcaggtgctttggggctaggtggcaaagcttgacgactggaggatagacgcaaagggtgctgtgtgagtgagatgctggcattcactcctcacctggctgtgctttggtggttctggttttattaggaatagtggggaaaacattgttggagttggcattgacatgttgaggtcagtacatctcatgtgtcccttttgtatattcacttgtcatttggactttgctgtttggcagagctgatcctctgctgattataagcctaagaagtttagaaagagtagtttatgagaatagaaaatagaacagattagaaagtagaattataacagccaataggaatgcttcctccgtccccctttctctgtgctaagtaagcatattttctttttcacaattaattgtcaacataactatgagataagccctcattatccccattctgcagatgaggaaattgagggccagataagggaggtaacttgattgacttcccattacatttagaatagaaggccaactttttaccctggcttgtgaagtcctactggctctatcttctctaccctgtctttagcctgtactttcttcctttccccattaatgctgcagacattgggctggctttctgtttctggaatttgctaagctcttttctgctttatggcctttgtactagccgtttactctacctaaaatgctcttccgcctgatttttttttgcatgactgcctctatcttgactttcaggtcttcgcttaaacatctcatcttgttttttctgaccagccaaaattgcattgtcacttaatcatatcaccagttttaattttttgcatatactcatcactatctgatttgtcttgcttgttttatctgtttgtttcctgtctgtctgccctcactagaatataggtatcacgggagcagggaccttgtatgtcttgctttgatctgtatccccagtacctagtataggggtggcatatagtaggtatcaataaatatgttcgataagaaggaagatttaagtttcacatggaacagttcactttctagagccctggctgttcagttttatattttgcattttcatcctgttatataaagtttccaaacttatacagtgagagtcctaagcacacagtcattgccaggacaactcttaaagaaaagtttatggcagcagttttcaaacttctggctctcaggagctcttttcatgcctaaaaacaattcaggaccctaaagaactgttgatgtgagttacatctgtctgtatttacaatgttagaaattaacactgagaaaatgaacactgaaaaaatatttttaaaaaccaattacacattaacgtattgacatatttttaatgaacaataagaatattttcccaaacaaaaattttgagaagagtagcaattttttttttttttttttgcgaatcactttgaggtctggtttcacagaacatagccggattcacagatcatatatctgtttctgtcttcagtctgttgttacatcatgtgccttgcagcctctggaaaacttcactgtacatgtgtgagagactgagtgaaaatgaaaataatgccccaatgttattgtgaaatagttttgaccttgaagtttccctgacccttgggccaccagctcctagagtacgtaggtaatttgaaatgtggggttgtggcatggaacattagagagagggagaaattgaaggcttaagtgacagggtgcaattgaccatctctaagtctgggtattgtatcagatctttctgttcagaaaaaaatgcatggggatacttttcagttgtttttgtgaaacaaaattgcttcctaaagttcctcctgaaatgcaaagaaacgctgagaatgtggaagctagtggtacttgtcctacgttcatctttttcttatgagcaagattataccaagcagtccagaagttctgcagtgggatgggtcattaaaaaattataaagcataggttcctctctgtgtctgagaatagcagcttcaagtgtaacttcctttataactgttagtctccaacacttactttgttctttttgtagcttttggcctcagatgaagttgtgtcctacaatagaaattagattgatgcttattgctcttaggttctgtcataactggtgtttaaggaaccaggatagaagcttttaataatagatgagctatattctgtgctagccagcttcactgtttaaggaggttaaatgattacaaattcaggcttctggggagtgttttgcgtgtgtcttgggtcagtgatatataagattttcactgttaaggtaattgtgtggtaaaatacagaggagcttggtcatcaggaaattaatggtgcactgtggggacgaggcgaggggttgcaggcaggcaggggatccaaagtacctgactctcatgctcagaagggtttcatttaaggtcagactgtcagtgggactaccctgccacccgattactgaaagtcagactgttcagccccagtggccaggtggcttcatcttaattaaacgtaggaggcttgcctttgtgtcttggtaaaaactggcaggtctgtggttttggggtcccttaactagtataaagtcaatttctcatttcctcccaagcctgtccacccttgaagattaagtgatcccttaggtaacttattggttaatgaagtgttctactttagtctcagtttcaggagttgttaacttttaaattcggaattctgtgtaggcgaaaatcaaggtttttttttttttttttttttaaatgaatgtaatgcaattagttaagtgtgtgcaggagaactaatagatggaaaaatttcaataagtgagttttctgccacagtcaaatgagtgagttttctatcacactaaaagcttttagaaaaaaaaaaattccaaacctatcttgagctgctgcttaaaattaaatgaacatatttcttttttagtgaggttgtgctttggcctgttttaacaccagagtggaagaggttctaaatactgaattactatccctttgaagaggtttccaccacccccactgccagcaggggacctagattgatgttagaaggcgggggagttgagttgaggtctggccagctttggtattgtgagtttgggtactgaaaaacaacagtactttggagatgctgtccaagtatcagccacctcgtgggcttacagaggatttaaacatttctgggatctttgtttctccagatgtatttcctagagtattgaccaggtaagcaacattcatcaagtagaggaatcacaggacagaggtgagtgaagactttgaaggaacaaaaacgaatgttttcatttcagactcattcagacatacagaaagtgagcataaagggccaagtattgtgttgaccactttatgtggattatttggtttactcctcacaatgaccctgagaaatatgaaaggttgcccccttttttacagataagagagctgaggttcagagaagttatggaagttgcttaaggacacacagctggtaatttatgaggctggaattcagactcacatattctgagtctgtttccaagtgtacactcttgtcagtactccaagccattttggacatgtggaggggatggtcaatggggataaaagttagagtatctttccagggataaaagttagatattttgtttcttgcttccaaatttctcatagaaatctattgaaaagggccaagtaggtttctgttcttgatctaacactgtaaatttggctttaatttgttttggagagcagtcatctaaaaaacaaacgaggtgtggtggctcatgcctgtaattccagcactttgagaggctgaagcaggaggattacttgaggccagagttcaagaccaacctgggcaccatagtgagaccttgtctctacaaaaataagaatgaaaaaacttagccagacatggtggtacgcaccggtagttctagctactcaggaggctgaggtgggaggatcacttgagcctgggaggtcaaggctgcagtgagctatgattgcaccactaccttccagcctgggtgacagagtgagaccataactctaaaaaacaaaaccagtataaactcttctaggcagcagatacaatagcactaaagtgacattgaacccatatttgactgcttgctctatcccaggtactaccaggtactaggatgcaacaggaaagaagacaactgaggttcttgccctcatgagcttgcagtctagtggagaagacaaacaaacaagtgaataagcaatgttaggacagtggtagtggacccaggttgctgtatagaagagtatgttggaaacgtataacccagatctgggaggtcggagagggcttcccagaggtggagacatcaaactggggctgtgaaggtgagtgggagttagccacaagtggtggtgggagagggagggagatgtctcaggctgagagacagcatgtgcaaaggcccagggaacagagcatggtgggggccctggaaaaaaaatcattatggctggagtatggagagcagggctcaaggtaggcagggctagatcatgaagagctccaaagagatgttggaaggttttaagcagggaaatgatatggtctgatttatgtttctaaaatatcatgctggatgttgtatgccgaatagattgacgaggaaagacagattcagagaaacgagtaggaaggccttagggagtccagttgagaaatgatactggctgagactcaggttagcaggggcaagggagctagaagaatcaagagatatagtaaagcttaaagtcagcaaaaattgatgctggattagactttttcattcatttattcaacaggtatttactgaatacctactatgtgctaggcattggtgtttggaatacagttgtgtataaaacacatcacacacagatctctagaatacagcatgtgccttgtacggtgtcagacaggaattgcacaagtaaatgtgaacttgtaactgagatgaaggctgggaaggagagatccatggtgtagagtttataagagtggaatttaacttcatctgaggggatggggaagattttctggtggaaatggtagttgaattcagagctggagggtgacttggctataattagagcaaggggtggggtagggacgagagtgttgtgggcttgagaaaacagcacaggcaagggccctgtggcagggaacatgagagagggaggactggaggagccaccaggctttgctggtggtcactgagaaatggctatgaaggaggaacaggttgggcaggcaggtaaattctttttggtacattgagatgccgtgagccgctaggagcaaaactctagtagctgtgggacatgagagacagatttgggaatcctcttcacgtaacagtgactggagccagcagagtggacgagaagaccaggaaaggtatagagaaggcagagagcaatacagacgctgaagagcagctctggcttctcttccccaaggagatctttctgcatttatttttttctttatttgcacttttcttgggaatataatcaaatcttccctgccccccctttttttttacgcacagctcagggagcaatttcaatagagggcaaagggaagctcagccagagggtggtgtcaggctcaacaaagctgccacagcctccctctgcaagagtgtctcccagaggcagtgatctacctttctttgccttggccaaagccaccctggaagaatcctgttttaacaggtgcttgcacccatcagaatggtggtgggtggcggtctgatagtactattatatattggtggcatgcctacttcacgccagatgctttgctgagtgtttataaataccgtcttgctgaaccttatgtcagcttgctgaggtaggtgctcttattctccccattttacagctgggaaaagtgaggcttagggaagttctggaacttgcctgaagttcttcagtgagtaagtggcagagctggggtttgaacctgggcactttgactctggagcctcagctcctgcctgccatgggctgagaggtgcttttgaggtcattctgcgtcaggaattgcggggaggatggtgatgctttgtgaaaagaagcaaagccttaaggagaaataatctagatagcattcacatatgcagaggtcttagatgcttcagagggcagatgaatagcaaaagttctgggaggcggctatcctttgtggggctaagggaggggacaggagtaattgttttattttttcacaggcagggtcttgctctgttgcccaggctggaatgcagtggtatgatcacagctcactgcagcctggagctcccaggctcaagtgatcctcccaagtagctggggttacagatgtgtaccaccatgccctgataatgtgtttttatttttattttttgtagaaatggggtctggctggtctcaaactccttgcttcaagccatcctcccaccttggctgtttgagatgtgatgacaggcatgagccaccgtgcctggtttaggagtaattgtctgaacaaggctgtttgaacaaagaataggctctattgcccagtgagaccatccataggcagcgcgatggggagatttcattattgggcgggaggtggaattacatgctttacagggttccttccaacttttattccatgattctgtgttttttgaaaggttagaatgctctgtggctggcagttgagtgtaattcgctattgttcaccttttttcatcaggggaattaggaaggataaattatcttccctgaagtaaaatctgtcatcatgggtcatataggagttcatttgttatgatacacatctgattttttaaacaggggatcctttactgagtttaaattttgatgccctggaatctttcagaattccacttatctctcgtggaagaaaaataaaaataactagcatagattaattcaagtatgtcagccactgtaccaggtgcttttcaagcattatttcacccattgctcaccacagcctcttgaagttaaattatccccatttaacagaggaggaaatgaaagcagagaggttgtggtgggctcctaataacaagctagatgataataataataataagagcttaggggcagagagccagggtggagtgcgggagctgagcgcctaagcctgccctcgtgtatgtcaggcatggcttgtcagcagagccctcggtgtctgtaagtgtttgaagttccgcagctccgtggcaggttggcgccagctctgttttctctgaggtggtccttgtcatggtgtgagtgacataggagccctgagtgcagctgctagaagttcacaggcacaaatggtccacgatcagataaagaggcgggctctcccacccagctctgaacaacaggaagtcttccagaagattgctcctaggcccatcacttctggggcggactttccacctccacccctccacaccacagaggcctgttctgttgactttcccggcctttgtttttccttccaggacatcactgataattgcactaaaacctatcctcctccccccatctccttcctccacttcactaaggcgaggccggaggagatctccagaggtttctagccagaccagcaagctttctgcccagtcctttgtgaggggaattatcacatgagacccctggggaaggatctgtcctcccctactttttggttgtttttaattgggacccctggcagattgcccagaggatcattagctgtggtgggtggactggcctgtgatttcagggggagatgtaaaatgtagctaaaggttacttattcacttatctcggccacttaataagtatcttggttagaagatgcttaattttttttctgacttatggaagtattacagagccatggtagaaaaattagaaaacagaattgtgcataagaagaaactcagttctccataatcatccggagtataagaacatttaacattttaacctgtgttcccaggatcactgttgataaacacctccactgaagaatcagatagacctaggttgggtgcggtggcttttggctgtcatcccattactttgggaggctgaggcaggcagatcacttgaggccaggagttcaagacccgcctgtccaacatggcaaaaccccatctctacaaaaaatacaaacgtttagccaggcatggcggtgggtgcctgtaatcccagctactcaggaggctgaggcgggagaatcgcttgaacctgggaggtggaggttgcagtgagctgagattgtgccactgcactccagcttgggcaacagagcaagactctgtctaaaaaaaaaaaaaaagtctgatagacctgggttgtaataaccctggtcctcctgcttactaattttatgtgatgtggggatcttacctctctgtattacacctcagtgtcttcaacaacaaaatggcaataatggtagttcctacctcctgctgtggtcatgaggattcactaagagaacatttgtaaagcactcagcacaatggtgggcatgagaaatccttgataaatgccagctattattatcagaaaagaaaataatgcagaaccgtgctgtaggaatgcaatgtccagacatctattgcaatgatcagctgcaagcaacatggggtacatcatgctttgtcactcgaggacactgaattgtctgcttcttcccattaagggcctggaatctttcagtaaggtatccaggtggcggtgatggttcacaaaacagcaggcattttctggcctagtctccactagggctgaatgcttatctgaagggtgatcctgaaaggagagccttagtcacactggacaaggccctagtcctcttgcggagcacatacctgctcttctgcatttggaaattccctggtgtcctttcgggatgccagggtgtacagacataaatttggtctggttcaaaattcaaacaaattgtcttctaataattggtcttagaagtatgctgacttcctgaccctttaagataaagctttataatataagcgcagaagggaaatattaatcccccttgatgttttccatttgtgccgcctttctggatgctgtttaaaacattggtttgcctttaaatataaaatatgtagttacgaagaattaaacaatgactgacatgattctagagtggtacttggcaaaccgtccttctgtacattatttgtgtatcttccctcaaggtctagagatgctggctcttttgtttgagagtttattctgtgttctcagttgctgtctccctctataaataagttcatgtttaatgaaatgctctttatctctcctgcaatgtctgggttgttggaggggagggaaggggatgacaaatcagcttttccctgcagcttctcataagcagtgaactgaggttctttaacataagtttgctttcagtaactgacattcctgctaaggtggtaggttgcttcctgaggtgtcatgctgatcattgctgcataattcttcctgaaagaaaacttggcacccaggaagcaattgaaggagacacaataccgttccacactgttacaactcttgtaactgtgtggggtaaatggcttctggaaggggaagtcgagtaaattgatggggaaaggggtgtaaaggggtctgggtttggaggaggggttttgggaaaacctgggttgccctgggcatctccacagcagatgcctgaggaaacactgggctattagctgcagtccacaccagcacacagtcttcccacataactgagtttgttttttaattgtcaatttagctttttacaattggttcccactcctcaatatttatggccctgatgaaagctgtttctaggagtcacatcaatatttttgttgatatttatgtgtgtgtatgtgtgtttaatgatttctgagctatgtagagatttcctgagacttaagagctttttctaagactgcctctaactagctgcgtgttcctgggcagggaaccttattattcttacccaaatactgaaggatctgggccaggtactgtctaaagggttttcatcctctggaagtgtttcttggtgaaggatgagaaggcaagacatttaagtagcatttgggtgacgtgcgtacagttgtggaattctgaaaaggcctaaaaggctgctggaaatttgtggtatttattggcaggtttctttttattaatgtcattttgttgctttggtaccttagcccaggcactgtggccttgccagaagcaggtttttataccaggtgtttccttctgacttaacattccctgaagcaaattgaatatgttaatgtttcataagtcagactttccaggtaactccctagtcactgccacgttcttggctgagttccctgcaggctttctattcactgcagtttttattatcaagggtcctcaacttgtagaatctgattcaggcatggttttgttagaaacaaatgttactgtggttggaatatcctgaaattagataatatacggggaaaaagtgttgttgcatatgtccttacttggctcattgaatcgcctgcctgtcaaactgttatttaaatttgacttttaagtaaggcgctttggaaaattgagctaagccaactcttagtgacttttttccccttctgaacatttcttttcttctaacaatgctgcatattttactttgtctaggattttcaagaaagacatgtctgacaaaatgtctagcttcctacatattggagacatttgttctctgtacgcggagggatcgacaaatggatttattagcaccttggggtaagagcatgcaatttcttgtgtggcacggtttgtttaagacatcataacatcagcttaaaactgtgatttttctaacataagaacgtcaccgttttacttggctttctaagtgcggttgaaatcacaaacaccaaatctcatgttagccaagtttaacctcttatacaaaaacacaattttctgtatatttctgaaagagcaaaacctcattatttaggacactattctgagtttattaaaatttgcttttcctttctatataaaagggagagtgcctttattccactatggaatacagtttaaatggaataaagtgtaaagatgaatatttacagagcccaaagaagtgctttttagttttgtaaaggctcttcttttcagatagtgactcctttataatataagcaaagaccaaacctcctgggctgcctatctcttttctttgaagcagacatttcctattttacattgctgtatgcatttgaaaattataaattgcataaagttctataaatcagatttttgctcttttgtgcttttttcccaatctttatacaacttttaagggtataaatatatttcataatgtactcatttgattatcttctcccgtctcctcctacgcctattgtctagaagaggaaatgagaggtgaaatagtcccaaaggcagacagaggcagaatggagaatcaagatggttaactccaaaatagttacgaatggtctatattgtctttgtgtagaaaggagtagtgaggccccggggcggcattgttgaatttggcaagagctggactcaaataaattgggggaaggaagaccagcagcttctccaagaacctcatttttacagcagccagaccttcctttcaattatagctattatttaaagcatgcttgtttcctggtatttgtgcagaatgagtattcctaggctctcatgcaggttactccacactcagggagcaaattattatagatacagaattatagctcaattagacttgtgctcccactgtagagagattttgtttcaaatgtcatccagtgaaaaagaagtcatccatggctgcctgatcaccagatccagtgactttctacatttgacctctctccattatggacctacccttaacaatttatcttctgtggcttttggcaaagaggcctccttctgccctgcctctgactctccctcctttcttcatggttggctccttcctgttttcatcgtctatggttgactcttttaccctcttcttcttttcagtaatgacagcaacagtaataaatgaaaagcactaaatgagcccagtgggtatttgctgtgtgctaggcactatgctaaatactgtgcctacatcttccttaatcctcacacaactgtctatggtgaacattgtcatcattgctgtttgtggaggcaaaacttttgagcttcagagaggcaaagtcacttgcccaagatttcacagctcagaaaattccagactccaaggctagggctgccagcagttgctctctgcaggccagcttctctctttccagcttccttgtctgcccacagctctccctcctccttgactgtgcacagcccctatctggatgcctggttaaacctcaacccactctattcccatgtttcccctgggggtcttgatttcccagtcacccaggtgcctcctgagcccccgggatcttagtaccttctttctcttccagggcatctcttctttaaaatcatatgaagtgctttttaagtgttttcctcaaacattgtaaacaaattaatgatgagtccctcctgcccttttaaagtgaggagggcttctttttgaactttgggttgctaatactttcttgagatgaatactttattttctcagttgcttgcacatatttgaggatagcagtgtaaaaatggggttggaaagaaagtttgacaacccttcctgtttttaatatttatgggggacctgttgtggactacagtgagtgagtgccagtcgttatgggactcactgtgtagcactccagccccatcccatttatatagatggtggttacctccaaatggcttcatctactgattgaacttgagaactccaataggatcttggagggcaagtgtgtgtgtgtgcacactactcagtggcatgcttctgaattgcctttttagcttgttaaaaataaaggttcagcttggtgcggtagctaacgcctgtaatcccagctacttgggaggctgagatgggaggatcctttgagaccaggagctcaagaccagcttttaagaccagcctgggcaatatagcaagaaccctgtctctttataaaaacaagacgggcaggattcttgggcctcatcctacagcacagctttagtaagctgggttgacagagtcctggcgtcagtatatttggaaacaataagtctgatgaacatccccctcgttaagaatccctgagaccaactttcattttacagatgaaaaaactgagaccggtaggggtaaaatgccacagtcatgatcatgccgctagtaggtggcagagtgccatctacaattcatttgtcatctgagcttgactggggctcctcttaccacttcctccccatttgagaacttgatgatttatttatttttttttttcttgagatggagtctcactctgtcgccaggctggagtgcagtggcacgatcttggctcactgcaccctccacctcctgggttcaagcaattcatctgcctcagcctcccatgtagctgggactacaggcgcctgccaccacgcccagctaatttttgaatttctagtagtgacaggattttgccatgttggccagaatggtctcaatctcttgacctcgtgatccgcctgtctcggcctcccaaagtgctgggattacaggtgtgagccaccatgcctggccatggcttgatgatttattaacctagccctaccttggattctgagcccaccctgtcaagcattatgttagctctgggggcattactatacttacaggagcttaaggtggtggttttatatatgtatattctgctcttgatttttacatgagaactcaggccattggctacactgttcttcttgtttatacagtgaagtcttgtgtcatgaagctgaaggaggcaaactgctggtggggtaccatggacactttgattttacccaccaaatagatactgagctgccagccttgggcatcttctggccttcatggagctggtagcctggtgcccctttggagtctcagtcagtgaggttgggaggacagagaaggagaggcagagagtgtctggcgcaggagaagcttggtcggcggggctttgtggagaaggtggggctcttaccctgagtcctgaaagacaggcaggacttgaggaggcaaaagggaatcttggagaatagaacagtaagggtcaaggctgaatatttaatggtaccttgcatttgggatgagaggaggcagcacagatgaatggaggaaccctggaaaaccatggtgtgttagctgggaacaactgcaagttctgtggtcacttggaagattagccagttctatcagtaccagttttaggagcttggacaagttgtgtaacttctcagagtctcagttccctcatctgttcaaaaatatatttttaagtggttcttctaaaagaattgtgcaagttagacttagcagtcaggactttaaatactgagtctttatgtaatgtgagcttatttatttgtaattttttgtactttccccactagttgcttttgatgctccacagtcctttcatatcttcatgagtttgtgctcatggttctttccacctggaaacgctcccctctagcctccaacatctatttcgaatcttccagtagttccattagaacttcctctgtctgcagcttctcagatgacctcaggcacagttcgcttctggctgtatttttttttcttccttctcttacagcccttagattatattctccttatcagtttgttcttaaggctcctgcactagccttgagctcccaaagagcaagggcctggctcatattcacctggcacaaagtcagctcctcagctacccttagttgaatgcaacagccccttgctgtgtctcgcgacttcagccaccttgcatgctatactcagatctaccatggacatggttatgggaaaggagccacagaaaacagtagccttaatgtgtccttcacagaacagaaccctgggcttttggattaggtttagatccatgcataggaagcctctagtgtaaagagttcctggcaggagaatatggcaatctaaatgttgcgcaggaaaagccctgggatatctgatttttgcatagtgctaagagtttcattttcatacacttgacagagcatttatctgtcttctttacagcctggttgatgatcgttgtgttgtacagccagaaaccggggaccttaacaatccacctaagaaattcagaggtaaggtggtggctttcctggagtagtcaccttgactcacttgaaaattcttgaagtgtgttgttggtgtgtgtgtgtgtttataagcaaaataggcttatttattatgtatttttttcagagtatgatttgagttctaagctttacaacttgaaaaatgcatacataaatttagtatcaagattgggttggcttttactgggtccttaatttgtctattgaatatgtgttgacaagtgctaattcggtttaaagtcttacatttgtacaggtatttcttcaaacaaatagtatttatggatccagtcacagggaacattcattatttcagcagatctcactgtccgtttggggatgctgatattcttagataccttctttaagaggtatctaatgatacctcactgaatgtctcactggaatgaaacgttcttaattattgcacttgttttttgagttaaaagacataggcaggctgggcacagtggcgcatgcttgtaatctcagcactttgggaggccagggtgtggagattgctagagcctgggaattctagacgagtctgggaattctagaccagcctgggcaacatggtgaaacactgtctctactgaaaatacagaaattagctgggtgtggtagcatgcacctgtagtcccagctactcaggaggctgaggttgggaggatcacctgagcctgggagttccaggctactgtgaaccgagattgcaccactgtactccagcctgggcgacaaagtgagaccctgtctcaaaaacaaaaacaaaaacaaaaacaaaaacaagacataggcagggcagcttttctacccaaattagttttttctttaggcctcctgaatttggtatctttctccaaaggtagcttagtttattgtaggaggtctttgaaatacacttggtatcttagatgataaacatttgtttttcttttttgttgttgtggttagtggtcctcagctctaggcacatgttagaatcatctgaggaagtttttaaattaaatagatgcttggggctccattgtagagcttagggatcaactatagagccctaacatctatttattaattaaattatttatcaattaaggtaacctctggaattggggatgattctttacagccagggcagaaaaccactgggttaggtatttgactgatgacttcagtcccaaagggctcaaatcttgccatttgcagattatataactcaagttctaagttcttattgtttagtggtttagaaactgtttgacttttttggataaaagctaaataaattagaataaaatagaactcagacgttcagatggagaaaagccatttggaagacatttggtgttgagttgcatccagttggcgtgagacaatcaggagaatgttttcacctgaggatgggtggtggtaggggaggctgttaaagagagagaataacagttgttgatacaagttgtaagaggaacccaaggcggctactgcctccaccgcctttttcttctcaatccttctttcatgtttccttccaagacaagacaaaatcttgagtgctgcaaaaatgaaatgtttcgtccaacgatcataattcagtcactcatagaattacttccccactgtgaatattaaaagggacaagatcaattgactgtgccaggccctgtgctaagcactctgcctgcattagctcagggagccatccctcctccctaggaagagattgataccctcggaacttaagaaccttgtctgaggtcacatggctggtgacggatggagtgggagccatggttctcaactttggctgcacagggagatcacctggagaactctcagaaacactgatagctgaatccagctcagggattttgagttaactgggcattgggatttttgaaagcttctcaggtgtttctcttgtgctgccaaggttaagaaccatggctaatgaaatctaggctaataaaacttgaactttgttattcagggaagagctgatctaggtttcgcttttgcagctgggaccaaggggagggatatgcgtccggaaggcattgcttgggtccagcgtgagctcttatcttgttctatatacgggccttgggagctgggagatgaacctgggagagattctaatgtactgtacgaagttaactagtggctatttgttttttacaaatacatgcacataatttaaaattttgttttttaaatcgacatatatttatggtgtacaacatgatgttttagaatatgcatatatagtggaatggctaaattgagttaattcatatatacattacctcacatgcttattattttttttttggtgagaacatttaaaaactactcttagtgagtttcaaatatacggtatattgttatttgctgtagtcactgtgttgtacagtagatctctggaacttattcctcctaactgaaatctgtatccctcggccaacatctcaatcctccaccccagcccctggtgaccactgttccactctctgtttctaggagttcaatctttttagattccacatataagcaagatcatgtggtattcgtctttctgtgcctggcttatttcacttagcataatgtcctccgggttcattcatgttgtcacaaatgaaccagggactgtttgaatacagggttagaatgttaaaaataaataggactatagcaggggaagtcggaggagacatgtttttctggcacgactgtaaaggtgcctggtgcttggatgtatgtatggtggctgatttgaagtgactgttttgagataacggtaatagtctgacagaagctatttggaaggaagcaaactccttttacagcctggcctggttctacaggtggtcacgtgacagtgacttgatttgttgagtgcttttctccctaaattaaaaataaaggtttctgggttgtgagatgcttcgtccttgtgggaaaatctggttcaaaacaagctctgctgcaggctttgggaatgtaggtcaggacttccttaattccatgtgctaaaccagaggtcccctgcacccaggtgaggggcctaggcagctctgcctttgcaggctgcctcagtgctggaaagatctgcttctccaccgtggaacttgggcagtgagttttaaaaaattttccaaagcattccttcaactgcggtgcagcatactttgacggtttttttttttttttttttttttttttttaaatgaagagaaagatctctcttttggaagcaattgctgcgtttccaaatataagtgtattttggagctgaagtcattttgatgtttagaaattgtgcatagggcagttgggcaatttggaggcatttctagtccatttcctcatggactcgttgcaccctagagtttaacaaacacatatggaaaagtgagatgctggcaagcagccgaatgggatgatggagtctttatctgagcaatcagcagagctgcatgtagtcatttgggtttgctcttgcttccattgtttccttgccaagttatttcctatattgagaaccatcataacctgttcttaagtaaatggaaatccaaggcctgtttatgcaatattccccatggcttctgactttgcatctttaattttgtgagctcctgagatctgcagccctaatggttaataaaagaggctcttggatcaggcttcctggttcatatccaagttccatgaattctttgctgtgtgaccctgaacagattacttcacctttgccaaccttggttttctcacctgtaaaatgggagaggataataggctctatctcataaggtcattgagaagattaattgtgtgttaagaatttagtactgggggagtctgacccttagttaagagtttaagccttattcttttctttgtattcccagtacttagtacagagcctggtacttgtaaatctcatgtttaattttatgagaataattatatattgttattttttttttgtcttcaaattgtttgtgggtggggacgtgcacatgaacccctgggcttggatttgagccccagtgctcgtgtatgcaagctgagtaaccttgatagattccataatatttctcagcttctttcctcacttgtgagttagggtcaaacaattccatccttatcaagataatatgcataaaaagcctaatagagtgcttagtacacagtagttgttcagtgagtggttgctgttaattttcacagtagatatagaagagttcaacatcgaacagaagatatagaagagttcaacatcgaacacacttgcttttttttctctgatggttgaaagtacatttccaaagtgaattgctttttttgtgtgtgtgtgtgatttccttgaatgtatctcttgcctctaacttcctctgtaggaagaaaaggttggctgcacatctgtttcacataagccacatctttttcatctgaatgaattttggacaatatcattgtcctcgtaagggatgaggagagctgagacttagaataatacagcaactttagttcttttattaatatggtaccattttaaagccccaacatccatggaaggtaaggcagaacctcctcttctccctgatttgtgttgtctttgcccataatcttgaaagaatagagaaggcaaacatcagattgaaacagggaatagaaactttgtggttagtgaattcctttatctgtattatcttttcctcttcccacttttaccagtccctcccccagctcccccggtgctaaatataaagatatctacaaagaaaaggtggaaactaacaaccagtcttcattttgctcccagaatctctgctctttttaaatataaatcacctccagggttgttggagtagaaacaagggaactgggcttttgggcaattagataggctttagtgttgatcatgccattattgcataagattcgggcaacagtcaggctcttgctttcaaaacctaatcttctctgttcacatcaagaggccagtcatggctccaaattcttgatgttggacagatgttaccatatcaataatatcaaaatgtgcagcttttaactttgcagggagccccttagtttcagaataaaagctgttcgaagggaaacttacagttcaaaatgaggagaagttggggcaggaaaaaatgaggtgaaaggaatcattattctatcactaagtggttcatatgaattggggaggggatcagacagactgaatatgtggatgttccagataagtatcttacatttctctttcccagtgaagttggtttcaagcatcatagtctaatctaagcaaatgtattgtgaaaaatgagtgttgacctccagcgctgaggccctactgtgtaccagctgctggccttggtgatggcaggacaagatgagttacactccttcttgctttcaggagtcttagagtttcatggagaaacagacccacattataagttacaatagccaatgttaatacagcatttattttgtgcaaagcacttcctttgaattatctcttttaatctgaggaacccacctatgaggtgtaggtcttgatgttcccattatgcagttgaggaaatggaagctctaagaagttgggtaacttgcccatagtcagttaaatgtcacttcttagaatgattatcattcatttcacaaacacttattgggtagttcccatgtgccagccatttgtactccatgaggaaagagacattctcaaagaagtctacatcaatatgtagtgaaaatctttaagaaacttctttagagtaatttgttgtcttcactgcaactatttatatataagtagaagcaaagcaggtgaaatttcttcctacctagtataaaacctggcctactggggaaaagtaaatgaggatgcttttcatgtcctaatctttcgctgtgcagcaccctgagaccagagcgcacctatttggtacctgatgccatttgagatgacaagttatgagctggtccagtgccatgtgacttatgagtgtcgtagccagagccctcttccaaaggctgggcccagtgcttttcttcctttgtagttttatggagacaaggtctcactctgttgcccaggctggattgcaattgtgtggtcatggctcactgcagcctcgaccttctgggttcaaaccatcctccttcctaagcctcccgagtagctgggactacggacataccccatcatgcctggcttctttttaaatttttgtagagatgggggtcttgtatggtgctcaggctggtcttgaactcatggccccaagccatccaccaccttggcctctcaaattgctgggattactggtgtgagccactgcaccctgccacacttaatgcacttttagccattgccccaaccagctgtgggatgcgcagtatgttacttacagtaggatgagtcctgtttgtagtgcaaacgagggtctggcctggggcagtataacccagtttctgggcatttccagagtaaaatgttggtggaagacccctggttcctcaacatatgcccggctagaaataatgacagtctgagtattgtgcagtcaccatgatactggcatggagaagagtatgttgcttggctataatgagccgctcttggacctaaagcatggccatgaacttgaggatcacacttgtggcctttttatttttattggtgccttctttccccagtcccagagtgctggcaccatgttagccccttttagtagcatgctggtggatttagtaggattattttattgagagagagaagggttttacatctcatgcaagctctttgtaattgactttgaaacctcccagcagcttaggaagggtcctcaaataagaatggcatttttcatgcttgagtgataagaaacacttgagtgtcaatagcctacttctctgatcttggtcttgcctgcaatttaggttaaatataggggaaagagcaacctctggatgccagagctagcatccagcccagaatctgccatgaactgctccaataccttggagaagtgatttcgtctctcttagcctcagtttccccatctgttaaattgggtttttccaagatttcatccagcttgaaactttgctattagtggcggaaacaggcaggttaacgttagaagccttgtgctgtccagaaataggttcttatttctttgggattacaggtctctttgtcaagatagatgagtgctggtaatagccaggccttaaccttacccttaggccagatggggacacaggcagggtcttgggtcacaaaggtcatctagggtggctataacaaactcaccggcttagctttctttcaaacgaccctcctttgccgcacattgttttaaatgttgctaagcaacagtattttttgatttttttcttttggcaaggcatcgaaggaatgaatccgtatcttacttagttttaaataccctcatgcaaaggggagggcctaacttaaattttgtttgttcttttgattctaatccatgacaggcctttcatagtaggggtataggacttactttctgcctgtcttgttaaataaggcagaaaaatcagtctatttaaggtgcttgtcaagtatatgccttgaggcatattgaaggtttcaagagtgtgtgcagctgccttgtaggagagtctcctccaacttgttctgtattcacaaaatcaattcaaatttaataaaaagattaatagttttttgtaatcttcatttcagatttactagtttatctcaatcttggaccaacagactccatttaaagggaacaaaactgtaatttaagtcaattccctgggcaacatagaatgttcacagtgtgttacacaatcgctggggatggtgcctgctgcctgattatgctggagtcccacacactgcagcgtatccctcactggattgctgcctacttgcttcaagctatgagatgcatgtctgaaggctctgggtaccctgaaaatgagcataagggaatttgtgtttactttgatgccctggatccattcttttttgcatacctgagtcaccctggaaagtagacctcagacccctcttttatagtcatttacccttatgatttagttgctaatggagaaccattttcactatgtgcataaaatgcttctagtgcaataaataagtttaccttgtcctccaattgaatcactgtattgcttttgtgacttcctccattgagggtgaaattgatttggaaatctcagcaagcgtaatggggtcatattgtcatattgtcatattgttatatggttctcctgaaagcagtatactgtggttgattacggactttttcttttggcaaagggttttataatcccgtcttgagcattgatgaagatgtgtggtgaatcacttgagcttatgataactcttttcctttcttgtttgacatgtgagaaaattagagggatttagaaagtctcctggggtcaaagagcaatcctgtgccaaaactagggttggggcacaaccccagtttctactcacactgtcttttaggcttctgtgtttgagccatgaattaaaaattttttttggttccatcaccctgtgtaattaatgataacctactttttataaatgcaaataatagtgaataccttgtgtagtgctaagagacattagtgaatataatctatttaattaatatactttacatacactcatttatttaatcctcataacaaccccataagtaagaccggtacctttctacagatgaggaaactgacatgtaagatgtttagtgtctggtccaagatcacgtagctagaagtggcagagctgggatttgaacccagtcaatctaacaccataaatcctcctcttaacagctactctaaactgcctttagaagtggactggccttgaaatattctttgacaaaaattacccgatttcttaacttcctcctctgcaaccccaaagtatgtcattgtgagctgcattgacacagaagaaaaagtctacagacaagaggggcatgctaaccgcctacttaacaatcttgagtatagtatttatcactatctgataaatacacagctactgttttctcctcgccagattttggagcactcaaagggaccaaatcttgccctgcactcctggcccagcacctggcataatgttggtccttctttaaatactggttgaaaaggaattggtgttcttttctgatatgattttgactgctcccagttctagcagtgtttttgctgacattttaaattgaatggccgctgatctttttacactgatgacttaacgctgccctgtaatcttgctccaaactacctgagcctgttactcttgaaaagctttcctgtaggctgggcatggtggctcatgcctgcaatcccagaactttgagaggccaaggcgggaggatggcttgagcctaggagtttgagacctgcctgggcaacaaagtgagatcctgtctctacaaaaaatgaaattagccaagcatggtggtggtcacatgtagtccctgctacacaggaggctgaggcaggagggttgcttgagcccagtaggttgaggccgcagtgagccatgtttgcaccactgcactccagcctgggcaacagagcaagactcaacaacaacaacaacaacaacccctaaaactgtcttgtagttgactcgtcttctccctggaaagtggatcttattggtctcattctctgagagtgtcttctccttgactcctaatgtttgatcttttttctctctttcatgcctatagttttgagattccttggctgcattcagtacatgagcatgaaaaacaaataattgttaagtaccttcctcctttgtgcttggctttctgatagggtcatgcatgcttttgttcttgaccgttggagcacactgtgacatgggtactgttatgtccccattttacagttgggcaccctgaacccacagagggttagcaatcaaggtgtatctgggatttgaacctatgtctggaggaccacacagtgtctgccacttaagtgaattcacagagttgggctgctcagaaaacacttgaggcttctgatgtcctaggttccacatttcaaaggcatgttgcttcgtgggaataaagctaacgcaggggtaacttggaggctaggtctccattcgatattgaatgatgacgttttagattagctccggcaacaacatttctccccaaagttgctgcacagactcctcacctgtttctgtaattccacctttgcctcctttgtgtctgagtgtggacacctcctccaatccaccgtttactgcggctaggggaatcagcacaggtctgaagatgtcattcagctgcttggaacctcatagtggttccccagttgtgctcaggataaaagacacactctcagggttcccagcagtctgcatgagtcaccactgcttacctctcagccttatctgcagtaactcctccaggttctctgctccatccagatggattgacttccttctggcagtcagaatacttgctctgtactctgggactttgcatgtcctgtttcttctgcctgaaatgatctccctatctctgttgttccttcctggaccccccagtctttctaatgcccactcaaccttcaaatctcaggcatctcctctggggcacctttactgaacctttgtgtgcaggcaagcagctgctccttttgcacagactctgaagccagaccctgtgggtttggctctcagccctgcttttgactggtcatgtcatctcagatgtattacttaacctggcaatgcctccactttctcatctggaaaatggggaaattattatatatacctcacagggttttcatgaggattaaatgagttaatctgtgtaaagcacttacgggactacctggtccatattaaatgccataacactgctaatttttggttttgacttttaacttgatggttttgacttagcccttcccccctattgcattaactgtgaggacagaaaccatgcctgtctccctaaggctttgcacaggttctggactatattaggaactaaaatgtttgtggaatgaatgaagagagacctctaaggcattgcttctgagatctgactgcgtataggaaccacctggaatcttgttaaagtgtagattctaattaggtagtctgaaatgagacctgagattctacatttcttttttatttattttatttttattttttgagatagggtcttgctctgtagctcaggctggagagcagtgatgcactcaaggcccaccgcagccttgacttcccaggcttaagtgatcttcccccctcagcctcctaatcctgagtagctgggattacaggcgtgtgtcaccacacccagctaatttttgtattttttgtagagacggggtttcgccacgttgcccaggctggtcttaaactcctgggctcaactgatcctcccactttgtcctccaaaagtatcgggattacaggcatgagccacggcaccctgccgagattctacatttctaacaagttgtcatgctcctgcaaggctctcgggagccactgactgttatcttcccttattttatggctgtcctatagaagacagatgttctgagcccagagcaatagagaatgagggctagtggatcaaagtgcccagaggtagaatatgaggcttaaaagaacttaattctgactattagtgctgagcagttactcaaagaagaggcctgcttcaaattactgagtttcccccgattcaaagagggctgaccatctgtcggggattttgcagagggaatttctgctctgggacagaggttagatggatgattccatttgactgtgtgtgttttcccaccgaaggacccagctgttctttctgtttttgcttcctgtggaagccctatggttgggagcgttgggtcaataaacagctggggagagcacagatgcactgtagacaagaaactctctggaaactgaatgggttcaatccaattggtaagagaacattagtggaaagatggcattattgaatgtttgaaaaaatgaacaaatagaaaaaaacaatagctttctaagtcaaggcttgccgaatccggtcataatgagtgggtaagatgtcctggggagacactacagcgtggtggttaggagcacaggctctggagtcagtcatgggttcaagtccctgccctgctcttactagttatatgaccacaggcaagtcatttaacctgtctatgccttagtttccccacctggctgccatggtgaataacactgtggagctgataggcttgtgtgaggatgatttggtgcatgtgtaacacagtaaatacctgcaatacagcctcagcactcagtgaagagtggctattgtgactgaatttgcaattagcagctttcgggacatctcttaggaagctcaaacatggcctttgccatcttgtaaaacatcgatatgtccgttttaaaaactcagccagtggagtatacaaaggaatccatagccaggcagactttagccttcctgaattttttagattttattgagtgggcctggtaaccagctatgacagagcttggggctattagaaaagaagccatcagggcttttctctcctcgcacgagccttgatcagagcctcagttactgacgggtcgtttgctcgagatggtaatcctgccttctgtatagaattacaagcctagccagagaggaagttgtgtttatcttaccccaaacagcaggcattccagtgactcttgacagacaggaggaagttattgccaatctgctctttcccaaaagctgcccttccctgcccccaacgtgctccttgcatgtttagagaggtttctgccagccagcctgccaagtggcattctctcccgggctttgaggacagttgcatttgcagaaggaatgtccagaggctacttctttttctcttttaatagatttaggggatacaagtgcagttttgttacttggatgtattgtgtagtggtgaactttggtcttttagtgtacccatggccccggtagtgaacattgtacccaatgggtaatttttcaacccgtaccacccccacaccttttggaacctccagtgtttattattcccctctattatgtccatgtgtacccattgtttagctcccccggtggcggctacttctatattattggccaaggtggaggcatctctccccaaggtgagtggtcagcctggctcttacaggaggcaaaaattgtgcttattctcattggcactgatttggtagagataagtggagaggggctataggtgtgaagaaaagaatacatcttttcaaagaacccacgtgttttcctttccaaaacaatagctggaggtcagtgtagaaaaactccaacttgagcagttgcaataattgagaaaataagttgggcaattattcctctaactgagatttaaaagttcctttcttcgtctggtatttttccgggtacatttgagttccaatttgggtgcttctgaaatgtctggatgttttgtgctgctaaaattatatgtgtctaaaaatgttatcagtgatgacacttatatataagctcgcttggacttatgctagcaaatttctgtgactaaggtcctctcctccccctataaccattcccagaatcgtggcatttgaggtaaaggtaggaaatagaataacccaacttaggtttagcaatcaagtgaaggactatcacttgagaactttgcttcggtcttgtcgacaaagaatacggggttttgttaccatagtttcagtgaaaaatttgaccttagctacaataacatacagttagaaagaaccagctaatcggttttctaaaattagtgttctctagtacataaaccagtaggaacagagtatttaattaaatattatacaaggatataaaagcccaggggaatgcagtcccttgatctgggcggggggagggaggaaacccacagtgctcctttactggtctcttgcaagctacaagaactttacttcttttaaaaatgttagtattggttttattttcagatctgtcaggaatgaatttatacagcttgctgagagagcaaaataaaacattcagcattatttccagttgtcccctacagggtacaaactaacaaggcaagatgtgaaaatgatgttgggctaggattctgataaggacacttgttggtgatctgctagatgactttatgtgaaggaaaattattttcttttttttttttttaatttttttttttttttttttgagacggagtcttgctctgttgcccaggctggagtgcagtggcgcaatctcggctcactccaagctccgcctcctgggttcacaccattctcctgcctcagcctcccgagtagctgggactacaggtgcctgccaccacgcccggctaatttttttttgtatatttagtagagacggggtttcactgtgttagccaggatggtctcaatctcctgaccttgtgatccacccgcctcggcctcccaaagtgctgggattagaggtgtgagtcacctcgcccagccaggaaagttattttctctccaaaatctgggcattttaaagcaactaatttctagactcttgttcctttgaatgcctaatgtgtgattaagtggggccaacatctcctagttctgagtacagctatatctgcctcccccaactccacaggccataagcaataatctgtatgaagattatgtaaaatttgacatctcttttcatctacttatcaagagccccagcagtagctcatgtttctgatagtggctggaaatgtcatcaatattgtgtgaacttagaaagctgtggtaccatttctggaatgaagtggcttccagattttgtaatttcaggacaaagaggtttctggtccttcattgacactcttctctgattttattatcacctgccctggaggctgcagaggtgcaactggagttcagtcgtttgccaggtttatcactgattggaaacattgctctgggttttcttgaacttctattgttgtatctctttgtcaattacatattgatacattttcttaatttcagttttatgatttcagctttttaattggactttaagataactatctaatagaattggaagggtgaggtatatttaagggaatacaaatgtttttgtttgacgtttttaccattttgcatgtttctgtagtggcatctcaactattgcaatggaaaatatgtccttggcaagactcttagaaacacagcctcaaaggtcattggattgtgcaagcttcttgactatttacaaggtcacctacctgaatgaatagaaatgctccctgcccttaaggaatttgcaattttatgaagagagatgagtgagaactactttgtggattattcttggagaatgttgaatcccagacgagcttttagtcccctgatgttcattgtttttatctatgccatcagatcactgtgcccaaataatttgaattcatgttaataatagcttacgaaaaatgcagtaagagagcttgctggaaaagtgacagcatgcattttaaattacttctagttgacctggctttcattacccaaatatccacaggcccttccatgaatatggataattgagttgatatttagcaaataccattgaagaggttagatgtgtcaggttggttgttggaatggtgaactagactcttgattttggatgatagcttaaactaacctaaacaaaagggggattttttggggtcaaacaatcccagacgaacagctgaattgcatgaaggacaggagtgcagcaggggctcaggaaaacacagattcaggcatttgagtactgtcagcagcctacgtccatatcttgtgtcttctttctgtgcatctttcaccttggtttcttgtcctgtcctcttcgggttttgatatcaaggttataccacactgaaaatgagttgtggagtgtttcctttttttattctctaggggagtttgtgtaatattggaattatctgttccttgacagtttggtagaacacgtgagtaaagtcatcccagccatctgttttctttatgtcaaaattaactactgattcacattccttatgtctttaaagggctatttcttcctgggtaaatattgtaagctctgttcttctagaaatttacccatgtcatctaagttttcaaatctatagtctccttgtattattttgttcctagattgactggttttgtccttgtggtaggctgaagaatggcccctgaatgtcttcatcctagtatatgttacctgtgaatatgttacctcatatggtatagggatttcacagatgtgattaattaaggctcttgagatggggagagtatcctggatttccaggtgtgcctgatcacaagggtccttgtaggctagaagcaggaggattcgagttaataggagatgggaggatagaaacaataggttggagtgatgtagccatgagccaaggaatgcaggaagctgcaaaagtcaagaaaattgattctctcttgaagtctccagaggaatgcagccctgccgataccttgattttagacttcttacctccatgactttgagagagtagatttgtgttgctttaagccactacgtttttgattatttgttatagcattggtaagaatacagtagtaattgtcctaatattgtttatttgtgcgttcttttttttcttgaataagcactgacccatgttttttctgtcttattactctttaaagaaacaaattttggctttattaattctttctacgataggttggttttgaagttcattaatgtttgcctttgtttttattttcttcattctctttctttagatttattttgttcttcctttattcttttaaattagataatcaatttacaaatctgacttctcaaattgtaatgttaagcatcttaatctataaattcccttaaaatattgccttaaacttaaacaaatttacaagaaaaaaaccaaacaaccctattaaaaagcaagcaaaggacatgaacagacacttctcaaaagaagacatttatgtggccaagaaacatatgaaaaaagctcgacatcactgatcattagagaaatgcaaatcaaaaccacagtgagataccatctcacgccagtcagaatggtaattattaaaaagtcaggaacaacagatgctggtgaggttgtagagaaataggaatgtttttacactgttggtgggaatgtaaattagttcaatcatcatggaagacagtgtggcgattcctcaaagacctagaatcagaaataccattcgacccagcaatcccattcctgggtttaaacccaagggaatataaatcattctgttctaaagatacatgcacatgtatgttcattgcagcactattcacaatagcaaaggcgtggaatcaacccagatgcccatcagtgatagactggataaagaaaatttggtatatatacaccatggaatactatgcagctataaaaaggaacaagatcatgtcctttgcagggacatggatggagcaaactaattcaagaacagaaaaccaaacattgcatgttctcacttataagtgggagctgaacaatgagaatgcgtggacacagagaggggagcaacacacactggggccttttaggggatgggtgaggggaggaagagcatcagaataaacagctaatgcatgcggggcttaatacctaggtgataggttgataggagtagcaaaccaccatgacacatatttacctatgtaacaaacacatgcacatcctgcacatgtattccagaacttaagattttaaaaaatttatatgtatgcatatgaaataattataaacattgacttcaaaaaattgccttagtttcttcctacacattttgacatgcagtatttttcttattgagttctaattattttcttatgtctgttattttttatacctacgagttatttagaagtatttttatagttctgattttaagggatgtttctagttctcttttttgaaaaaatgttttacaacttagttgtgtgttggtcagataatatctttgttttatcagtcctttacaacttgagaggcttgctttgtggcctagcaagttatcaaattttatgcatgttctactgtgcttgaaagaatatatatatatttccaatcttaggtgcaatgtgctatatatgagtttgttggtttttttatctccttgatctatccagtgttgagagacatttgttaaaattttctattaatattttgggcttatggaattgttcctgattatggtggtggttgcatgaatttgtgtatatgttaaaactcatagaactgtatacggtgctatggcttgaatgtcccctcccaaaactgaggttggaacttggtcttcaatgtggcagtgttgagaagtggggcctttaagaggtgattcattcatggactaatggatttaatgggttaatggattaatgagttatcatggaaagagaactgatggctttataagaagaggaagagggacccaagttagtacattagcatgctcagccccatcgccatgggataccctgtgctgccgagggactctttagagagtccttaccagcaagagggctgtcaccagatgtggcctctgacttggatcttcttaccttctataacttaagaaataaatttcttttccttacaaattacccagtttcaggtattctgttataagcaatggaaagcagactaagatgcaaaaaaaaaaaaaaaaggaaaattacttacagtgaattttactataagtaaattagttaaaagggttaaaaaaattctcactgtgacagtaggtgtgcaattttgccttgtagtttttaagttttttaaaaaggttttttcttttgccttaccctcagttttttctttatgtataatgaggttatattagtaaatgcttagatttatacaattattataactttctggtgaactaaatatttatcattatgtaggaaacatttttctttctaatggtgttttacgtcttatagtctgttttgtctgatattaatatacctacaccagaattgttttagttagtatttgtttaaatatacattttatttacttttaaattctctgtcattatattttagagctgtctctcataaactgtacataactagagaactactctctctgaccatctttgtctattatctattaattggaatgtttagtccatttacatttgttgtaatgtatttatatttatgattttaatttgtggggttttttaaatctttttttcccccttctttaagtttcatcgaaggcttttgtgtgtgtgtgtatgtgtgtgtgcacgtgtgtgtgtttgagacagggtctcactctgtcacacaggctggagtacagtggcttgatctcggcttgctgtaatctctgcctcctgggttcaagtggttctccccctgagtagctgggattacaggcatgccaccatgcctggctaatttttgtatttttagtagagacagggtttcaacatattgcccagtctggtcttgaactcctgggctcaaactatccacctgcctcaggctcccaaagtactgggattacagatgtgagacaccacgcctagctgtgcttcattgaaggtttttttcattgttgttctccattctgttatttccccctctactgatttggaggatatactttatatgtgtttttttttaatagaagttacctcagatattttaacgtgcatatttaattaaccctaaagtttataactatcattattctctcctacaatactaggacattatagaatatttaaactcctgtcatcctctctcagtctatgctcctgttcatgatgttagtgctttgttttatattaaaacttgcatattagatatgattttgttttatattgtcattaaaaaaattaacttacgtattagtatttactatacctatcttggataattttttttctgcctcaagcacattcttagaatttggagaatctgttagtggtaaattctattttgtttgaaaatattcacttttaattctctgaaaattttacttttatttttagatgacagttttgcttggtttagaattgtagattgatgggtactttctgtcagcatcattatttttttgcctttcattgttgttaaaagcaaccttgctcagtatttttttttcccctctggttactttagaggaatctctgtctttgattttctgtaattttactagtatgaatataggtgtcagtttctttttatttatcctgcatgatatttgttaagttcctagatttgaggttgttttttgttagcaattatggagaattccgagctgttatctattcaaataccacttttttttttttgagatggagtctcactctgttgccaggctggagtgcagtggcgtgatctcggctcactgcaacctccgcctcccaggttcaagccgttctcctgcctcagcctcccgagtagctgggactaccagcacgtgccaccatgcccagctaatttttgtatttttagtagaaatgggatttcaccatgttggccaggatagtctcaatctcttgacctgatgatacacccaccttggcctcccaaagcgcaaggattataggcatgagccactgcgcccagccgctttaggctattttttaatctcgccatctttttcatctttgctccataggctggactctaggtaatttcttctcatctttgtttactatttctgttctattataatctgctctgtattcattgagagtttaatttgaattatatttttccatttctaaatgttctatttgggacttctgaaacgtttggtcattctcattcctccatattttcaagcttctactttacttcctgttaccaaaaaagcacactttaaatatattctatctctaaaaattacagtaggtgctatctctacagatcttattctattttctacattggctgtttctgaaaatggtatcttatttccctgtgtgttttgtgattttgactatcagcttgtgtttttttggcatttcatctgtgggaattgtttgaggcctgggttaaagttatgtttctccccagaaaattgtttccttttgccagttgccagagatgctgccaactcaagactatttaaatcaaattctttgcctgaaaattttaaaattttgttttaggtattttttgcttaaattttgggaatttcctatatatgttaattagggtgacaaacgagtatgagggtaacttatttatcttgactttggctctaggtataagagagaaaactctcctcgtagttcacaaacaagttaccttgccttcctatttttagggttggttggtttgttgttcaccattgcattgaagctgtagcttcttgtgtgtggcggtggggggtgggtctgagctttatgcaatggtctcttagaaaacttttgatcttgagtaggtgcagagctttatcccctctacctggcactagtatcataatggaaggttattaggttctccagatattctcagagttctcgctttagaaaggacataccttccaggggtcttgtttccacttcattgcgggcttctctggattcccttctatataactgcttcagaacatttcaaaatgttttctaatatttcatccagctttttctgtgtattaattgatactgtaagaaatgcatacttgcttcctgctcctttttttgtctcactgtcattttctgtgtgattgaaaacattgctacccatagctcttaaaatgtataattttacagttataatcattggagaaagactgatccgtgtttgaatatttaaacaagtgcctgggtgtggtggctcacacctatagtttcagctactcgacaggcttaggtgggaggattgcttgaccccaaggctgcagtgagctgtgattgtgtcactgcactgcagcctgggcgacagagcaagagcctgtctcaaaaaaaaaaaagagaaaaaaaagaaaaaagcaattctagataaggaactttgtggttgagtttgggtcagatttcctcctctgggtcaatctgcttaggctggggacttggattacctgtgttaacatggaagctcccaagaaaaccatttaggctagactcagttccaaaaacaaatcaaaacaaaacaaaacaaaaacaaaaacaaaacaggtaataaatatacagtccaggtatccactgtgatggtaatcaagggataaagaatgatatttgttcaagtgatcctcttgcctcagcctcctgagtagctggggctataggcacgtgccaccacgcctggctaatttttgtatttttagtagagatggggtttcaccctgttggccaggctggtcttgaactcctgatctcaagtgatctgcccacctcggcctcccaaagtgctgggattacaggtgtgagccaccatgcctggccgtatttaagtctgttaggaatgattttgactgcaagtaagagagaaaatccacctaatagtggcttaaaacataagggcatttgttgtttccttagaaatccagagataggcaatatcttatatagtgaaagtctcaaaatcgtgtctttttgctccacatccttagtgtatgggtgcccccatccccaccatgttcttgtcacttcatggttacaaaatagctgcagtggttccaggcatcctgtttgctttcatgataaggaataagggacaacacagtgagctctcctttcattcctgttcctttttttttaagacaacaaaaacttatcttcatgctcctagcagtctacttttatttcattagtcaaaattgggtttaatgcttattcctagctgcagagagtttgactggaagtgaggttttgtcttttcagcctttatgttaagaagcagccaggtcaccatgtgttggaaattgtttgggagacaacaagctttctatactgtggtttattggttgcacattgaggaatccaagtgattctccttccatctagtttttagtgtcttggtgattgaagaataccagcttttgtcgacagtacaggtaatgtaactatccacaggagcaagtagctcttactctagccatctcaaatggatgcaagcaaccatacgtattcacctgatgccagtattcaccataaatagtatgagtgttagtgacagcagaggctttaatgagtaataggcacttcatttgttttattggcttgcatctgagaagtacctaagctaatagtttctgctttttgttagtgatgccttagtttggctagctaagtggggctaggtaaagaaaaaagcattttatacacatgaccaagtttgggagggatcctctcagtcgttttggactgacattgctaacttcgtaaagggaaatgcatagtctgagattttctctttatctgtcatcccttttaagtgatggcgttggcagagggtcattctcttagcttgcccatagctttgctttcattgcaacaacaactttttattttttagacagggtcttactctgttgcccagactggagtgcgtgtggtggtgcactcacagcctacagccttgacctcttaggcttaagcaatccttccacttcagcccccaagtagctgggactataggtgtgtgccaccatgcctggctaattttgtttatttttttgtatagatggagtctccctatgttgcccaagctggtctcgaactcctgggctctagcaatccttccgcctcagcctcccaaagtgctgggattacaggtgtgagccactgtgctcagcctggagcttctcatgaatcaaaagctccctggtagaatcaagaacaatttggttaataattttcaccctcgaacagatgagagaaaaacccaaaatgaatcagttgatctgtttaaactttaatatttattttccttttcatcctaaaggaggaagtagtttttcccagaaagcagtgtggaaactttcctgttcttatttctatacttgtatatggaggctgcttatggtatattaaagaatttggactgggtacagtggctcctgcctgtaattccagcactttgggaggccaagatgtgaggatcacttgagcccaggagtttgagaccagtctgggcaacaaggtgagactccgtctctacagaaaatagaataatttgttgggcttggtggcacatgcctgtggtcccagctactgaggaggctgaggtgtaaggatctctggaccctaggagactgaagctgaagtgagccgtgactgtgccactgcactgcagcctgggcaacagaacgggacccggtctcaaaaaaaaaaaaaaaaaaaggctttggaagcatctttttttgtgttcatatcacggctagtatgcaaactttttttttttttttttttttttaaagacagagtcttgctctgtcacccaggctagagtgcagtggcgtgatccaggcttactgtagcctcagcctcctgggctcaagtgattctcccgcctcagcctcctgagtagtcaggactataggctaggacccccatgcttggctaatttttaattttttgtagagacgggatctcactatgttaccaagggtggttttgaactcctgagctcaagcgatcctcctgcctcagcctcccaaagtgctgggattacaggcgtgacatgtgatcttgagcgaaatatttaatttttctatgtcttaatttgctcttgagtaaaacggtcacaacaagaacaactttagaggttcgggggattaaaggagatatgcaatgctcttgagacaacgtcaggtacattttaagcgtgcagtcagtgtacatgattatcatgataatgatgtaaatttttccccctcttcttgagttcttcttgagttggaagaaggaattcttttctttgagaggatagagttggggagcagaaagtgtcttctccaggcaccacggcaggaccttaggattgctggtgcattagagggtgtgagcactcgaacctgtcatctgcttctatgtcattttttcctcatcacaactttgtgaagttggtggattatacccattttccagccaaaagaggatgacctctgaggttatgaaacttgcccaaactaagaattctagccagaggtagagccaagacttggagctaagagttcctgaatctttcctcctttccaggagttcttgcctcagacagagctcgtgcaccgttcactctagctggtgttcctctgaccagtcagtagcaaatgcatgctctgccttcagccacagaagtccgcaagcagtagtgtcctttgtgttgtttcctcttaaaacgtcatctacttaaacaggttgtgaatctgtcttaaggatagacaaataatttaatggcagaggtgtagggtgatgattcaaattcagtgacataaaccaagcgctgggccaactctgacctttttttttttttttttttaatccctttgaatcatcttgtgctgcattctgatgaaatcttgacataccaccctgaaggaagtgctgtgtgaagaagtgtgggctcataagataggaccaggggaagagaggggccactgaaggctaactttgagtgtttggaaaacaacactggtttaggagctggaggacttgagtcccagtctttggtttgtccctgactagcagtgtgacctccaataacgctcttgacctgtctgggcctttgctgcttcatctgtggcatgaacacgttggactagaaagtgaaacacagcaaaacttttattgagtgtctactccattcaaggcctgtgctaggcatgatttatagtacggttgtagttacagtctcttcactgtctcagattccctcacgtccctgataaactttaatttctcttttaggaaagattcggcctgacattttatttttattcttacatcttagttttaagaagcacatagatttatcacttacatttactcatatgaataaataacatatgtatttattaaagccacttagcaaaggaattaaaactttcttctaaacttaccattcatggaaagctgtaatataagcaatgaaaagaccgttcttcacatgtgtcttgtgttactgctcctgggcctcctacttccatttccctctagatgacatggatttgtcccccttaattgtatccaggcctctatggcttcaaaggactttagcacatagggcggtagggtggcacggtgacaatatgaaagactctgtaatgtaacttgggttcaagtactggctttaccatttattacacgctaatacctttggaacttagttacttaaactgtagcataatatccacatcaagaaaggtgatctgttaggagtctcgtaggcacataaaaaggttgattcccaacccccttcatatgcagttacactgggaatttaagtatttacccagtccgaggagttcaacctcaaatacatcaaaaccacccttgcccttccctcctcaggacttagtgggtgataggtggaatatcaaacaggacaccagcctgtttctttgtgcggaggcctttgagtatcattcagattatttttttttcactctgttaaattcaagttacttctgcatccacttacgaagcatagctacaggattggctcagtctaagtaccggcctgtgagtaagccattctacttcttatttctcatgttgaatttaataatcagaccctctcttatttgtcagcactttgtcagagctatgtagggtgagggagtctttccccagctcagcccaggtttgtttttagtactggataaagttaataagactttatctgactgtaagtggaaagacacagccaagattaaattgcaattgagttaaaaccggtggaattggatttggttaattgattgtgtactatgtctcagtcagcattcatcttcagtttttcacctttgtactgcattcaaacatcaagtttgggttggttatacatttggatttccttttccacaatattttctagcaacatcattcaagaactcgtaaagtgaaaaggggtgtgcgtgtgtgtgaaactaggacattcttgtctttttagtaaatactcattcctttatttcttattgctctaatggcatgtgactttaatttggtctatttagcaactgtttaatttctgtcatgcagaaaacaaatttcagcaccttttcccgaagcccgtatgcctccttatgaaatgtacaggtagtgatgaatgaactctttgtcctgtttattggagttgtgccagtgacccttttcattggtcacttcagttcgttcaaggtgacatgaaaggcattttatttggggggatgtctcagtcaagtcaggagtttcatttgggggctaaatttgagggctagtaactaaattgaaaagccactagccctccaattttaatctgaaataactaatgaccttttaatctaaagtaacttcttagaaacccacattctctgtaagtcagagaaacaagtttccagtaagtgtttgcattagacacttgttccaattctcacctagtctgggaaccccattaagaagatctgggttattctcccttctcagtaaaaactgacttcttgaaatggaaggccgatgtgtgttcccatgttaccaaggagtcacttttcgggagggggggacttgtttttcttcttggtcacagagtgcaaacaacaccaggccactcttggttgtcaagttagcaggaaagaacttaagccctctccatttgttaatttttatgaattattagttaacatgaaaattgtagtgtgtaaatgtttacaaagaaacttctaaataccaatttgccttataatacatagtttaaataaatatgatgcttttctttttaaaaatagacaaatgcactgacaggggtatttagtaatcattgtttgcattttgtcacagaatgtttaaaattgacattgcacataatttagagacttaaccagggcggtttaagcagaggggcctgaagttatttttctgtggcaaaaaataaaaagtaggaaagaacttctaagcttctaaaatcctgacagcctcattgtaaatgaagcattaaagtgctttgttcatttctcacaaacatcagcccttgaatttggagggcccctccctccctccctctcttcctttttcccttcctcccttccttcctcccttcctcctttccccttttctttcttttctcttttttttgaaacctggaacattttggtatctctgaccagatgaattttttcccaagtgccttaggtgctgtcttccatctgaaaagtggggctgccgtcctcttctggggaatggaaccaaagtcttgggttcttcatcttgggttttcatcagtagcctctggcccttttttcctcctagacctataacttggagtgctgagaagtaagaaattgtcagaattaactgtctctttctcttgggccatttctctgcatattctcccatggaggtgattctgactcaggaaatgcccccacatagtcggaacctttcgagggcagaaaagggaggaaagaaaaggacgtggatatgtctactaactgaaaagccaagggtggtttgttcttccctgccgccaaaaaacaaaacaagattttcttcttgagacaacccttcaatgcctctgttttctttagaggactgttttggctaatgaaatcaatgtctgcaggatttcctgtgctttcagtctctttctctatagttttaacattcccctgtcattattagcaagttgtctgctaacagcttggcgcatgccagaaagctattctcggtggggttaatttctggctattaaaagttctctgagaccccagatctctctgagcagggccatgttggggatttccagcacatgtgctgtttagactcaagggccacagcaagcttccccatctcacagcagaaacactgtaggcacaggtgacagcaaatgggcattgaccagtccgctgccagagcgcttggtgaccgtccaacccacagacgcgctgccatctacctaacggggtcgtgacagtgattttattgcgtgcttcatgaaaatcatgtagtgcctggtccataataaatgattgcagactattgttatcctcatgcctgggacataataaatatccctaaactgttacatgaaaaatagaaattccctgagagcataattaggccagttatctccaagttagatttcgttcatgggacaaatggcagacttttccagcatgggctgaaagaagtaaaaaaaagaagaaacactgagaggtaggaggactgcttgaaactaggggtttgaaaccagcctgggcaacatagtgagatcctgtctctacaaaaaattaaaaagttagcgaggcatagtggtacacacatgtagtcccagctactagggaggctaaggcaggaggctcattcaagcccaagcccaggaagtagaggctgcagtgagctatgatcatgctactgtactccagcttgggtgacagaggcagaccctgtctttaaaaaaaaaaaaagaaagaaaagaaacactaacttgttgaagattgagatgactccactaggaacaaaaatggttggtgaagaggaagaggactgagaatagaatagtgctgcctgcctttgtgtttacatctcacatagagctatcttcccctccccacagagcagatgtagctgaagtgctcatgtgtatgtatttgaggggacagcaacttggaagagaagataccagctgcggcatctcatagtggaggtttggaggccaaggcagggcttcagggaagtgccttttctgcaacatgtgttttgttgctcttattcttgtcttggtctgcttgtaacaacaacaaaaaagaccatctggagtctagaaggcaaaaataatgggaatgaagagatggtgttagaatcatagcagtatcaccgtatttatgggatgagttattctactggccctcacttttggtgctgagattgagatgtgaaatcatgaagcgattcagaaatgtgtccttatgaaaatactgtcttctgatagcttcagcatacagggttttttatgagaacagatctttctaatctctcagcgttgccaagaagtgtccatgcttcttatctagagagattattccatgttttaattataaagggttgagtagctgtttcagggctgacgttggttcttgctcatgaatcaaggtcacaacagagctcacccctggccttggccagggacttaatgttcattcagcaaacatctgccaaaccctcactatatttacagcatgtgttaattgtagtgggctagatacagataatactccatgtatatagtacttttaacagtttctaaaggcttattctcttattcacatgaagaatctgaaatcagagaagtcggcttaagttatatagctggtaagtcaacaagcaatagctgcaaccagtcgtatcttattttttgactacatctctgctgtctgaggcaaggtccctactctcaaatgagttaacttttaatagaaaagataatttgattgactctaacgaacatttattacatatgctctggaggttccatgtgaaacaggcttgtctttaatctaggtctcaggatagcagaagtaatcccatttgtatttttatctgttttgtttaggatgcttatcacagttctaatgcagaaattatttggataattctgattgtggaaaaaaacaaactcaaagtgctttttctagtctctcactcaacagcagtcaacacagatttctgtgacaaacggggtgggggaaattctccccatcaccaagcaagcaatcaattctgcagcagacaacagctgggtatcttctattttaatgtttaactggtgatagtattagatcccacagattggaggctcagcccccaagaatgccccacctcccacctgacacaccagtctgggcctctggaacgtctgactgactggctttaagtttggattcctatgaccacctctttgggttggattaatttgctagagtggctcacacaactcagggaagcatgtttacccatttattataaaggatattacaaaggatacagataaccagaggaggagatacacagggtgaggtctggaagggtcttgagtgtaggagcttctgttcctatggagttggggcccactatcctcccagtgggtggatgagttcttgttcaccatcttgtctgcctccacatgttcagttatctgaagctggtccttttgggtttttatggaagcttcattatgtaagcatgattgattaaatcattggccattggtgatcaacttaaccttcagcctctcttccctctcctctttctgggctgaaagctggaccctctaatcctgccttgtttttttctggtgaccagctccatctagaagctgcctgggggctgccagctaccagtcaactcattagcatgcaaaagacatcactttggcatttctgaggattttaggggttgtatgccaggaaacagggtcaaagaccaaatatatatttcacaatgtgacagtaatgatttattttatgcctaactccgctgctagattgtgggtagggactttctcgttgaccccagcatccccaacacaaagtgaaacatctgtcagaaaacagatgtgtctttcatcacaaaagcatgttgaatgagtgcactataaagaatagatgaggtgctgttttaaagtgccatgggaccacagatgaagtttattgtggtgggaggtgatgtcatgagtagaaaaacttacggagaaggcatattaagccgggcaacaaaggatgggcgggcattaaacatgaatggagtgagggttgggatagaggggtgggacatttttctacagtgaattacaggaccaaagacacagatgggcagactccagctatgatttttttgacagatagacagggtgtgtgaggttgaggcttaagtggtttattggtaccagattttgaagtctttgattgactaagacatttgaagtttgttcttgctattgttattattattttgttttgagggagggtcttgctgtgtcacccaggctggagtacagtggtacgatttcagctcaatgtaacctctacctcctgggcttaagcagtcctcccacctcagcctcctgagtagctgggactacaagcgcgtgccaccacgcctggataatttcttttttttttttttttttgagacagagtctccttcttgtcgcccaggctggagtgcaatggcatgatctcagctcactgcaacttctgcctcccaggttcaagtgattctcctccctcagtctcctgagtagctgagattacaggtgcccaccaccacgcctggctaatttttgtatttttagtagagaggggatttcaccatgttggccaggatggtctcgaactcctgacctcaggtgatccacctgccttggcctcccaaagtgctggggttacgggcgtgagccaccacgcccagcctggctaacattttttagttgtttagagacaggattttgccatgttgcccaggctggtcttgaaaactcctgggctgaagcagtccgccctccttggcatcccaaagtgctcggattacaggtgtgagccaccgcgcccagccttactactattattaattttaaaaagaacctttattggtatcttactacactaaatgtattatgttcattacttcatttagcagtgagggcaatcccatcttattggtgaggaaacaggttcagagagtttaagtatcttgcccaaggtaacagtcactgagtggcacagttagtgatgaattctgttctctttgataggaatagaggcccactgatacctgtgagcttagcagtgtatcattctttattttgtcagaaatgagtacagtgtttggcacatcataggtgctccaggttttagagaatacattttttgccgagtcgcagaaggaatcagtactttcctttaggaagattagtctggtaattacgtgtattggcctagttagtaaatgttttttgtgggcatgaatcaattgaatccttgtttttgatgctggctatgtgccaggcactggtgtaggtgctggggacctacggtggtgagctcactggtgggttgggctggagagaaaggggtcgtagggtggcaggcaggctggttgggaaggagtgacagtgtggctacaggttacatcaaccccctgagagagagcagatgggcagagactgaggactgaggtttcagttaacccggtggtaacctagaatcatgatgggggccagtgactcgaaatatctgtctcactggtcattgggtggaggatgacaacctgcccctgattttaaaacagcagtttcttgtcttcctgcttgtgggtggattaattgggttacatatgtttatgaatgatagtgtaaatacatttctgatgacaatctggggaaaaaagcaaaaatggcaataaaagaactgttgctcatatatcaatggataaggcaattatcttctctaggagcacacagcattcatgtgtggggaataggggtgaagaaagatttcgttactgagagcatgatctggggatggaactgtacccgcggaatgtgtttccatctgtcataggctgtgcttttgaaacaacacaccatgttccatagggcttctaataaaggatgaagtgttggagaattcagtgtttttatttgtagaaagcaccagaatcccataatcaaagtcagggtatttgggggattggaatcaattagaggcattactgaatccagtcatccctgcctctcctgctttaaggtgaggaaactaccttaggtgtttcctgagttaggtgacttagccaagattgtacaggtagttattacagagacaggactagaaacttggtcttcagaggcaagcgattgcttttggcagtttggtgtgtatctttccaggatgtttcctattcatttgaaggcatataggcgtatattaaaacatacatttttatgaattttcttaaacccgtaattattattctgcaatttggttttttcacctgactcctttcttaacccattttttgttaatgtcaatagcaaaataataaataaaccatggtatatccaggcaatggaatattactcagtgctaaaaataagtgggttatgaagccatgaaaagacatggaggaaacttactaatctacaatctagtttttttcagcatttgaggattattccatagtatggatgtgccagagtgtaatcagccattctctgagtgataaaaattcaaactatttattttttaccatcatgagcaatactacaatttacttaaaaaatttatacagctcttacttttgtgccccttgctattctaaatgctgtacaagtattaaccaatttaatccttgttactgcataaggaggcttgtctgtcttatagatgaagaaactgaggcaggaagaaattaaaccatctgcttaacatcatatggctcgaagtcaggatttgcacacaagcacttcagctccagggtctgtgctcgtagacactgcgtcgtgctgtgttttagcagtgagatccttcacctagctcttcattcacatgtgcaaatattaactatgtgatgggtagcatagaaatagaattatcaaagaaacattttttctaatttagttaaaaaactttattattattattgttaggtttgcaacaacattgataggaaggtacagaggtttctcatatgtcccttcccctactccacagcctctctcactagtaacatcccccatcagggtgcacagcctctctctctagtaacaccctctatcaggatggtacatttgttacaattgatgaacctacctagacccatcagtatcacccagagaccatcatttacgttaaggttcattctcgaagtcatacattttacagatttggacaaatgtataatgggatgtatctatagatcactgaagtatcgtacagaatagtttcactgccctaagaatctctgtgctcctcctatttattcttccctccccccaacccctggcaactactgattttttttttttaatctccctagttttgctttttccagaatgtgataatgttagaatcttccaccaggtagcctttcctgattggcttctttcactcagtatgtgcatttaaatttcctccatgtcttttcatggctctatagcccgtttcttttcagcgctgagtaatattacattgcctggatataccacgatttatatattcattcacttactgaaagatatgttggttgcttccaagttttggcaattatgaataaagctgctataaacatccctgtgcaggtttttgtgtggacttattttttcagcttctttgagtaaataccaaggatcatcagagaaactcttctgaggagaaatggtcaagcattcaggcacaagatggcttttgagtgctgataatattatcagtgactagcctttacttaacatggtgctgaatgtttcgtatgcagtctctcatttagtcctcacaacacctagtcagatggcaactctttacagaaaggacaatgtagtaagatttttacagcccgatatcaccaatttagtgattgacaattgatgacttgagcccagaatctcaactcttaatcaccgtgtgtattagtctgttctcacgctgctaataaagacatacccgagactgggtaatttataaaggaaagaggtttaattgaatcacagttccacatgactggggaggcttcacaatcatggctgaaggtgaagaaggaaataagacacatcttacatggtggcaggcaagagagagcaggtgcaggggaactctcctttataaaaccatcagatcttgtgagacttattaactatcatgagaacagcatgggaaagacccgcctccatgaatcaattacctcccgccaggtccctcccatgacaagtgggagttatgggagctacaattcaagatgagatttgggtggggacacagccaaaccatatcactgtgtcattcaccaccccccacttttttttgtttttgctatgttgaccaggttggccatgataattcccttttgactgtgttcagctgggcctgcttttgatgaaatattttggctaaagcttttgacagacctctgagtagtaatctgtggctttcaagcttcaaggattatatatttctttagcacttggcattgtttgtaaactaattgtttgaggtttctttttctttcacattatttttgcagattttatacttttttcctatatcaaagttatagtgtagggatatgactcacaagccagatgggggtaggggtgttcccaattattctaaatgtaaatgtaattagagtttcatgtggatgcatacctcctttctaaaaaaatatggttattttagcgctcactataaattcactggtattcataaatttatggtgaaaccctctagttataaagtgagttttattacatccacataagctgctttttaaaacctcctccttcactttcttttctctttcctacaagaacatcatttgtcccctcagaataagtttagtaaagtgtttggaccattctcaaaccggccaacttctcaattcagtttaaaaaattggaacgtatgcttaagaatagatgttctgagttagaatttcttccatcatttgacaggtttaacatatctaagatgtagggggagaatcttaattggacatacagctacccaatagaatgcctgatatgatgaagagtttgaagaaagttaaggacatactaatggcaaatagtgcaaggaaaaataaaagcaattagaaactccaggaaaaactaaaactgagctaaaattgaaatgtattcatattacattatttgagatgcatagaaaaatatttacatggttataatataaacacaatcaatttatagacaaattacaaagctcgtggttataaaacagtaatgctaatcaacctcaatgatatgaaagtaaaaatatagacaatagatggtaaggaatggaaagacgtggaaaagtgaagagggctctaatgatatcaaagttgggcagttaagagttattgtaggtgatgcaacaggaattaaagggactacttttttaaaaaatgaaaacatacataggcaaggaaatagcagtttaatctttttaaaaggaaaataatgactaggaaataaaagaactatgaatatgtcttctctggagaggcatttgggaaaaggagctcctggtgcaggtacgaatccagaaaaatagagtgatacagtgatcccccaagaacccactagccttaacagtattccacattttaccatttttgtttcatctgtcttttttcttttttttttgctggtatcttaaaaaattcaaataccatgccatttgaccccggatacttccaaacgcatctcaagaaaaaggacatctacttagataaccacaataccattatcatacctaacaaaactaacaattccttattaccatattgaattttgtttgattgaaaaaatactttttaattttattagtagtagtattatttagagatggggtcttgctatgttgcctaggctggtctcaaactcctgggtgcaaatgatcctcctgccttagcctcctgagtagttaactacagcatgtgcaactgtgcccacctgaaaaagttgtttttttttttaatagttaatacattcaagtcaggttccaaacaaagccccctcttgtgtatgggtgttatgtctctctagtctcttctgagtcttttaatcttgaatagtcctcttttcctttttatcatgccattgacttactgaataatatttgatgttaaaaatgtgtgcatgcattaatttgattaaaaattttcaagaagttttaattggcttttaaaattttaatggttaaaaagtatagacaactttatatattttaaaagtcttatgttctctgtaagggtatttttataaaaacttgtttttaatgactaaatttaaacatctcaaatgcaggaacctttacatatcagttattctgggcacaattctttgcatgccaagatgagtaaaaatgattattctccagtattttttagtctaatcagagagggcagtttgtggacatgcctgccaaagcattttgccacatggaagtaattacttttaaagctaatagttaatggattccttactaggagccagccattttattaagtgttttaaattatttttatccataccacacactgtgggagaatccatataatccacacaaggaacctgaagcccagggagattaggtaactttgtgtagggtcactcagctagtaaatgacagccagtataggaacaaggtctttctaatacccttaatcactaaactgtatagggcctcccaatttgacatgctagtctcccctcctaagaggcggcgttatgtactggttcagagcatgagttctagagccagactgcttggttttgactctggctctcccactaaatagctctgtgactttgggtgacttgcttaacctctctatgtctcagtttcctcatctgtaaaatggagaaaatagtcctggctcataagattaaatggtttcctatttgaaaagaccttggaacagtacttggcacgtccatgaattaaaaaatgcttaagtaactgcagcacagaaatactgcatttggcatatatatggattggtggatgcacagatggacaaacaaataaaaagtagggagcaaattgtaggctactttttcttatatttcaccaataaaaagtaaaggcacttcccccagttaatgtaataaggttctctctcaggtctcagaatgttgtgtagattttttaaacaaaattgtaataaaattttattgatggtatacacatacattagttattattttgtagagtttttaatgctcaatgttgatatcaacttcctgactactatttttaaagaaagaaggaaaaaccaaattgaatagtatctgttttttccttctttctttaaatcatgtgtttatggaataatccagaagcataagaggcgacttttgtgttaagcatgaggtgactttcatgttaagctttctctggaagaagagagaactggatttggactttttctttcaaggagaaagaaaaaaatgttagtcacattacagccttgaaagaatcttcttgaacagttctggaggaacagattaactttggtgcatgtagatacagtagttcagcctctgccacttaatctatccccaaggtctcatggagggaagaagtagaggtgacagcgacttattataacgtaactgagtggttagtgaatgttctagaactcctatcttggtttgattggctttttgttcatgttcttttaagcttttgaattttgctaaaagataggtgctttgaatccaggatcctagacaacttgggggccaatgaattgatttcaagatggccttttgctgctttgaggatgcaggctgatgacttaggtcctgtgttcattgattctgctggagatgtccatagaacgaggaggagaatcttcggtttaatgtctcctgatttatttttagcagctgacctggctagctgtgatttgctaattgtctgtatgtagtatatgtttgtaagtgctgagtcgtttcgaataaatagtctcatatgaagtgagatgatctacttggcctagtagctgattctttctggaattgataatgacgagagtgaaattctatcttaacaagtgcagcagctgccctaatggagaaggacgacgtggaatttcccattgtctacctgtactgtcctaaaaatatacgaccaattccagtgactgataatgatattgagaccgagtggttaataatggctcaagaaatcccagcttgatttgaccagctttccagcttttttctttggcaggtggggagtgggggattaaatctgttgacttttgcaaatacataattttatagaatatgtgtcctaagaacgaaactcactacatttctaggttcaaacttacttttttgggtccaatgctcaatataggacaaaaaagaagaggaaaggagaaaatatgaaagaatgtatattagttaactcagatttttggatctgggtggatttcggatggtgttaaattggcctggggacttctttattattttttttaatcgtagcattggtttgtaatattcatggtttagcctgaatgacttaaaggatttattttttaatttaacgtgggttaaaagaacatgagcaatagacctgccaataactattttaaaatataaacagataactgtttgttttgctcaaaggtcacattgaggattcagagctcatgactcaggatggctatttttcttagaggaatgatttagacaagttgaattgaatagctcctaggccactgacatttattcaattttgtctttaagatttgtttactttttgaacctgtaaaacaggggtgtccaatcttttggcttccctagaagaagaattagaagaagaattgtcttaggccacacagaaaatacactaacaacagcttatgagcttaaataaataaataaataaataaataaatgcaaaaaaaaaatctcataatgttttaagaaagtttacagatttgcgttgggctgcattcaaagccatcctgggccgtgggttggacaagcctgctgtaaaagactggaatttagatacagctcatcaaaatatcttgctattctaaaagtaattctcaatttctattttttctaagaaaaattattagacagtaatgttaagttgcagcaagtaggtttgcattttggatagtaatagtcccaattttattaaaaggttggcttatgataaccatagatttcttaattttaattttatttattttgtttgcacatactattttactgatagtatgtgcaaaaagatagtgagtgaagcagttggactaattgtttacactaagattacttaggaaggactatctggcatgtttatattacattcagcaaattgtttatagtagggatcatttaaatatgcattaccaatatctcaggttttagatttgccaaccctgtacgttgagattttccaggatcttataattgcaccggctagtggttctcccttgaataaactgcaagactttgcacttagctaaaaatgactcacctttgaaggtggtacgcattcattaaaaaaaaaaaaatcaagtgcgtgcagtgcactgtgcaccatgctaagcactggagatagtgttgagtgagacaaatgtagtctctgcccccatagaacttacattctagtggagtgagacagacaccaagaagcaaacaatacgtaatgaacaagattacatcagagtgataaacactggaaagaatataaaataaggaggatgtgatgcagcatgactgggggtgggatgggtgggccagcactagatagggcagttagggaaatcttctggaggaggtaacatagaggttgacacttacaagtttaggaagagctggccacttgtatctctggggacacagtatgctagcatcaggaacaccaagggtaaaagctatgatgtaggtacgtgcagtgttggagaaacagtaagaaagctgaacagcagggagcctattggtgtgtcttggcccatgcacacctcagggagtagtcaagaccatgtaaaaattaatttgttggctgggtgtcacacctgtaatcccagcacttcaaaaggccaaggcaggaggattgcttgagcccaggagttcaagaccagcccgggcaacatagggacaccgtacgtctacaaagaataaaaaaaattagctgggcatggtgatgcacacctgtggtcccagctactcaggaggctgaggtaggaggatttcttgagcctgggagatcgaggctgcagtgagctgggatcataccactgcactccagcctgggtgacagaatgagaccctgtctcaaaaaaaataaaaaagcaatttgtcctctctgtatgcatattgagaattattacataagttgggtttttattagccacgtgaagtttgggtgataaaaatttgatttcctacgaaattgcagagtacgtgtttctggtaccctgagttgtgttgatgttcagtgctccctttactctctgtttggcttcaagattgaacggtgctagattttttcatgcggatatttttgcgtacctgtgactccacagaccagtgtgcttgtgtgcaggatttggtgggttcatggttgtttattaaacaaaactaatcctatatagaggttttattcgtttgctagggttgctgcaacaaagcaccacaagctgaatggcttgaacgacagaaatttattgtctcacctaaatcaaagtgtcagctgagttgatttgttttcttttcttttttttttttgagacggaatctcaccgtgtcacccagactggagtgtagtggcgcgatcttggctcactgcaacctccacctccggggttcaagcgattctcttgcctcagcctcctgagtagctgggattacaggtgtgtgccaccacgcccggctaatttttgaatttttgtagagacggggtttcaccatgtaggtcaggctggtctcgagctcctgacctcagctgatccacccgcctcggcctcccaaagtgctgggattacaggcgtgagccaccgcacccggccgggattggttccttctgaaggcataggaagaaatccgttatgcctcttgcctggctcctggtggttggcgggcagtctttggtgttccttggctctgctgtatttcttctgccttcatgtttgcgtgtgttctttgtacaggtgtggccttctccaaatttaccctttttataagaatctaagtcatgtcggaataggtcccaccccgctccagtatggcctcatcttaactaatgacaactgtaatgaacgaattaccaaatgagtcacgttctgcatgtttttgtcctcctgaaattcctatgttgaaacctgataaccaaggtagtgttaggagctgggtactttgagaggtgattgggattagtgcccccttgttcctcccaccatgggaggacacagcaagaaggtgccatctgtgaactagggccctcacctgactctgaacctgctggcatcttgatcttggaattccaggccttcagaactctgagaaatacatttctgttgtttatgggccacttaatttatgatatttttttaagctgcctgaactgtctaagacactttctgagcgactgagggttaggacttcaacacaggagtttaaaaaaggggttttccagcgctagacaaattctaaaagagctgtaacactcagcataggaattttacaatggggacgcagttcagttcataaaagaggtgcatataatttggctaaactcattgtctctcacaaatgaaaatacggacaatacctgcaaacattttgaagctgtttaacccattttttgctcagacacctggaagccacggccccttttttatttaataacatctggtgtgtactgagcattggtaggctcctctgtgataagatcttgaatgtgtcaccttgttgattcctcataagcaccctctggagtttgttctgtgagcagcctcacttgacagttgagggaactgaggcttagttccagaaagaaccttcagctcatcaccgcagccctagtttcagcatgatttttcttactgctagagttgatagaatagtcacagccactagcactggagcctgccctagccactaatagcacctccacgtaaaaggtttctcattgtgaggttagtttcttatcttcctaattctaccacctagtccattcaatgcctcccttgttctttatccctgagtttatgtaatatgcagcagtactgagaagattaattagttaatacttgtgaagcactttgaggatgaaaagctcatgaacacttaaagttaaattaaattttgcctcctggtgccaagaaataaacagtctttctccttcctggttggggtcagcatctccccttggcccgcaggagagtgtgttcccacagagagcaggctgtattgattgtctccccaagacgaaggtcggaatggctactaattctcttttgaactagattggattctgcaaacaattgaacagctgactctatgctaagtggaaatgtgattgatattgaaacagaattaaaatttcaacttctagggaattaaattgagtgcaacttcagaaatttggagatgaatgtccaagtggtttgaaaagcaattttcatgttccactaagtatattaatatcaaaagtgatattgatgtttgagaacattgggctgcagttgtttccttgtccttttcatttattgccattttgacctaaggtttgtgccaggaagttcagcttcactcctagtgaatctgagtggcgtaatgctggccccgtcttgctcattgattttcctggtagccaaatccctgtacaacgaactgtaacatatcctcaaatgaactgcataaaagtatgttggagatggagaggagatctataaattcagaggacaaataaatcaaaaagtgaatgacttgtaagaattcataagccaaattcagagccaatttggaaactgaacctcagatttttccagggctgtattcattccttcccctgttggatagatcttctaagagccaccctcaactcgtgagtctgataattgcttttcagatggacagttaccttaatgaactctgactttatgtatgagtagtagtttgttgcacaggagttgttttcccagaaggtattgacctttattccagtctctactatgagcaaacctctatctgttgaatcagctcctggaacctcagctctgaataaataaagagcttaaaggtaaggaataggtgggtcagttcagccaagtaaggccagatagaattagagttgagagccaggtcagagttgagagtggggagaaatagccaggactatttggcccaggaagcctgaatggggacacatgcacacacacacacacacacacacacacacacacacacactgaaacactctgcaaaaattgaggtgtttcccaggttcctaacctcctgaatgcaatgcagattctttcctccaccttcccttcattgttcccatacaactctggcctgtaatcagcccaacctgggcctgggccttggccactactagatattctgttggcaccaagagtagtcaggaccagttttccctctcttaatttcctcctcaggagagttgagtgtttatcatattctcttcttttcctctctctttctctgttcagcttaggcaatcttccattctgcagtctttctcctagctgtgtatcttgagaggtaatgcaatgtaggttaagactgcctgagttgaatcctggcagtgccacttatgacttgaatgacctcaagaaagacatttaatctctttacctcagtttccccatctgtaaaatggggataataatacctatttcagtggaatgttgtgagagttaaacaagttgatatgtggaaagctcgtagggtgtggtctgtaatgtgttcaattagcattaattgaagagaagtggagtctccccttcaattcttacctgagtaacactggacaatttcatactttgttgtcactatttttctttagctcttactcttttttatccattcctgtagcactagtgatcaggataaaagacgtgattgctaatagagtaataccttgttgaatttgtgtaatgttccaggttggaggggggatgataaagcctaagaagaccaagtccttttttcttgcaactttaaattgttgtaggaaaggagacatgttgataatggtttgcagtataacatggaacatgctagactccaagtcgaaactgagattagagataggcgaatgaagatgacagtcaaccacgtgcggtgggcttgggggctgaggtgggtcatggagggctttataggggaggtgacgcttgagctagttttttttggtttcttttttgagacggggtcttactctgccacccaggctggagtgcatgctgccatcttggctcactgcaacctcctcctgggctcaagtgatcctcccacctcagcctcacgagtagctgggactacaggcatgcgtcaccacacccagctaatttttttgtacttttagtagagatgggatttcaccatgttgtccaggctagtcttgaattcctgagctcaagcgatccacctgccctggacttccacagtgtgggggttacaggtgtgagccaccgtgccccaccttgagctagttcttaaaggtgtgagaggttcaatgatagacactatcaacactcccagtacgtcacgtaattaaggtgagagtgctgctcagtagatttatcaggtatgtggtcactgatttgaaatctatgccaaagtcggtgcagtgaggtggggatgggagagcctgaaggcgcagacctgagaagagaaggagattaagagtctgtgatttttacatagttgggccctggaggccagggtcattacatagagtttgtgttaaaactttctggtagctagtgatgttgttgtggagaacctcagaagacaaaattaaaaactttgatgggaactgagacaaagtaaaaactaggcatactctactgctgagatccttactgtcttttaggactgcatgctttcatctttttctattttaacttctcttttattcttctcccctttgctcactccacagagctttgctgaacacctattatgtgccagatgcaggggatcccaagttgggttaaggcattatttcttccctggagctaacctcacccaaaaggggaagatagttgtgtgaagaactaattgacagtgtgaagtgtggctggtaatatagggagctgtgtgggaggaggaggtgtgtctgggctaagaaggcagggatggcttcaagatcttgaaagtcttgccacatggatagatagtgaccaggtagacagaggcactccagcaaaggtaacgcagcctgcaaaatcaaggagatatggaagtccatagtttgagtaaggaatgagccatgttgtgtggctggaatagagggagccaggtgtcaggcggatatggttccagatgaggctgaaaatgttgatgagggctctatgagtgtattaggcttttcttgcattgctataaagaaataccactgagactgggcaatttataaagaaaagaggtttaattggctcacagttctgcagtctgtataagcatggtgctggcttgtgcttagcttttggggaggcctcagggaacttttagccatggtggaaggtatgtcacatggcaaaagcaggagcaagagaagaatggggaggggtcacacgctcttaaacgaccagatctctagagaactcactccatccatcacctcccaccaggccccacccctcacactgaggatcacatttcagcatgagatttgggtggagacaaatatccaaactctatgaatggggcaggttctttgatgctctcttcaaggcgcatggacttttatcttgtagaatccagggggatcccatgaaagttttttaagctggaaagtgacatcattaaatttgccttatttttattttaaagaaagttaattttggtgacagtgtggaagatgtgtttccttatatttggccatataaaatataaaatttgatttttaaaacattttaaaacagtttctagtattctaacagtataacagtatgtttagatttataaacaaaggacattttatgtttttataagtcaactcatttttatgactacgttttcaatggaaaaatgaatattgagcgtcaacaaacaaaacattgtgtgacaagcttgtgcattgctgattctctgtgttggcctcatccataaactaaagcctcttaaactcaaatctctgatgccttttagaaatgccttttactttctttttgtgtagtaagagggatcatggaacctatgatctaaaaactgggaagcaatgatgccatgtgtctgcaagcataggtaacacagctgttttagagatgtctttaaaagggtacatgagtgttttgatatttgagaacagatcttccagcttgtcatgggagttgcatagttttagaaatcagtccttaaccttaaactttgttcacattgaactctagaatagcagtggtttttgaagagcagttgttgaatgcatttatgcatatttaatttttttgaatggctattaaagacctaagacaattatattcaggtttcaaggaaagaacttcttgtgggagtttaacatttttaaattgttggttggtggagggctggtatttactgatattcttgagttaatgagtcccaactataatagccacaattgtgctgcccttcactttggagaattgcgtatttttacactcatactttgaggcttactatttcagtatagaaaacaaatatagttgctgaaaaaaaatgattagatttcaaactttatctgaggcaaatgtgaggtcattaattagacttctttcaaacttcttaagttcccgagcctcatgatattatcaaattaaaaggacagactattgaaatgttaatttcagttcatcatgaatgtttgcacttctcataaaatagccatttctgtgttaaaaatgtcttataatctgtgaatagcatttaagaaagcaatgtgaatgtgagtgtatttaaaatcatcctctaagtaatgcttttggaagccagtgtacagtctgacctaacaattacaagtagaccatgtaaccactcattgaagatgaatgatgtttttatgctacaagaattaaagactgtttcttaaaagaaaacaagagactgcttttttagtttttaaccacctgtacagcaaatcatgaataggagaatctgaatgcctgatagccttctgtattattttgcttatttatatatttattttacaataaactttaaaatgatatttaattctacagtagctgtggatagatcaaccacattctgtataatctagatttttcttaaagctcccttttcttgccctatcaattacttaccgtccatatttggccattttggggagccaagttgtccccacgtatcagtggtgataaatggatcagaagaaagttgatcaaatccaagtgtgtttttatatatgatgcatcagttatctttgacacatagcagttccaaaacctcaggcagacacaacaagaagtgcttttttgtacatgtgtctgtggtcacagaggttctgctgatcttgggtgagcttacccatgtgcctgagggttggcttgctgttggacagagtgaggtgactgaatgacttggctctgctccatctgtctctcattcttcagcagttgtggcaatgacagtggctctagagagctagccccgtgcacaagtccgtgaagcctttgtttgtgtcatatctgctgaccaaagcatgtctctttgggctgagtccaaagtcaaggggcagagccggcctgcccacctatggtaaattggcattacaaagtttcatgtcagagggcatggatacaaggaggagtgaagagctgggactaaatgatgcagttcactacataagatttagaatttttattgataacacgtaatttcacttctttttctttttttctcttctcttctcttccctttttttcttttgtttctttggaaagggtcttgctctgtcacccaagctggagtgcagtggcatgatcacagctaactgtagccttgacctctggggctcaagcaatcctcccgtcagtctcccgagtagctgggactacaggcacatgttaccacgcctggtttaagtttttaaaattttatgtagaactgctacattgcccaggctggtcttgaactcctgggctcaagcaatcctcctgcctgggcctcctaaagtgctgggattataggtgtgagccaccacacccggcctgatttcacttcttacctaccacacgtgttgtctcccttctttaggccttcatcagggaatatttgggggtaaagaacagaaacccactcaagttgcttgaagattaccataaacagaacagggaagctcacaggcctataaaaataggaaacctagaatgggcaggtctcaccagaactgggactgctagatgttagactttgagacccttctttcatctctgctcctctctgtttctccccctctgccccactccctactcttatgaccccttgtggccacatcaattttaattgtatgcagttgtgtggctcaagcacctactatgaatttagggatatgaattagacctcactgtctgagtctaattcatttccctaaatcctagctcatggattagttattcctgagtctacttgtgagtctcctagagctgagtgctcagtcttcatctctttctttactttgcttattgagcgggtccagccctatgacttgaaatgctgtcttgatgctgatgactcataagtttctgtcttcagcctagacttctcccttgaactccagactcacatatactacatcctactccacatgtccatttggatgtatctcataggcatctcaaacttacacccacatagaccacttgatttcctcctcataatttgcctctcccagtcttttctcagtaaatggcaatttcagttttccagttatttaaatgtcggaatcaaatccttggttaaatattcatactttaaaattatatgcatatattatagttctaatatagtatatatattataaaagaacgcaaatttgcaagcttcatgtgacactgattaagtaaactagatctttaatgtctggctaattaggatgcttcatatttttatttactaatatcacaagcataatagataatgtgagtttcattttttaaaaattgtggtaaaaacagataatacaaaatttaccattttaaccatttttaagtgtaaagttcaggagtgttaggcatattcacattgctgtgagacagatctccagaactttttcatcttgcagatctgaagttctgttcgcattaaacagtaagtccccttttcctgctcttcccagctgctagtaactaccattctacattctggtgtctatgaatttgactactttagatacctcatataactggagtcatattgtatttgtgtttttgtggctggcttatttcccatagcagaatgtcttaatagttgatcagtgttgtagcatgtaacatgatttccttcatttttaaggtgaaataatactccactgtatgtgtacaccatgtttggtttatccattcatttatcacggggcatctgggttgcctctaccttttgacgattgggattagtgctgctatgaccatgggcgtgcaaatctctttgagaccctgcttttaatttctttggctatataccagaaccggaattactagattatatagtagctctacttttgattttttgaggaaactccatactgttttccattacagttgtttcgttttataatctcgccaacagtgtacaagggttctaatttctccacatctatccaaaccttggagtctttttttggcttctctatttcatgccctaatctagtccctcagtaaatcctcttgacttatatttgaaatatatcctacatctgactgcttcccatctatcactgtcacctttttctgagtcaccattggctcttgtctggactatgatactagtcttctcactggtctcctggtctcaatccttgcccccctacagtctgatctccatagaacaaccagagtagtaatttaagaatataagctacatattgtcattcctctgcttaaaactttctaatgactcccatcacacactgaggataaaattcaaagttgtttccttggtttataatgtcttaaaaattctcattcctttgcttgcctggcttcagacacactggtttttgtacttgccttaaacacactaagattgtccctgcctcagggcctttgtcctcgatgtttcctccacctgggtgtctgtattcacagacatttgcccttcacagaggcctttccaaacagccttctcttaaaaaggtactcactgtcaactttttctattctcttaccgtactttcttttcctctgtgcacttgccactttctgacatcgtagtgtatttatttgtgactttcttatggctgttttccccaagagaatgtaaacaccatgaatacagggattctatctcagcatctgaaagaatgtctgatactgaaaagatgctcaataactatttgtggaatgagtgcgtaaaataatattttgtagccatgtgtttaagcagctttggccatggcgacagaggtgccccatgtacacatggcgccttaggtggaggtggttgcccaggaaaatgctgtaatctgtctaccatttctagccaatttctccagctagaaataatttatgggctattattgttcatgaggtctaagtgggaaagtatagatgccttatcttctttttttttttttcagcctcttattgaaaaaaaaattcagggattgatgggaattatttgcctctgcccttttggccccagatcatccttcctgagtcttggctgctccttattacctgcagtcacatttcctgttgtaatgtgagggcaatgcttcgtttgcacaatgaatgccagaaatggattttaaagcattataaagcaaagccagaaattcctcctgcaggggagatggtcggttgacaagtctgtgaattatataatagaatctcctcttactctccttgtaaaatataccaaaatatcaaaaaacaatgggcttttcttcccagtttgtttgggatcatactggcatcctcctgtattttggggctgtgggattagaatcatgtataacggctttgttttcccccggctaggtttgtgatgaagttgttctgatggaaacagtcagttaattctaaaggatctgcacacgcttgctgagcagagtacttctaccttaaatggtcttccatgctgtgggagagagctcctgatgcgtcagtcacagtgataatgtcatgggattggaacatcaattttgcctgttcccaccgcctcatggcctggagaagtctatttcagtcttactagtctgttagaagcaacagtaattaaaatggatctgcaggcttctggggtctttggataggtagccagaggtctatcaattgcaagagattcaaagatgattgcaaatgcagtgtgagggacactccctgaggccctcctagagtgcaagtgatgcttggctttttgtactggatggtgcttacacatgggtgtacgtttatgaaaattcaggttctctacttatgatttctgtacttttcttgcaaatatgttatattttagtgaaaaagactttcttaggaaaacaaaccaaccatagtttctacctgcaagaagatctcctggtggagatactcaaatagaagatcacacagtcaacttagtgccaagattaagcaaagcgtattatgggagcacaaataaaagagatcacactcatctttgggggaggatagaggaaaaccagagagaaggtttaaatgggatttatctatcatcttttcctggcttcctccatatagaataaggatttatatgaggaaaccagagtaaatgggttcaatcctgattctgtggtagcatgcttggaagttaaaatatgcttggaagataaaatattgccttaaaaagcagaaaatttattaaatatcatcaccctcagggagtttgttgatgattgtctctccagacctgtctcactgttggcatggataactagattgatgaatgactaagagctgaaacacaagactgtgtatttctcatcaatgtgttttgttattgtgaaatatttaatattattaagagctggcagtgaccctgtgttggaggagggtagggtgtgtttgtgtaagagcagtgagaaagtaatggctaaaaaaagttgatgtcttctttaaaaaaaaaaaaaaatgttgccagcagctggatgcagtgtctcatgcctgtaatcccagcactttgggaggctgaggcagaagcatcgcttgaggccaggagttcaagacaagcctgggcaatatagtgagacctcatctctacaaaaaataaaaaattatctaggcatggtgatgcatgcctgtagtcccagctacttgggtagttgagacaggaggatcgcttgggcccgggaggtcgaggctgcagtgagccatggtcatgccaccacactccagcctgggtggcagactgagatgctgtctcaaaaaaaaaaaaaaaagaaatgtggctggtgataagagatttatagtctaatgaggcacaaagtcgttttattgtttgttttctttataatgaatgaacaaaatcataataggcaataattaatataggaaacattgcaaggtggtataaaatgaatttctttactgttaagtacattgagctcatagaaggaactgatgaatagggaatggaactgctgggcgattggagttgttagagtagatagtacccaaattggtctttggacaaataggttggaaccagacctgaatgtgcataagaatatcttggtaacaagttaaaaatgtagattcctgggtccaacccccagattctgtgggtctgaggtgaggccttgggttatggatcttcacaaagaggtttaggtgtaggtggttcagacaataccatgagagataatgactaggagtcttggcagggagagagggcaggattggtggaaggcaaatgcttggaagcaaaaaaggatagcattcagtgaagaggcagactcattcctgagacagaaaaagaaaatttatctagaaacaataaatatgccaggcagctcctagcgttggacggactgatggcaaaacgggtcatggcaatggagcccgttatccgtggaatgctacaatctgtagctaatgtttttatttgcaggttccttcagaacgaagtcaatatttaaatgaaaatataattcttgaataatttgcactttaacatgtggaggctggaacataccttaaaggttattttcctattcaaccctgtcatttaagagaaaggaatgggaggtagtaattcatgagggatcagcggagatttggctgaagttcagagatttcctgaagggtcataaacacttatttgtttattcatcaaaacttattaagcacctcctctaaacacccagtcctgggctagaccccgggatcctgctgaaaagaagaaaatcaatacagccttgcctttgggagttgacagtctaatgaaggtgtcagttgtagaacaagtatgggaatttttcctacaatgaattgtgttccccacgctgccagttatatgtggtagagttgcattccacagacccccctactgaatacacttttattgaaatgagggccctgggcacatgatgacacacgatggcacaggacgagccacacggctctctgtgcagctgcagtgtttgaatggctttctagttggccctgagttctttcattgtatgcaatctgctgtgatttatttggatcgtgtacagcagtgctttttaaactttaatttgcaaggccatcacccagggctcttgttaaaaatacagattctgtaggtctagaataaaaactgaggtgccctgtattttcaccaaacttgcagggatgctgacgttgctagcaggcgaaccatgctgactagtgctagatgtctggagagagcagaagtcttttgggtcactgaagatctcctaaattgagatcaggttggtttttgttagtgttgatcaactgatttgtattttttcagcttatagccacaaggcctactatatatagtagcttataataacgaggtgcattataactacaataatacctttgctgttgaaatttgtccagaaaaacaactttatgatggaaagtcgtgtcctctgtaacctctaattcttttgtacgtcactgaaaaaaggataacattttggataaaacaaaatttcttgacttcgccaactgtcacaaaatagcagaacagactgtaattacaagtgtgacaaacgtgataaaggaaatgaggctagggctgtctagattggggtcctctaactgtagttatttggatagaggccatattggtttcttgttctgctctcccccacctcaatcttacattactgcataagttggcataggctggcacagaaaatcttgaaggatagttgcatttttacctgaagctcatccagcaaccagtgccagtgaaactgtgcattctatactcatcttgaaatattagcccttccagctcatagtttgtttatagcaagcaaaaagagaaaaaggattactttcagattgctataacgcttgacaccattgggctttttaaaggttgtaagtgaataaattgagctcttgtgtaggcatgtttctttttaaaaatggtttgatatgaggttaaaaactaaattatgtaagattctatagaaaacattttttttctgccactttttttattttttggtttctagagtgatctttttcctctcttttcttttgagtgacagtatcagagaatgcaaaaatcataggagggagcggttcggtttgacctgatggattaattgtgtataggcctctgcattcaaatgaggagttgtgtgtctgacaacaaagttgctattccaagttgctttgccagtgagaatttttattgtgtgtgtgtgtgtgtgcatatacatatatatagtgtgtgtgccagtgagaattgtggagctcataatgtcccacagccagaaggggctttagtgcttagcctgaccagctggtcctgtgttctgtgatgagcttcttcagtatttgagttaccattgttcatagagccacgtgctaagtgctcctccaaccaacgtttgtgtatgagatttaaacgtggttggcgcgctcatgattgccatactgagtttccaaggaacaatgaaggagggctagatgactgcacctctgaaagttgttcttattgttgatttttaatttattttggttttatcttgtgtgaacacacaacccttacactggtccatgtagacacatagcaaacgaagtaaacagtgagcttcacgttgtcattgagagagggggccccacagggtcaaggcatcttttgtttttttatcttgtcgttctgaggcttccaaaatactgagtagaacaaaaattccattgacccatgtgatattgctgattttgcttccaggcgaggctgttgtgacgtgaacattctgatacaaagaagcaccatttgggtattgacttaacgtagcaggctcagggtcaccttacctgggtctcagttccggccccatagctcatcagctgtgtgacattgagaagattacttaacctcttccagctgcaatttcttcttctaaaagatgtgtcgttgtgatgatgaaacgatattgtccagtacatgcatagtacctagaacgttgttactgctacattgtagcaatacgattgagcatttgctgatccctgtaaatattagttatgtaattttgatgataatttcttattaatatcaataaatatttctaaatacttgttactaaatggctgaatatgtatatatgtataacatatattatacagcttaaacattgaaaataatagattagaggaagtatgatatagattctgtaacctgatcaagagctatcttcatggaaattaattttctacctgcaggttaaataactctgaaattggtttctggctttgcttagagaaaggaaatattggttaatcaatcacaagttgagtgtatccatctttggtggtttccctttaaacaaaaagcctgttacggatcttgcttcctttccgtaggaaagttcattttagaaagtatattgagtcagggtttttgtttattttaatgatagagaattgaaaattggcattatcagatggcatgatgggttctttctggtgctgtttgaatcagggttagacagagactttgtgggactgttctccttcattgcattttctttatagttccatcccccaaagattccaggcatattatatctgtattgcacaattagatctaactgtattttgaatgttaaattcagccttaaaaaaaacctttattagccaggtgcggtggctcacgcctgtaatcccagcactttgggaggccgagacgggtggatcacgaagtcaggagatcgagaccatcctggctaacacggtgaaac

SEQ ID NO: 1412 - DNA, 9517 bp, Homo sapiens
gttgctgtcggagagagaaagccgcacccgagaggaggtgtgggtgttccgcttccatcctaacggaacgagctccctcttcgcggacatgggattacccagcggctgctaacccctctcctcgccctgctcccccaaaccggcgtggctccccgggcaccaaggagctgactacagaggagcaggatttgcacccctcgctgggcttgctttggcaacagagtgcctgacccaggtcaggattttcaagaaagacatgtctgacaaaatgtctagcttcctacatattggagacatttgttctctgtacgcggagggatcgacaaatggatttattagcaccttgggcctggttgatgatcgttgtgttgtacagccagaaaccggggaccttaacaatccacctaagaaattcagagactgcctctttaagctatgtcccatgaaccgctactctgcccaaaagcagttctggaaagccgctaagcctggggccaacagcaccacagacgcagtgctactcaacaaactgcaccacgctgcagacttggaaaagaagcagaatgagacagaaaacaggaaattgctggggaccgtaatccagtatggcaatgtgatccagctcctgcatttgaaaagtaataaatacctaacagtgaataagaggcttcctgctctgttggagaagaatgccatgagagtcacattggacgaggctggaaatgaagggtcctggttttatattcagccattctacaagctgcgatccattggagacagcgtggtcataggtgacaaggtggttctgaaccccgtcaatgctggtcagcccctacatgctagcagccatcaactggtagataacccaggctgcaatgaggtcaattccgtcaactgcaatacaagctggaaaatagtccttttcatgaaatggagtgataacaaagacgacatattaaaggggggtgacgtggtgaggctgtttcatgctgagcaggagaagtttctcacctgtgacgaacacaggaagaagcagcacgtcttcctgagaaccacgggccggcagtcggccacatctgccaccagttcaaaagccctgtgggaggtggaggtggtccagcatgacccatgtcggggcggagcagggtattggaacagccttttccgtttcaagcatctggccacggggcattacttggcagcagaggtggaccctgatcaggacgcctctcgaagtaggttgcggaatgcccaagaaaagatggtatactccctggtctctgtgcctgaaggcaatgacatctcctccattttcgagctagatcccaccactctgcgtggaggtgacagccttgtcccaaggaactcttatgttcggctcagacacctatgtactaatacctgggttcacagcacaaatattcctattgacaaggaagaagaaaagcccgtgatgctgaaaattggcacctctcctgtgaaggaggataaggaagcatttgccatagttccggtttctcctgctgaagttcgggacctggactttgccaatgatgccagcaaggtgctgggctccattgctgggaagctagagaagggcaccatcacccagaatgaaaggaggtctgtaaccaagctgctagaagatttggtttacttcgtcactggtggaactaattctggtcaagatgttctcgaagttgtcttctccaagcccaacagagaacggcagaaactgatgagagaacagaatattctcaagcagatcttcaagttgttacaagccccattcacagactgcggtgatggcccaatgcttcggctggaagagctcggggaccagcggcacgctcctttcagacacatctgccggctctgctacagggtgctgagacactcgcagcaagactacaggaagaaccaggagtatatagccaagcagtttggcttcatgcagaagcagattggctatgatgtgttggctgaagacactatcactgccctgctccacaataatcggaaactcctggaaaaacacattaccgcggcagagattgacacatttgtcagcctggtgcgaaagaacagggagcccagattcttagattacctctccgacctctgtgtctccatgaacaaatcaattccagtgacccaggaactgatatgtaaagctgtgctgaaccccaccaacgctgacatcctgattgagaccaaattggttctttctcgttttgaatttgaaggtgtctcttccactggagagaatgctctggaggcaggagaagacgaggaagaggtgtggctgttttggagggacagcaacaaagagattcgcagcaagagtgtgagggaattggctcaggatgctaaagaagggcagaaggaggaccgagacgttctcagctactacagatatcagctgaacctctttgcgaggatgtgtctggaccgccaatacctggccatcaacgaaatctcaggccagctggatgtcgatctcattctccgctgcatgtctgacgagaacctgccctatgacctcagggcgtccttctgccgcctcatgcttcacatgcatgtggaccgagatccccaggaacaagtcacccccgtgaaatatgcccgcctctggtcggagattccctcggagatcgccattgacgactatgatagtagtggagcttccaaagatgaaattaaggagagatttgctcagaccatggagtttgtggaggagtatttaagagatgtggtttgtcagaggttccctttctctgataaagagaagaataagcttacgtttgaggttgtaaatttagctaggaatctcatatactttggtttctacaacttctctgaccttctccgattaactaagatccttctggccatattggactgtgtacatgtgacaacaatcttccccattagcaagatggcgaaaggagaagagaataaaggcagtaacgtgatgagatctattcatggcgtgggagagctgatgacccaggtggtgctccggggaggaggctttttgcccatgactcccatggctgctgcccctgaaggcaatgtgaagcaggcagagcctgagaaggaggacatcatggtcatggacaccaagctgaagatcattgagatactccagtttattttgaatgtgaggttggattataggatctcctgcctcctgtgtatatttaagcgagagtttgatgaaagcaattcccagacttcagaaacatcctccggaaacagcagccaagaagggccaagtaatgtaccaggtgctcttgactttgaacacattgaagaacaagcagaaggcatctttggaggaagtgaggagaacaccccactggacttggatgaccacggcggcagaacctttctccgtgtcctgctccacttgacgatgcatgactacccacccctggtgtcaggggccctgcagctcctcttccggcacttcagccagaggcaggaggtgctccaggccttcaaacaggttcaactgctggttaccagccaagatgtggacaactacaaacagatcaaacaagacttggatcaactgaggtccatcgtggaaaagtcagagctttgggtgtacaaagggcagggccccgatgagactatggatggtgcatctggagaaaatgaacataagaaaacggaggagggaaataacaagccacaaaagcatgaaagcaccagcagctacaactacagagtggtcaaagagattttgattcggcttagcaaactctgtgttcaagagagtgcctcagtgagaaagagcaggaagcagcaacagcgtctgctccggaacatgggcgcgcacgccgtggtgctggagctgctgcagattccctatgagaaggccgaagataccaagatgcaagagataatgaggttggctcatgaatttttgcagaatttctgcgcaggcaaccagcagaatcaagctttgctacataaacacataaacctgtttctcaacccagggatcctggaggcagtaaccatgcagcacatcttcatgaacaatttccagctttgcagtgagatcaacgagagagttgttcagcacttcgttcactgcatagagactcacggtcggaatgtccagtatataaagttcttacagacaattgtcaaggcagaagggaaatttattaaaaaatgccaagacatggttatggccgagctggtcaattcgggagaggatgtcctcgtgttctacaacgacagagcctctttccagactctgatccagatgatgcggtcagaacgggatcggatggatgagaacagccctctcatgtaccacatccacttggtcgagctcctggctgtgtgcacggagggtaagaatgtctacacagagatcaagtgcaactccctgctcccgctggatgacatcgttcgcgtggtgacccacgaggactgcatccctgaggttaaaattgcatacattaacttcctgaatcactgctatgtggatacagaggtggaaatgaaggagatttataccagcaatcacatgtggaaattgtttgagaatttccttgtagacatctgcagggcctgtaacaacactagtgacaggaaacatgcagactcgattttggagaagtatgtcaccgaaatcgtcatgagtattgttactactttcttcagctctcccttctcagaccagagtacgactttgcagactcgccagcctgtctttgtgcaactgctgcaaggcgtgttcagggtttaccactgcaactggttaatgccaagccaaaaagcctccgtggagagctgtattcgggtgctgtctgatgtagccaagagccgggccattgccattcccgtggacctggacagccaagtcaacaacctctttctcaagtcccacagcattgtgcagaaaacagccatgaactggcggctctcagcccgcaatgccgcacgcagggactctgttctggcagcttccagagactaccggaatatcattgagagattgcaggacatcgtctccgcgctggaggaccgtctcaggcccctggtgcaggcagagttatctgtgctcgtggatgttctccacagacccgagctgcttttcccagagaacacagacgccagaaggaaatgtgaaagtggcggtttcatttgcaagttaataaagcatacaaaacagctgctagaagaaaatgaagagaagctctgcattaaggtcctacagaccctgagggaaatgatgaccaaagatagaggctatggagaaaagggtgaggcgctcaggcaagttctggtcaaccgttactatggaaacgtcagaccttcgggacgaagagagagccttaccagctttggcaatggcccactgtcagcaggaggacccggcaagcccgggggaggagggggaggttccggatccagctctatgagcaggggtgagatgagtctggccgaggttcagtgtcaccttgacaaggagggggcttccaatctagttatcgacctcatcatgaacgcatccagtgaccgagtgttccatgaaagcattctcctggccattgcccttctggaaggaggcaacaccaccatccagcactcctttttctgtcgcttgacagaagataagaagtcagagaaattctttaaggtgttttatgaccggatgaaggtggcccagcaagaaatcaaagcaacagtgacagtgaacaccagtgacttgggaaataaaaagaaagacgatgaggtagacagggatgccccatcacggaaaaaagctaaagagcccacaacacagataacagaagaggtccgggatcagctcctggaggcctccgctgccaccaggaaagccttcaccactttcaggagggaggctgatcccgacgaccactaccagcctggagagggcacccaggccactgccgacaaggccaaggacgacctggagatgagcgcggtcatcaccatcatgcagcccatcctccgcttccttcagctcctgtgtgaaaaccacaaccgagacctgcagaacttcctccgttgccaaaataacaagaccaactacaatttggtatgtgagaccctgcagtttctggactgtatttgtggaagcacaactggaggccttggtcttctgggcttgtatataaatgaaaagaacgtagcgcttatcaaccaaaccctggaaagtctgaccgaatactgtcaaggaccttgccatgagaaccagaactgcatagccacccatgaatccaatggcattgacatcatcacagccctgatcctcaatgatatcaatcctttgggaaagaagaggatggaccttgtgttagaactgaagaacaatgcctcgaagttgctcctggccatcatggaaagcaggcacgacagtgaaaacgcagagaggatactttataacatgaggcccaaggaactggtggaagtgatcaagaaagcctacatgcaaggtgaagtggaatttgaggatggagaaaacggtgaggatggggcggcgtcccccaggaacgtggggcacaacatctacatattagcccatcagttggctcggcataacaaagaacttcagagcatgctgaaacctggtggccaagtggacggagatgaagccctggagttttatgccaagcacacggcgcagatagagattgtcagattagaccgaacaatggaacagatagtctttcccgtgcccagcatatgtgaattcctaaccaaggagtcaaaactacgaatttactatactacagagagagacgaacaaggcagcaaaatcaatgatttctttctgcggtctgaagacctcttcaatgaaatgaattggcagaagaaactgagagcccagcccgtgttgtactggtgtgcccgcaacatgtctttctggagcagcatttcgtttaacctggccgtcctgatgaacctgctggtggcgtttttctacccgtttaagggagtccgaggaggaaccctggagccccactggtcgggactcctgtggacagccatgctcatctctctggccatcgtcattgccctccccaagccccatggcatccgggccttaattgcctccacaattctacgactgatattttcagtcgggttacaacccacgttgtttcttctgggcgctttcaatgtatgcaataaaatcatctttctaatgagctttgtgggcaactgtgggacattcacaagaggctaccgagccatggttctggatgttgagttcctctatcatttgttgtatctggtgatctgtgccatggggctctttgtccatgaattcttctacagtctgctgctttttgatttagtgtacagagaagagactttgcttaatgtcattaaaagtgtcactcgcaatggacggtccatcatcctgacagcagttctggctctgatcctcgtttacctgttctcaatagtgggctatcttttcttcaaggatgactttatcttggaagtagataggctgcccaatgaaacagctgttccagaaaccggcgagagtttggcaagcgagttcctgttctccgatgtgtgtagggtggagagtggggagaactgctcctctcctgcacccagagaagagctggtccctgcagaagagacggaacaggataaagagcacacatgtgagacgctgctgatgtgcattgtcaccgtgctgagtcacgggctgcggagcgggggtggagtaggagatgtactcaggaaaccgtccaaagaggaacccctgtttgctgctagagttatttatgacctcttgttcttcttcatggtcatcatcattgttcttaacctgatttttggggttatcattgacacttttgctgacctgaggagtgagaagcagaagaaggaagagatcttgaagaccacgtgctttatctgtggcttggaaagagacaagtttgacaacaagactgtcacctttgaagagcacatcaaggaagaacacaacatgtggcactatctgtgcttcatcgtcctggtgaaagtaaaggactccaccgaatatactgggcctgagagttacgtggcagaaatgatcaaggaaagaaaccttgactggttccccaggatgagagccatgtcattggtcagcagtgattctgaaggagaacagaatgagctgagaaacctgcaggagaagctggagtccaccatgaaacttgtcacgaacctttctggccagctgtcggaattaaaggatcagatgacagaacaaaggaagcagaaacaaagaattggtcttctaggacatcctcctcacatgaatgtcaacccacaacaaccagcataagcaaatgaaagaaaggaattgtatttaccttttataattattattagtgtgggtatggctaatgagttctgattcacccacgaaggttacatttatgctgaatacatttgtaaatactcagttttatactgtatgtatatgattgctactctaaaggtttggatatatgtattgtaattagaattgttggcatgatgacatttcatttgtgccaaaaatattaaaaatgccttttttggaaggactaacagaaagcacctgatttgcacttgaaccagattatagatttaaaagtatatgacatgtattttgtatttaaaactagaatagccagtatttatgttttttataaaactgtgcaatacgaattatgcaatcacaatacatttgtagctcccgagtgtcctaaagggagtgcacttctttgaagctggtgtgttaatactatgtaataaatggttaactttcaaatgatgctgctgccaaaattatattaatagtgagtttcaggcccctgggcattttgtaccatgtaattatcctctggtgatgctgtttctcgttagtggcagtagtgcctccgtctcctagtgataatgctccaagtctatgaactgttaaatcagcattcattttaagaaaagcaactttagtttcaaagatacttttaagcttctaaattgatcatttaaactatttctttaaataagagagccaaattagaggctcatactttagcttgtgaagaagataatgaattttttaaagggaactttctatgcaatgttcaggataaatcgatactgctggccaatcagtgtcatctcctgggtaaattttgatgtcgcattataaagacatgcataattgatggtttctagattatctagtccaaacaatagagtttattttttcttcatctgaaccaacatgctacagtagctaagaagtattaaaactatatacatccatataaagatgaaatatgaactatctcattagaagtcatagttgaccacagacatgttattcttctgaaagagccacattttggttttatttcttgtcacatgatttcttttcttgatggatgaaaaatatgaaatgaaatcttttatatctgttgcctagttttgtacatggatctcattttacaagagaatctctctgcta

SEQ ID NO: 1413 - DNA, 8088 bp, Homo sapiens
atgtctgacaaaatgtctagcttcctacatattggagacatttgttctctgtacgcggagggatcgacaaatggatttattagcaccttgggcctggttgatgatcgttgtgttgtacagccagaaaccggggaccttaacaatccacctaagaaattcagagactgcctctttaagctatgtcccatgaaccgctactctgcccaaaagcagttctggaaagccgctaagcctggggccaacagcaccacagacgcagtgctactcaacaaactgcaccacgctgcagacttggaaaagaagcagaatgagacagaaaacaggaaattgctggggaccgtaatccagtatggcaatgtgatccagctcctgcatttgaaaagtaataaatacctaacagtgaataagaggcttcctgctctgttggagaagaatgccatgagagtcacattggacgaggctggaaatgaagggtcctggttttatattcagccattctacaagctgcgatccattggagacagcgtggtcataggtgacaaggtggttctgaaccccgtcaatgctggtcagcccctacatgctagcagccatcaactggtagataacccaggctgcaatgaggtcaattccgtcaactgcaatacaagctggaaaatagtccttttcatgaaatggagtgataacaaagacgacatattaaaggggggtgacgtggtgaggctgtttcatgctgagcaggagaagtttctcacctgtgacgaacacaggaagaagcagcacgtcttcctgagaaccacgggccggcagtcggccacatctgccaccagttcaaaagccctgtgggaggtggaggtggtccagcatgacccatgtcggggcggagcagggtattggaacagccttttccgtttcaagcatctggccacggggcattacttggcagcagaggtggaccctgatcaggacgcctctcgaagtaggttgcggaatgcccaagaaaagatggtatactccctggtctctgtgcctgaaggcaatgacatctcctccattttcgagctagatcccaccactctgcgtggaggtgacagccttgtcccaaggaactcttatgttcggctcagacacctatgtactaatacctgggttcacagcacaaatattcctattgacaaggaagaagaaaagcccgtgatgctgaaaattggcacctctcctgtgaaggaggataaggaagcatttgccatagttccggtttctcctgctgaagttcgggacctggactttgccaatgatgccagcaaggtgctgggctccattgctgggaagctagagaagggcaccatcacccagaatgaaaggaggtctgtaaccaagctgctagaagatttggtttacttcgtcactggtggaactaattctggtcaagatgttctcgaagttgtcttctccaagcccaacagagaacggcagaaactgatgagagaacagaatattctcaagcagatcttcaagttgttacaagccccattcacagactgcggtgatggcccaatgcttcggctggaagagctcggggaccagcggcacgctcctttcagacacatctgccggctctgctacagggtgctgagacactcgcagcaagactacaggaagaaccaggagtatatagccaagcagtttggcttcatgcagaagcagattggctatgatgtgttggctgaagacactatcactgccctgctccacaataatcggaaactcctggaaaaacacattaccgcggcagagattgacacatttgtcagcctggtgcgaaagaacagggagcccagattcttagattacctctccgacctctgtgtctccatgaacaaatcaattccagtgacccaggaactgatatgtaaagctgtgctgaaccccaccaacgctgacatcctgattgagaccaaattggttctttctcgttttgaatttgaaggtgtctcttccactggagagaatgctctggaggcaggagaagacgaggaagaggtgtggctgttttggagggacagcaacaaagagattcgcagcaagagtgtgagggaattggctcaggatgctaaagaagggcagaaggaggaccgagacgttctcagctactacagatatcagctgaacctctttgcgaggatgtgtctggaccgccaatacctggccatcaacgaaatctcaggccagctggatgtcgatctcattctccgctgcatgtctgacgagaacctgccctatgacctcagggcgtccttctgccgcctcatgcttcacatgcatgtggaccgagatccccaggaacaagtcacccccgtgaaatatgcccgcctctggtcggagattccctcggagatcgccattgacgactatgatagtagtggagcttccaaagatgaaattaaggagagatttgctcagaccatggagtttgtggaggagtatttaagagatgtggtttgtcagaggttccctttctctgataaagagaagaataagcttacgtttgaggttgtaaatttagctaggaatctcatatactttggtttctacaacttctctgaccttctccgattaactaagatccttctggccatattggactgtgtacatgtgacaacaatcttccccattagcaagatggcgaaaggagaagagaataaaggcagtaacgtgatgagatctattcatggcgtgggagagctgatgacccaggtggtgctccggggaggaggctttttgcccatgactcccatggctgctgcccctgaaggcaatgtgaagcaggcagagcctgagaaggaggacatcatggtcatggacaccaagctgaagatcattgagatactccagtttattttgaatgtgaggttggattataggatctcctgcctcctgtgtatatttaagcgagagtttgatgaaagcaattcccagacttcagaaacatcctccggaaacagcagccaagaagggccaagtaatgtaccaggtgctcttgactttgaacacattgaagaacaagcagaaggcatctttggaggaagtgaggagaacaccccactggacttggatgaccacggcggcagaacctttctccgtgtcctgctccacttgacgatgcatgactacccacccctggtgtcaggggccctgcagctcctcttccggcacttcagccagaggcaggaggtgctccaggccttcaaacaggttcaactgctggttaccagccaagatgtggacaactacaaacagatcaaacaagacttggatcaactgaggtccatcgtggaaaagtcagagctttgggtgtacaaagggcagggccccgatgagactatggatggtgcatctggagaaaatgaacataagaaaacggaggagggaaataacaagccacaaaagcatgaaagcaccagcagctacaactacagagtggtcaaagagattttgattcggcttagcaaactctgtgttcaagagagtgcctcagtgagaaagagcaggaagcagcaacagcgtctgctccggaacatgggcgcgcacgccgtggtgctggagctgctgcagattccctatgagaaggccgaagataccaagatgcaagagataatgaggttggctcatgaatttttgcagaatttctgcgcaggcaaccagcagaatcaagctttgctacataaacacataaacctgtttctcaacccagggatcctggaggcagtaaccatgcagcacatcttcatgaacaatttccagctttgcagtgagatcaacgagagagttgttcagcacttcgttcactgcatagagactcacggtcggaatgtccagtatataaagttcttacagacaattgtcaaggcagaagggaaatttattaaaaaatgccaagacatggttatggccgagctggtcaattcgggagaggatgtcctcgtgttctacaacgacagagcctctttccagactctgatccagatgatgcggtcagaacgggatcggatggatgagaacagccctctcatgtaccacatccacttggtcgagctcctggctgtgtgcacggagggtaagaatgtctacacagagatcaagtgcaactccctgctcccgctggatgacatcgttcgcgtggtgacccacgaggactgcatccctgaggttaaaattgcatacattaacttcctgaatcactgctatgtggatacagaggtggaaatgaaggagatttataccagcaatcacatgtggaaattgtttgagaatttccttgtagacatctgcagggcctgtaacaacactagtgacaggaaacatgcagactcgattttggagaagtatgtcaccgaaatcgtcatgagtattgttactactttcttcagctctcccttctcagaccagagtacgactttgcagactcgccagcctgtctttgtgcaactgctgcaaggcgtgttcagggtttaccactgcaactggttaatgccaagccaaaaagcctccgtggagagctgtattcgggtgctgtctgatgtagccaagagccgggccattgccattcccgtggacctggacagccaagtcaacaacctctttctcaagtcccacagcattgtgcagaaaacagccatgaactggcggctctcagcccgcaatgccgcacgcagggactctgttctggcagcttccagagactaccggaatatcattgagagattgcaggacatcgtctccgcgctggaggaccgtctcaggcccctggtgcaggcagagttatctgtgctcgtggatgttctccacagacccgagctgcttttcccagagaacacagacgccagaaggaaatgtgaaagtggcggtttcatttgcaagttaataaagcatacaaaacagctgctagaagaaaatgaagagaagctctgcattaaggtcctacagaccctgagggaaatgatgaccaaagatagaggctatggagaaaagggtgaggcgctcaggcaagttctggtcaaccgttactatggaaacgtcagaccttcgggacgaagagagagccttaccagctttggcaatggcccactgtcagcaggaggacccggcaagcccgggggaggagggggaggttccggatccagctctatgagcaggggtgagatgagtctggccgaggttcagtgtcaccttgacaaggagggggcttccaatctagttatcgacctcatcatgaacgcatccagtgaccgagtgttccatgaaagcattctcctggccattgcccttctggaaggaggcaacaccaccatccagcactcctttttctgtcgcttgacagaagataagaagtcagagaaattctttaaggtgttttatgaccggatgaaggtggcccagcaagaaatcaaagcaacagtgacagtgaacaccagtgacttgggaaataaaaagaaagacgatgaggtagacagggatgccccatcacggaaaaaagctaaagagcccacaacacagataacagaagaggtccgggatcagctcctggaggcctccgctgccaccaggaaagccttcaccactttcaggagggaggctgatcccgacgaccactaccagcctggagagggcacccaggccactgccgacaaggccaaggacgacctggagatgagcgcggtcatcaccatcatgcagcccatcctccgcttccttcagctcctgtgtgaaaaccacaaccgagacctgcagaacttcctccgttgccaaaataacaagaccaactacaatttggtatgtgagaccctgcagtttctggactgtatttgtggaagcacaactggaggccttggtcttctgggcttgtatataaatgaaaagaacgtagcgcttatcaaccaaaccctggaaagtctgaccgaatactgtcaaggaccttgccatgagaaccagaactgcatagccacccatgaatccaatggcattgacatcatcacagccctgatcctcaatgatatcaatcctttgggaaagaagaggatggaccttgtgttagaactgaagaacaatgcctcgaagttgctcctggccatcatggaaagcaggcacgacagtgaaaacgcagagaggatactttataacatgaggcccaaggaactggtggaagtgatcaagaaagcctacatgcaaggtgaagtggaatttgaggatggagaaaacggtgaggatggggcggcgtcccccaggaacgtggggcacaacatctacatattagcccatcagttggctcggcataacaaagaacttcagagcatgctgaaacctggtggccaagtggacggagatgaagccctggagttttatgccaagcacacggcgcagatagagattgtcagattagaccgaacaatggaacagatagtctttcccgtgcccagcatatgtgaattcctaaccaaggagtcaaaactacgaatttactatactacagagagagacgaacaaggcagcaaaatcaatgatttctttctgcggtctgaagacctcttcaatgaaatgaattggcagaagaaactgagagcccagcccgtgttgtactggtgtgcccgcaacatgtctttctggagcagcatttcgtttaacctggccgtcctgatgaacctgctggtggcgtttttctacccgtttaagggagtccgaggaggaaccctggagccccactggtcgggactcctgtggacagccatgctcatctctctggccatcgtcattgccctccccaagccccatggcatccgggccttaattgcctccacaattctacgactgatattttcagtcgggttacaacccacgttgtttcttctgggcgctttcaatgtatgcaataaaatcatctttctaatgagctttgtgggcaactgtgggacattcacaagaggctaccgagccatggttctggatgttgagttcctctatcatttgttgtatctggtgatctgtgccatggggctctttgtccatgaattcttctacagtctgctgctttttgatttagtgtacagagaagagactttgcttaatgtcattaaaagtgtcactcgcaatggacggtccatcatcctgacagcagttctggctctgatcctcgtttacctgttctcaatagtgggctatcttttcttcaaggatgactttatcttggaagtagataggctgcccaatgaaacagctgttccagaaaccggcgagagtttggcaagcgagttcctgttctccgatgtgtgtagggtggagagtggggagaactgctcctctcctgcacccagagaagagctggtccctgcagaagagacggaacaggataaagagcacacatgtgagacgctgctgatgtgcattgtcaccgtgctgagtcacgggctgcggagcgggggtggagtaggagatgtactcaggaaaccgtccaaagaggaacccctgtttgctgctagagttatttatgacctcttgttcttcttcatggtcatcatcattgttcttaacctgatttttggggttatcattgacacttttgctgacctgaggagtgagaagcagaagaaggaagagatcttgaagaccacgtgctttatctgtggcttggaaagagacaagtttgacaacaagactgtcacctttgaagagcacatcaaggaagaacacaacatgtggcactatctgtgcttcatcgtcctggtgaaagtaaaggactccaccgaatatactgggcctgagagttacgtggcagaaatgatcaaggaaagaaaccttgactggttccccaggatgagagccatgtcattggtcagcagtgattctgaaggagaacagaatgagctgagaaacctgcaggagaagctggagtccaccatgaaacttgtcacgaacctttctggccagctgtcggaattaaaggatcagatgacagaacaaaggaagcagaaacaaagaattggtcttctaggacatcctcctcacatgaatgtcaacccacaacaaccagcataa

SEQ ID NO: 1414 - DNA, 35658 bp, Mus musculus
  misc_feature (11014)..(11033): n = a, g, c, or t.
  misc_feature (16841)..(17468): n = a, g, c, or t.
  misc_feature (34295)..(34632): n = a, g, c, or t.
  misc_feature (35541)..(35658): n = a, g, c, or t.
aacatggattttggatttcttaggagaacttagaagaatcagacaagatgagcatgcagctgtttcctggtgtcagaaagccgctgtggtctttgcatatttcgtcctctgcattttgccttaattgctaccaaatgcttattacagagtcctgtaatactgagcatgtaaggccagatgagtcaggtcaattaatctgatttgcttaaaactcattagtccgaactaatagttttctttctcttgcagcaaagaaatttgttcctgctaggtaaggtgaattcttgtgtaaagcatgctatttaatacatacattttcccctctgcatgtaggaaagcagtgattcacgtcctttccttgtgtttccacagcagctgccaaagccttcaatcgtttgaaaactaccatgtgccttcttacaacgtctaggttcaaaacaatcaggtatgacttgggcaggtcatgtgaatgagagaaaaatctctcttacacatagtgctcctccttgacaccctcaatcaagcctgccattggcttgagagaatccccatcttgatgataatttatagaaacttgtttctttctctccctctccctcccgccttctccctctccctccctccttctccttctgtctccctccctccttctccttctccccctcccttctctctctctctctctctctctctctctctctctctctctctctctctctctctctctctttcgctctccccccccctctgtaagtgaagcagcagacgttggtcttccttggatcattttacttagggatggtggtggtggtggtggtggtaagtctagacccatttagcaattagatttgtaagcatgaatctaagctagggactgggagagaccaggcctcttcctttattcctctgagataaagaactggggcacagactttataggaacttgcctgagtttccaaagctaccgtgaacaccagcagtagcaggatctggaatctgtgatcctcagtgtccccattgcttctgagagtttgcttgggaggtcaagtccttctaaataaagggttttcttgatgaagagaattgctggtgtagtgtggggcttagagaaggattgaacagaaactagatgtttcaatttgcctcttcggctcccttcccttgagtttcttcattagcatagtccttggtgatgaccaatatagttgaacagtacttagttaaagcccaaggtgcaccagagttcattctttgggttgtatattccgtagggttcaatgggtataactgacctatatctacgattacagtgtcatagagactagtaactgagtggcattgggagttcatgtctggagcacctccgagacagctgctagctgatgggtgtgctttgttgctgcttccagcatgcaggagacttggaagactctcacacttgcttgtatttgcaggaacacaaatgcatcgtgggaaatagaatgataagctgaagacagcaggaaatgaactgtctacagaatcctggttcctcttgcctgcttaaaaactgggatcccgactccatggatcaaaactgagtgacaaggccagccctctactagaatgactcagtttcctctttcctagttagtgacagtatgaagaacatgctgccacagaaggtggaggtgctctcttcaaaagagagtgaatggacgggggagagcgcgagctggaatagcagaatccattctgactcttagtcatgctagaatttgggaacagaaacagcgttttattgctttgtttctttctcttgttccccacacagtgtgtcaacagctaattccagtattgttgtcacaggcgtaaataatatttatcagcagttttgagcaaatgattttctatttctatcttgaaaaacaaaaaaggcagaattgccatattctcaggttatggcctaggagtgtcattacgggtacaaggtgcagttcctggtgaatataacatgttaagactgctaggcagacatattggctttatccccatgggattcagtggctgccgaagtattcttgaacattgtgttctgtgtcctggcactgaagccagcatgagatccatcattcttatgtcagctcaagggtcaaaaggacttaaaaaaaaatcagaatcctgtggcctatcacatggcaaaagttatcctaaatcttttttttaattagaaaatccctaaatctaaaattaatgttatatctgcagcccacttattttcaaaatgagaaattaataatcagtgtgaaatcctgagtatttaacggtagctggttttaagacatggtactatcagaagaatagaaagtgaagagagagtttagatatttgatccccccctgccctgccaaggtttttttttttctggaagagagaccatccttgaagctaaatgttctgatttaataaaagcataaatgataaaaagtacattttaatgtatttaagagcatgtcaaaatgtgaacatgctgtgattcctaaaagagtggttcttttacacgacaaacacgtgattcttataccttgtatctaattctaaatccacgatgaggtgtcaccctgtaatcaatgcagacaatggacttttaaagagtaaaggtgtccagtggttattctagttcatatgttctagaggaggggaaagctggtgaacacagtgattatgttatgttacagagaataaaactcctaagcaatttcatctgcaactggcaatgacatacacttggtctgtaaatgccagctctgttcctgccaaaagtgtcccaagttccaaattaacatattagagaaagaaaatttttgggaggtcctcgctgattggtggcggtggaaaagccaacagggaacaggaagtgtgataggcattaggatgagagaggagtgacagagagagagagagagagagagagagagagagagagagagagactgtgagaaactgcacaatgtaaatggttgtatattttgtatcagaaattactgtgtgaaatataagtgtggtctgtatctaagtcctgattgagtattttaaattatgatttaaaatattttatggtgtaagagtatgtatttatttaaatatgttaaacttattgtattcacatatgagtataatgttttgcaataaacgcgtttctacttatctttgtgtatctgagtcttcttaacattttaatgcatccagattaaaatctgtaccgcataaaaattacatcctaattaattaattgtgtgcacatgtgcttgcgtgcatctgaattgtcactgtgaatgtgtggaaatcgaaggacagctttgaggggtcagctctctctttacacaccacgggcttgcgtggcaagtgccttgacccaaacctccctcttttaaaatggaatatcaggcaaccatatacctaactctgcaacatttctattggcgtaagtgaaaccctgtcagttagcggttccttcacactcttttctctcccctccatggcaatgctaatctacattatgtatatggatttgcctcttcagcacactttatatacataaaagtgcacatgaccttcttcctagctctttttacttagcacactgttttctagggttctccatggtgtagcttgtatcagctcttcatcccacttacggaaaaattatattctctgtgctgattgaccagatattgtatctggaccactcaggccattgtcactgaatgtctttccgccttttgattactgtgaatgacgctgctagggaagccctgagggtgtggttaaggtgcaactcctccactgtcattatctggaggcaggtaacttaggaatcctgctctgcttttagagaaaccttccagctctctcccagtgaggctgctccattttacagtcacacctgccatgagaagggctccagtgtctccacattctagcttatacttacagtggtctcttgatgacatcaacactctagtgggtgtggaattatatacatctaggctcttgtatccattccaaaagataaccaaacattgactatctaaaagaatcaccaagcccaaggaaacaaagtctttgctgcatgacagtctcatttgctgtaattttaaaaagttcatgttcatttagttcattgggttcactgaagtttgaattatcccatcttagttagggtttcattgctgtgaagaaacaccatgatcaaggcaacttcttcctttttttttttttttttttttggtttttcgagacagggtttctctgtgtagccctgactgtcctggaactcactttgtagaccaggctggctcgaactcagaaatccgcctgcctctgcctcccaaatgctgggattaaaggcgtgcaccaccacacccggcaaaggacaacatttaactgggtccagcttacaattttagaggttcagtccattatggaggaagcatggcaatgttcaagcagacatgatgctagagaaggatgctgggagttctacatcttgattcaaaggcatccagaaggaagggtctcttccacactgggtagagcttgagcatacgacctcaaagtctacccccacagtgacacacttcttccaacaagactacacctattccaacaaggccacccctattccaacaaggccactcctcccaatagtgctacctaccgtgggccaagcatatccaaaccaccaaatcccccaagactagattcatataatgaggttcttcgttaccagtatatacattcttgctgctattgcaaaggcctacaatgtaggcctgtgggcagacgtgatctaatttgttatcattctgagctagggcatacgtttaacagtggtctaggatgctgatattcctgattcttacgctgtgaatcctgagctgaattgcatcactaagtctcctggtccttcacttgcatacatacttcctgtttttcagaaagcccagtcattgtttcagcctcctaagttattgacggagctgttacacccatgaacttacatgacaaacaccatgacatgtatgtgccaacacacacacacacacacacacacacacacacacacacacacacaaaaatataaaatagtaataacaataacaacactacaagttagcaggtcatattaattacctttgaaagtctaaaatactacagagataggcatggttatctgaatgagttcaagccagaaagaccagtaaacattccaacaagcaagactacttagactccatagattataaagaagcaagcaagcatgtgaagttgggggatatgttggtgagtttccagggaatgacaagcagtgggagatgggggtggattaagcaccaaggaactatgaaattacttaagaacaaatacattaaaaaatgagactagtaatagttactcctctgtagcattttagactttcttttttattattattattattttgttttgttttaggtttttttttccccccgagacaaggtttctctgtatagctctggttatcctgtagaccaggctggcctcgaactcagaaatctgcctgcctctgcctcccaagtgctgggattaaaggcgtgcgccaccactgctcagcttttttttttttttggtttgtttttgttttttgtttttgtttttcgagacagagtttctctgtagccctggctgtcctggaactcactctgtagaccaggctggccttgaactcagaaatctgcctgcctctgtctcccaaatgctgggattaaaggcgtgcgccaccactgccccattttagactttcaaaggtaattaagatgacctgttaagttctagtgttgttattgttgctactacattatatttgtgtgtgtgtgtctgtgtgtatgttgacacatacatgccattttttgtcattattactaactttcttacagtttaaatactattatgtcagtgacttcctccagattgcttttgaatggctgaattcaaactttatatgctgtcttaccctcttcacactttctactcaaggtatttctaggtcccccaacctctctaagttagagccctgggattttatttaggattttgctttcagaagagccattaacaaggacttccactagggggtgaacgaggaaagaggaaggagaggaactaagttgggtcaagtcttccagaaagctcccgaagttcaagagcaagtgaactagctctgaaataagtttttaatctatggtacgaccagggtcccctaccccatggtcgggagtttataaacaaaacaaggaacacaaaggaaagtggggtgggaagggagaagaatggaagggaagggaggagaaaaaaggggaggggaagggaaggtagaggaggggaagggtagggaagggaagggacgggaaggaggcataggtaaccagaaaggactaagaggatgtggggaagaatccagttgccattgcttcttttttttttttctattttttttttttaatttgggggattataatataattacaatatctctccctttcctttcctccttccaaactggggatatcctgagcagggggcatagcttctggtccactactgtgttcttggggcaaatgattgagcccagattaggaaaggggtggggagagagagatagagagagagagagagagaagagaaagaggaagaattgggggcggaggatgtgaggctgggctggagaaatgaaagaaagcaaaccccactggtgacattggcacattcttcctgagcgcagcacgccctccttgtgcaagaactctgagccccaggtgcaggaggctgaggcctgcagagagacttgcagagagacccagcaagccatggtgagcatcccagcctataagagatctctagatattcaaaattttccttggggttgaagaggcaggtggcaagggggcaagaagctatcatttctgcgtttaagaaatatagaaaccaacaaacaagaacaagaacaacaacaacaacaaaacccctacgcatgctgtctcaagaaaatgactctagactctttcttgctgattttctcccttggtgtttgctttgatggaatgctggaaggggcacagataagattagacctttgcggtgacacagagtgactccctgaggagtgatatacatccaaaactacagttttaagatgtgcagaaagcctatggctttgttgtttgagttattaaaaatatattgcttcttacttgaaaaaagcaatgcttgcctttcctggcttctggctacatcattctttcatatatttgaggtatggctccttcatgacccagcgtgaaaggcaaatgtgagtgtcactggttcattagaccccaagagcattaaaaacaagagcattaaaaaaattaagattctgtttgatttaaagctcagtcgaaaagtaggtacaaagaataccgaaatatcggaaaacataacattaatcatgatcaacaacctgggactgaaacctggaaggaaaatgaaataaagtagtgtaccagtgtgtaatgaagtagatgccataattttcagccatgacacccacccccccccccaaatagtttaccttggatacggttgatagtgggctgatgggctttatctgtgaattgaagaagtgccagggcactgcctcatggtgctataagtttgcagttcagagtttaaatattttgcacttcatttacaggtgtttccatggagatgtgagggtacttactggggctcgaggaacatcctgaagctgtgggtctggacactgctctgttgtggtatgtcctttgtttttggctaagccttaggcagtgattgttcttttcttaaatattcattgaaagtacatagttgcagggaatacaatcaggtagatggctattaattcttttttttgttccttttttgttttatttttttttgtttttgtattttttatttttggctattaattcttttaaggactctcattctttctctgaccttcagaacttttctgagtccccctaataccagcttagcattgacattctctagtgatgtgcccaaatcctgatatctacacaatagtcctctgttaggaaggagtacagttaattgacaaacctctaataaggcacgttatgcttattctacatttcattttctattaatagtttgctgtgcccaaaatgaacttccacagtccagagcgtgggctgcctgagggctggggttttgtttttattttaggggcttttgtgtctttcttttgatgttacatgttttatgcttaagccttagagactcttcatcaataaatttgaaccattgtctgagctaacttatgttagctctccttcttctctcacctggactttcagctcagaacaagtgaacacaccctctctttgtttttataaatttttctttgcttttgagagtttcatacatgcacagtaaagtatgatcataatgatatgccatttcccccttcaacaacaccatataccccccaacacccctcccaacttcctgtctgtctgtctttattccttttgtttttgataacctactaaatccagttagcactgctcataggtgtacgggtgtggaccatcgactggtgcatgaaaaacctagctgtgaccacaccttcaaaaagaatgattctccctcccccagaaactattaactgacaatagcccttcagtaaggggtggggcctgaagatcctctaccccatccacacttgatcctcctctaggttttatgcagctgcagaaaatcacaactgctacgagttcaaaactgcattaaccatgtcatgtccagaagacagtactcccatattccccaacactacttcccaggctttgtgtctcttctgcaatgagccttggtagatgaggggttaatatgagcgttccatttagggctgagtctctaattctcagcatttaacagctatgcatctctccactggctgctatctacttcaaaaagcaatttctctgacccaggtggagagcagctcaggatgattggcttaagtataaatatttggaaggtatttttgatatgtctttagagtactcaccttatgaagtaaaaactcagtgagctgatggctatgaaatcttttatcttactgtaaaatcatagctcacataggtcatgccattcttagaatggccagtgtcatcaaggtcactgtgcacaatcatgtgttttacttggttgcttcaaatcccttatgcctgaaggcccagttgttaattaggcactattacttaaatatctttgtatgtagaacatgataaaaccaattgtgtgtcttttgcatcatctttatgtatgttgttctttctgtactatgagtttagatacacaattggtctatgtattgaggctttcccagggcagcttcttctacaatagaatacattttatgttacaataaagtatttaaaattatgttaatgttctgcctgaccctattttattttacttaaatgagaaattttatatctgtactgtgacatataataacagtaacaaatattagcctttaggaagttatcccaggattaaaaagtatagtgtagattttaaagctgtattaagttattctttaattaattcttagtgacatacatttctaaagtaggttggataaattacacttcaaagaattttgaggaagatctttcattaaaaaaaatctgctaagatatatttatgtatagtagtcattgagtaaaaaacaattctatatcttttcaaagagagagagagtctatattctgatccaaggctgccaacagctaatttgggtgaccctgaactgctcacctgttctcctgcagtctttgtccctcatctctaagtggtgggcagcctgcacctgtgcctggtcctagaacactctatgagtcgtcatatttctgctgctgttttccagacttcctgatacaccatggaactcactgttggacttaccattattctgaaaagcccatgaactgggaaaatgctagaaagttctgcaagcaaaattacacagatttagtcgccatacaaaacaagagagaaattgagtatttagagaatacattgcccaaaagcccttattactactggataggaatcaggaaaattgggaaaatgtggacatgggtgggaaccaacaaaactctcactaaagaagcagagaactggggtgctggggagcccaacaacaagaagtccaaggaggactgtgtggagatctatatcaagagggaacgagactctgggaaatggaacgatgacgcctgtcacaaacgaaaggcagctctctgctacacaggtaggcagtgtctaggctcctacgctgatgtgggaccaccatagttagagtaataagactcattacccagaaactgctattctgggttctaaaacaatcctaactaagccttaagcatagcacctctgggcaatctgcaggtacacaacaactaaataacgttctatccaggttgtaagtgtgttatgtggggaacagggatggacagactgtgcctcaaggacagacaggaagaggatgctgaaagctaggtggtctttgagggcttttctctaacacctcctaatcatatagacaatttctgtgagttaattcattctaaaagcagacaaacgcctacagccaagtggctattgtatcttataaattaaaagtgtagcgtgcgttatgcaaaaatgttttgaatacttaagcaaatttttcttgttcattataatagtgtcaaacaaaaacgttctttgtgcaaagaagggactctggatgtgatcacattaaaatgtctttgtgtaatctgcttaaagcctcttgccagccagggtcttgcaatggccgtggagaatgtgtggaaactatcaacaaccacacgtgcatctgtgacgaaaggtattacgggccccagtgtcagtnnnnnnnnnnnnnnnnnnnnggtattacgggccccagtgtcagtatggtaagcttcatttgtttgtttgtttgttcctgctggtgttcattagacccataatagcttagcattgctgtgcagagtttgtgtcgtgttggctttgcttacggacttctctctgattctgcatgtggacgacacacctggttatcttcaaagcatagttcagaggccatttcttcccacggtatttctttggacccccaatacagacaaacagttatcaagtagcggaaacaagactcaactccatcgaatcctcataactcttctcaaccctgcttctctctccatgaaagtggtccagtgtgagcctttggaggcccctgagttgggtaccatggactgcatccaccccttgggaaacttcagcttccagtccaagtgtgctttcaactgttctgagggaagagagctacttgggactgcagaaacacagtgtggagcatctggaaactggtcatctccagagccaacctgccaaggtgagtgactttagagtggatcttcgttgttgggacaaaataataccagttgggacaaatcaatattagcagttctaagaaatgggaagttccaaacagaaagctaaactttcacaataatatcttcctgtaaagatttcccaagtcagcatgaagtttcaatttacttcacaaggggtttgaaatatcacaaggagaaatgtgttgggatttgtcaaaggtgagcaggttacagtaaaaaatggggtattgtagacccttactgccaaggatgtcatagtcctactgagcttgcaggattaagaactatgaggttggatagaaacaattctatttttccctaggagagtgaggtattgggaaggtactcctgttcttctatagacagatgtgacaaggaacagtaaaagaacgaacatctgatacacagaatatgtcagagttatttaataacaaatcctatacacttattttggttgggtatttctggagaatatggaagcaaatcatagattctgtacttatggaatatatatttaatagaaactatttatgttcagggatcaagtttgaaggaaaatgagatgaacaggaataatcctgtggtgagatcccctaataaaatacaggtcctttatttgcaatgaatggccacttggcatcttactgccagcactggaggcaattatcctagaaacagcacagaggaccactgctaggatggccaagaaagagagggtggagtcatcagagtcctaggaagtcactcagagatgcggtgggagaaccggaaatgagagaatacacatgtgcaaagagaaaggctccagctcagccaactactatggaaaggcgcatcaaatcttcagaatgagactaagtttcaaaatgcgttttgatgtgtctgctgcacacaatggaaaattggaagaagaagacaagtaatggctttaaggaataaagaactgaaacaaaaattaatttcagtattaaccaactggactagatctgaccaattcacttatctctgaaactgtgactcttccccagaatgttacctccaccacaccgttggactgccctttagtttactcccctttaaacatcgtgcttgctttcttgatttccatcatatcctttttctaactgtctattttgtttgttttggtttgggttttggtcttttgttttcaagacagcatttctctatgtggccttggcagtcctagaacttcctctatagaccaggctggcatcaaactcagagattcgaatggggtaggaggcatattccaccaccagctggcttctgattgtttggttgactatagtgacttcttctgggttctttcatttgtacttatccaagctcataaactcttagtctcagtatctgtcttttctattattacgacttggtttgtttctttcttcaaattttctgaattttatggatgtatatatacctatgtgatctttggattaacaaatctgtttttagccatgacctccaaatatgctaagaatgttgtttggatatctacgactcaagtgtctccagtcagtttttttttcttttttgtggctgtaattacattccatggaaatgacatttaatgtcatttgtttaatgtcaatctgtgaaaagaaatggtgtgaaactctgccaccctactccaatacttgtgtaagataacacttgataaatcaattttcaaaattttatttcttttatggggctgaagagatggattagcttaagtgcactggctgctcgtacagcagacctgagttctattcccagtcatcacatggtggctaacagacatctctgactccaccccagatgatacaatgccatcttttggcctcctggggctccaggcacagaaatagtacacaatatacttgcatacaaaacacctatacatgtacaattcaataaaataatttttattaattaaaaaataggcactatcacacttggatataatgcacaatgattatattcatccccagccccattccaatcaaatcctcataactcttctcaaccctgcttctctctccatgaaagtggtccagtgtgagcctttggaggcccctgagttgggtaccatggactgcatccaccccttgggaaacttcagcttccagtccaagtgtgctttcaactgttctgagggaagagagctacttgggactgcagaaacacagtgtggagcatctggaaactggtcatctccagagccaatctgccaaggtgagtgactttagagtggatctttgttgtggcaagcttgtgtttatagtctgagaatacaggggagtcttgcctagaagtctgtttcttctgttgctgtataatttaaccagagttgggttgtagtttgatgcttttcaagtgttttgttttgttttgttttgttttgttttgttttgcttttctcactaaaatgaaatgcaaaacaccaaaccaatccaaaccaaacctagctaaacaaaagcaaaagtctttgaagtcatctggcattttataatctgatttacagcaatacattgaagttatactctgtatctttttttttctcattgttatcacataaagccttgatgaaccctagttgaactttggttcctctccttcaatgacacccattttatgtggtggccaacttagcaccaaccagtttctttcaggggatttacaggtctttcttgattgcttcagttggtaggttcttaaagtcatcttttctttgtttttctccagtgtaagctctcaggagaataacaacttctgcaaaaaacaaagccccactcttgattgttttcatttgcaatagagtgggttttcatcctttcttgactgacagggtttatcacatatagatgatggaaaaaaaaacctggtaactctgaagttctggataggctttttacatttatatttatagttccctagtttaattctctaaagtaaaccaaaatctatcgttgacatcatggaactgaattgtaatgaattgaatcagtgataagcctgcttcagggagtaggggtgtctgtcaaagctgcttaaggaaaaggctgaaagctttgtgatcactgagcatgtcccatgccagagtctgcctcctgagtctaagactgtatggtatgacatttccagaagtcttgcatgttaccatgctggggcagccttttggaatggctaccctataccaccatgggctgccaatgccttgttgtctctatctctgaccagttatccatatcacaagtctgaaagtacggtccaaagtaattcccacaagttagaaatttctagatttgtatggatggtttcattgataaattctggaggctctggtcaaaaccatgtaatgggggctggaaagaagaatcagtgttttaaagtacttgcttctctcaaggacctgggttgcttcacgccatgtggctcattaccatgtgccatttcctttccagataattctgtgcagcacacacatacattactcacccccataaaagttaaaaccatactgaaacaaaaagctttaggattggcaatgagactgggagggagatgggagaggctaaagggggtggtgcaaagatgaccaaagaacaacatgtataccatctctgaaaatgccataatggaatccatcgttatgcacgattaattaatggtaataagaaggtgaaaactgcctttggtcctgactgccctgttgtgttatgtcctccctgaagtgactcagtgcgcacctctagcagcacccaatcagggcacagtggaatgcagtcactccctggccaacttcagttttacttctgcttgtaccttcacctgctcagaaggaaccaacttaattggcaagagaaaaactgtctgcagatcatctggcacctggtctagtcctagtccaatatgtcagcatgagtaattttactcagaaatactgaaggcttaaagccggagctgatcagctagcagaagacagaaaggagataacaaacacttaagtccctttccctcaatacatgtggcctaagaaacaaatggatatgcagttgtgcactataaaatccttgcctgttcttaggctttcctttcatgataattattttctttctcaactctcctattgctttaaagtgtaaacccattgacatatttatgtatgacccatgtcttctattctgtcacaagtttatttccccgttaatcttttaacaatgcgtcctctaagctcactagtgactccctaactcccaacaagtgaaccgttctctagtaccccaagctgatgtctccccaatctgtctgtgcatgggaaggaccgcagcttcctcatgtgtatacaccgtgcatcagagtacatgaaaaaaaaagtgacaaaataattgtttgttaagttagcatatgaactagcagctaccagtgtctgcccaatgtaaaccgtcttcacagaaaatagaagcgataggccctgaagaagctgtcaaagaagatcgctgggtgtttggagtagagtgggggcagggagcaggaaggtggtaacgaggacattacagcaaggctgtatgccaggttcatcaaatacatttcctttccaaccgacttagttttcatttcctcatcttcagcaaaccaacagttgccaatatgtaaaagtagattccttcacctggaggtatcagaagatagattttttttttcaaattagtacttttcaataagagactgtaagccaacccagtttgtatatccaaagggtagaaatggccttttagttggtttgagtggaaatgaagggcaggggtccaactgcattgctatatatcattgcagaccctgggcatataaacaataagatttttgtgtatctcattcaatgtaagtagtagaagcagcttcctttgatcaacaagttacccagctcagatcgctgacttcattttccttacagtttagtaagctttctagttcttctctgtgctcagatatcaacctttaaacaagaccaggaaggaaacaccatgatgactacttcttgtttgagttttgagatacatccccaggacctccatgagtcacagatctgagaactgtggtcccataggcagaaggctagaggccagtccagctgtatacataccgtgggccttcccgtgttattcccctcatctgttacatatgttactgttgggggacatcagaagaccaaaatgatgactatcatgagtttgagtaagagaataattctgtggctcatgccatatgccttannnnnnnnnnnnnnnnnnnnnnnnnnnnnnnnnnnnnnnnnnnnnnnnnnnnnnnnnnnnnnnnnnnnnnnnnnnnnnnnnnnnnnnnnnnnnnnnnnnnnnnnnnnnnnnnnnnnnnnnnnnnnnnnnnnnnnnnnnnnnnnnnnnnnnnnnnnnnnnnnnnnnnnnnnnnnnnnnnnnnnnnnnnnnnnnnnnnnnnnnnnnnnnnnnnnnnnnnnnnnnnnnnnnnnnnnnnnnnnnnnnnnnnnnnnnnnnnnnnnnnnnnnnnnnnnnnnnnnnnnnnnnnnnnnnnnnnnnnnnnnnnnnnnnnnnnnnnnnnnnnnnnnnnnnnnnnnnnnnnnnnnnnnnnnnnnnnnnnnnnnnnnnnnnnnnnnnnnnnnnnnnnnnnnnnnnnnnnnnnnnnnnnnnnnnnnnnnnnnnnnnnnnnnnnnnnnnnnnnnnnnnnnnnnnnnnnnnnnnnnnnnnnnnnnnnnnnnnnnnnnnnnnnnnnnnnnnnnnnnnnnnnnnnnnnnnnnnnnnnnnnnnnnnnnnnnnnnnnnnnnnnnnnnnnnnnnnnnnnnnnnnnnnnnnnnnnnnnnnnnnnnnnnnnnnnnnnnnnnnnnnnnnnnnnnnnnnnnnnnnnnnnnnntcttagcactacaatagcattaggaagagagtctatgattgtctaagattttcgaacatctctttaagagtcataactttccgggtgttgacatgtggttgcccttgggagaaatccttgtggattctctctagaatctattcactgaggtcaccactgtaatctagtataccatatatatgtatgtgtaaacatatacatatttaaacatatgtgtgtttatatttgtatgcatacatatgtagtgtacacacatatacatatatagtgtactaggttacagtggaggatatatacacatcctaatgatatgcatacacacacagacacatatacagagagagagagagagaaatacacatacatatatccaatatccaataaggcagaaacctgaagaaaaaagggaaagggaaaggagagcgtcctcaaaatcttattctctatcatccaggaagtatataaactctgcacgaggacagaacattcttcttttgcccccttcctccctcctgagtatgcctttgccttcaggtcggaccaacgcaccagccacaggcccacagtctgctgcagttttgaggtgtgcactgccacatttgtccacgtttatctagcagatctactcaaaactgtaagattcacataccccggcagctttaaagattcccccgtattaaggtcaggtactatgagtaacctttgtgactcctttgtgctgcttcctgtggtagaagctgacggccacttagatttcccttccaccagactcaccagtgcacgttgtgtcacccagctcacccacactggcaactgaaagaaaatcgtctacccgtctctgacaatcttcccaccatgatttgatctcctgtccaaatttaaaaataggaggtgatagactcattttccaccaatccataagataatagaggatgcgctatgtaggaacagcactaactataacgtgtcagtactgaacagttcaaacttttcctctattgatggaaattccacggaccttggataccgccatcacacaggatactaagtatcgcctacggcaccagaacaaagctgagattgacacttttcttcctcttactgagacttcaaaacctcactccaactgtcttgctgccttgggtggggcaaagaggtcatcacacatgctccctgagtaaggtggccattagctcagtgacttcaaggagtaatgaggacgacaaggactcccaaatttcatctttttcagaggcagttgtaaccacaaaggaatttagtcaaagtcacccgtatttggtgggtgctagctggttaaggctaccttatgagtggggaggagaaaagctgtaggttgtttttaaagtcttaactttggagtcagtcatttctgtagacgatctcaaactgataacaagaaaacggcatgcccctgctgtgggaatctgagtagggcaaacaggaaacagataacgggtacttgggctagtggcagttatgccaccaaagagagtagcggttcccagagatcactaactctggagggaaaactcggtgtaactatgctgtgtccaatggtcttcaatcatgaaacagccactcatctctcaagcttgcaagggaatggctttgtcttccaaacattttagccataaattgactctttacaacatgaatcatgtccctttttttctatagagacactgatctaggtccctgagataaccctataggtgttcaatagatatgttgataagaatcatagtgaaaataataattctatatccatacatattacgtacatgttatagttttattgggttcatcagactggaaaggggacatgtgacaattcagagtatgaaggccaatggggtgacaaagcattcttctctcaggtggatgctatgacctggtgcaagggctgcctatgccctaatggtcttggcttctggattccctttaactcttctcctgggtccacaaacaaggaccctggccatgtgctctggtagaaacacttggtactcctagcttttctcattctccaaggcaatggcattttttttaggccaagctctaaaatctctttaagcaggagctcaaggcagaaatggctctttcctctgaaatagcacccctaaaaagcacttgctttcagggttacaaggcaatgctgttcctcaggcggaagaaatttccacctgacccaacacactggtttagtacagaacatgaacttgaatgcattctctcttagttctcttttcttcagaaagacacttcctcagtaggacaagacactctctcagtaggacaagaaattcccttagtaggacaagaaaatcccacagtaggattctgggtcttgtttacctattgtcattactttcattgttccttgccatatacatatggcaagaaatctcagaaaaggtagtgtgtgtgtgtagacgtatatatacacatatatttatttgtgaagatgtacaaatggactcaaacttgattattctacctaatctgtatatttggtccatatcatctacaagcaaaattttgaaagactagcttttatagaactttaaaatatcaaagacacaattgagtactgtctattatgtgccaagcaatggcctaaacattttaaataccgttttttttaacccaacaatgaatttaccatctatgtgggacaattctagactagcagtttacagccactgaaaaacaccaaagccacccctctctcaaaggattctcctttctcagaaagctttctttctgtttctttttcttctgtttcctacagacctcatttcttcacaccactagttaagcaatatttaaataagaatgtgttttggttcacaaaatgtactttgtatagtcaactaaaattacccaaagagtaagttagaggagagtcccaactgaataagcacaactaagctggagctgaggtttttgtttggacacagaaatgtgggttccagagttctatgcatttggtggaagtggttttcacacctagttccatgtggcctgttcaaaggggaaacagaagtatttatgacatatgaattgtatataagattccatatgatgtatgaaaatatgccgctcaaattggattgcatgatcctcactgattcctactaataagaccagagccaaactctcaggactcacataagagaagctgagagacattgaagtcctttagggaggggctggtaagaggatgagctgtgcctgggacactgggtcagaccagtagggagttcagccaaggctctggctttatgagcatcacagcaggtggagtggagtccccagaagcaggctcatcacactgttctgctacagctctaaacggttactggtaccccagatccacttagcaacagatgggtgtccacttaccaaatgcacaatgtatttccaaagacagttttggaggtgggcataccctttactttaaaaaaaaattgaaattgtttactttttgatgatactttttttttattcttttttctacgtttaggcaagaaatctcaagaaaggtaagtttttcaatgaagaatttccacatctgtttgtttctactttccttagggtgcttcctattatagatagaacacaaaccccgcagtagttatttacctgagcgcctcatacaaatagcatttccagataaggtagttgagtgctagctgccattaaatctttgtgactttgatgctagtggtctgaaacagatggatgtataatatgcctattaagaaaggagatttcatatggtgggaatgtttcctggtagtctctgaattttccttgagggttagaagcatgctgttatgttttttcttgtcttagcttacaggaccaacgtctaacaattgagaaacattcaattcaacaagcatttccaacaactaacatattgtaaaaggaaactgtccaggtgcaggccatcagtcttaacacagaagggtaaatgactactctaatgagtgctggccttcagaaatgagaaagagcagtggagcatggaacctacccaccacttccctaaagaagtatttgccccagttggttctcaacactgcagttcttccagtagagtaataatgtagattgttgagacaagatgcagacacatggaagttcctggcctatctggcagaaatgaagaaagggaggatgaaaaaggtggccagagagacagatggaagaggatgaaaaagagctggggtgacaagagtgggaaccatctcaaatgcagccagagtagccatcagatttccagagggtgcattaagggcatcagtgggaaggctatttagataaagacagaggtcagctggagtaaggatgaggaaccatttaggataatcatctggaagcagaatgtgttctgctctcttgagaatttgccacaaagagtgggagagtggtggggttgaggacatgggctcagtagagtctttttactctgtttctattgctgtaattgtgtagataggacccaagtaagaaaagggtctctctggggactggcctccctatctctgtagcaggaaacccacaggatgtaaatatttcttctgtgttcccaccagctgagtgaaagttcttttggcatatcctacccagagctgtgttctggccgcagaaacacctgctttgattgctactgcacggaagtggttcacttcatttcaaggatgcggtggccagcaagagatgctagtcaaaaataattagcataaaattgtctaatagatttaacagtttgttgacttttttgagtaattgacaattactcaattaacttttgtttattgaacgtttttttttattagaacaacactaagcttaactgagacactcagagcaatgagtccttgactctaacttcagggaaattcttatctaattgtggaatgaagacagaaatatttagaagtacagaacaatctaaggcagaaatggtcatagttgatgaattttgtaccgatgagaagaaaaatcattgcaagaaaggcagaatctgggagagaaccttcaaaaagttcagactaggaaggtaactcaaacatgggcatgagaagatgcgcagactttcctagagtccctggtctactgagcatctgggcaatgaaggcgatcatcctcacaccagcacatggctttagcttacccaccaggtgtactagaacttggaagctgattggctacctggagttaatctcactgattaactaaggtgataccacttcatacatttttaggctcgaaagactgaggacatcaccttaaaactgactttgtagttaggtaaataacttacccacaggccttgtgacagtgatagttacagtaataaatagtagataaaaacaaacttttatcaaatacacattccatgttgcatactgttttaagtgttttgagtcttaaatggttagatgttgtctgcaatcctgtatagatagggagtgttgttatccttaataacagtaaagaaacagaaggggaaacgacagtggcttaagggaagtcactggaaaaagggaaaaagctgaaacttgtaacaccagcatccagagacagtatccctgttactcgtatgattctagatccttgatttacttctatgttaggggttttactaccagagcccctcctcttccagtaaaatgacttattttcacactaaaccatggtgtgatggcactgaggaagggtgtggtggaagaaatagggtgtgtctctagaacaagccaaggggggcatgaacttttttttttttctaacttaagttgattctcacaggtctttgttcttgttcctattagtttttggctgatgaatgactccttgggcatttgtggttttgattcttgctggttattttgactcttctgcaaactggttctgtttatcacctcatttggtttctggtttctaaattctacctgggtaaaagctacacccatgatacacaggatacgatgccaacctcagaggagagggtatgtgcgagattctgctttcagaaacatttttatttctacactggcaagcaagtttgcagctgccacggtggtttaccctgacagttcagaacgagaccagagcctccgaatctggttctccttttgaaaggtgcaaaggcacagaaatatggttctcctccaccctttccaggaatggcacagttgtgacatagaacacagtggcacctatttcatgaatataaattcgtccttatctctctaaaccatactccaccagaatctcaaatctggaaccaataccactctcttcctgagtttttattttctccgatctcacattttatctcctacttccccacctctccactgtaaaatcagcatgcagtaacctccacaggttccacatggaaattagcagtattgcagaactatgaccagatgcgatctgggggccagcactctgaacatcatacttcttagagaatcgggacttcaggctgaatcaacgtttacattaaaatatttatttggagagaggggctggagagctgactcagcagctgagggtgtgtgctgctcttgtaaagaacccaagttcagtccctagcatctgcactgagtggctcacaactgcctgtaactctggctccaggaaatttgccccctagaaactgtaaccaagcaacttcagtcatgcgcacgggcacacacacatgtgcgcatgcgcacacatgcgcacacgcatgatgaaaaatcaaaataaatctttaaaacgttggcttggggatactacttgactgtgaaaaatgttgctgtaatgtctcttccacatttcttttaaaacgcttcacaccttgtccacgatctccaactagaagccttccgtgctctcttcttcacgttagtggctctttacctcctctgctagcacttcagtgtttgtggtttccttgcctctgtcacctagagaatgttcacctgtattactaacaaattcgtttttaccacttttaaaagctccttagtttaattttataatctgttgcttctctttcaggatggatgatccatactgattcatcctttgtgaaaggaaagccatgaagtgctaaagacaaaacattggaaaataacgtcaagtcctcccgtgaagattttacacgcaggcatctcccacattagagatgcagtgtttgctcaacgaatctggaaggatttcttcatgaccaacagctcctcctaatttcccctcgctcattcatcccattaaccctatcccataatgtgtgtctatacagagtagtattttatcatcttttctgtggaggaacaagcaaaagtgttactgtagaatataaagacagctgcttttactctttcctaactcttgtttcctagttcaattcagcacagaagctaatgccaaacacagtgaaaatatgatccatgagtaattggaaactcagactccttgcgcatagtacgtaccctatgtaacatcgacaaaaatctttcatttccacctccaaagaacagtgctctattcaagttgggaaagtcctacttcctctgtagacccactatctgtgagtgacagccactgtagctgttcacattaaccttccccatctccttttcctaggagaataattccacacactgcaccccatgatggccaccaaacatcaaagaagggaaaatctcctgcattgagttttagttttgagttttcccttctctttattagatctctctaggttccttgaagtcagtgttctgatgattattaatagttaatgataacacaacccactctcttggagctgatgttatgaagacaacaggtagaaaaattcctgggctcaggctggagtgacacccttttctttccctaacatcttctactcagatacctaaatttaagattcaggacagctgtccccaactcttaccatgtcttttataacttgctccttaacttgcccaacctgtaggctatctcattttctcgcttcactctgcaaggtttataacatgatgaatttaaatacagcctgttttttgtttttttttaaatgttacttagtctatttgtataccagaatatgtgttgtttttttcctagataaaattgtacccttcttgaggggagagactgtgtcagatctcaggagttcctagtttgttaattgacccttggtagatttgtctgactgcagtcagtgaatgaagctgtgtgaggagatttctgagagcttgtgagaaaacaccaagcaaacaagacgagcgtcttctaatctctgttcctctgtaacagggatgtgttctcggaatggtcttttgtgcccctccgaggtgtaaatggagtgggtttgcttcagattatccatcagttaccaatagtatttagaggatgtttccaagaacaggctctcctcctgactgtctatggcttgaactaatgtgaccctaccctcagcactgtacaagctgaaactcatgtgactttgcctaaacttatgtgaccttgccctcaggactgaatacagctggaactcatgaactttgcttatacgactttgctgaggcaagcagaactctgtgagttcaaggctaacctggtctagatagagagttccaggccagccagggctacatagtgagaccaaacaaacaaatggtgagaaataaatgaatgatagagaaagggaaggggagagatagagagagagagagattgagagattggaattatttcccatttcataagtaatgcagtttttatgcacattttacatcttatgtgagcattttttaatgaggaccatggtttgtttgtttgtttgtttgtttgtttttttaagtcacttctgattctattgcaattgcaaagccctttcatcctgtgtgtctaccagcaggtgtcaatcatgctcacacaccttagggttcatcctttggagaagtatagtgcacaagaacagactcaagagttcactaccctgtctgatgcttattcaggacaacagaaatcacagacacaattagatcctagataaggcgtcaggagaaaccaggttttttaaagtagagacaaagttttgacaccagagccagcagacaaatctcgcaggcttaaacaaaagccaagatggaaagaccatcacagtgctctaaagctcatgaagtgtgtactatgccatggtctttggaaagcaaaatcacagatgggcagaaccacaacagcattctaggaaaaaaaaaacctatatgatggtttaagaggggagagaaaacagaagcaggggaggcaagccattcaaaggcagttctcctggctcagcaacgatgagccaggaaggtccatgtgggcatcccgaagcctttgttctctgactaatgggagggtggagagtgggaggaagagtaccgagctcttagaaaggaaaacataagacaaagattctggttaaatatggcttatgcaaatcttcccttattcaaagatcttgtaggaaagtccctcctctgttatttttcctccacatgaatgtatctcctttattcttaatacaggattgagtcaaggatgtaacccaaatgcctgtaagctcacaaagacaactggagaagaggagcaatgggaaagggctccaggtcggaagtgctctttaaatgagggtggtgatcaattctacccacttacaagaaaacaagccaagtttttgaggtttcataaacacagtttaagtagagacactgatacagactggtcagcctctgtcagggtgcagggaagctttcagcaactcttcctcattgggctatgttggcctgtgaagtcagattcatagagattttgagcgtgtaggtagcgtgttggatgatgcactacttgctgtggagtatgtcataaccttctagatagattggctccccttagaaagcatctagagttgtcatagttttctattatagacatacttattaagctgcagagtggtgcttccatcttaatacttaagtaatttaggaaaacaggaaatcatacatggtcaagctatgctctgtgactttaaagactcctgctcctcctcctcctcctcttcctctccctccttctcctcctcctcctttcataagaagctcttggggctgatggtgtatatgaaccagccacaactcagcaactaaggaataacaccagctgttgagtaatgtttctattagtacttctgtccccaaggagaactgtttggagtgatttttctcttgctgatagcaataataaacaaatgctttgggttttttgttttgttttaagatttttcatcctgataatagttaaagtctggagattagaaaccatggcttcttacaccatgcagtgctttcaagggctagctcatgctgcagaagaccagagcttcactggagagtgacacgtcaaaacacccttgagcagcacaagacctctatctcttgatcttttgtgtgtaatgggaagggggaatacctagaacttatatttctgttttctttcagtactgggaattaaacaagagcccttgtgcatgattgacaagtgcccttccattaagctgtgttcctcaggctagttttaactcctaagaactccgtgacttcagatctccttctcatgcttttgaagtttaccagcaaattaagcaacactgtggcttccctgtgccatgtggtttgagcaagttactgacaccctgtatgccaggcttattatcactaagtggtggacagtttagcccgacttttcgtgttagctgtaaggactaaataggcaaatacatgcaaagaacttaggaagaaactggaaaatagtaagcaccagataaataacagctggtgatgcagtgaatatcatctttagtgtcaaagatctgtgtttgtggcatccaagagcattgtggtcttaggtacatgtataagagcattgtggtcttaggttcatgtcttgggcttctccactatcctatgcaatatcccaagacacaaggccttgtgtgtatcctctcccaggaatagtaaaaagcagagagagatattccatgtggccacactggggataggaacaaagaaaggggtccagtgaccccaagcccatgtttcacactactgacaggaactctattcttaagcagaaaaagaactggagtagaggggcaagaggaattaaatagtctctggtaaagtcttgtaagactatttctctactcctgcacccaacccaccatcacaggtacctgtccatcctgtaaggttttgttctaatgggatttgaggtgaattgtgagtcacaatgaagaatctatgatttttgttcggttgtttgtttttgttttattttgtttgtggcaaaagtaccttctacatgcctaattcagactcaggcttatttttagtgcccagattcttcatttgtaaggtaggattaataatagatgcttttgtggatagtggttcaggcagagtctcttaagtgctcaaagtgtgaaaataaaagactgtgaatgctcagccatagatgggacttctgcatcacacacacacacacacacacacacacacacacacacacacacacacacacacgtacatatatacacacttacacaaatgcatgcaacgcagatatacaagcatgctcaaacatgagtacacacacacacacaagtacacatgtgcacacgtatgcacacaaatgcacaggcatgcacatgcacactcatgcacacacatgtactcacacatgcacaacccccaggctcagagagcattacagaagaaaggtagaaagaatgttaaagccagatatgaggaagaatattgccctctaacataacatggccattgcattcatgaactgacagcagctgtggctaattgcccaagtagcaagccaattccaaattccaacatggagacaagaggagctcctgagacctctctgctagctggggagctattggcaattgatggctactagagaagaaagcatcacttttcgggggttcaggaaaggtggccactggctggttgcccatgccccaggggatgacccctcatccacacacaacttggcagcattgattggacttggtggattactaatacagaagacctgaagctgtaaataagacagctgggaagatgacttggtgggtaaggtgcttgccttatgactctgaggactagggctggcatccctagaaccaacattgaagctggagctcatgatggactgtgggtgctatgacccctgggtaggacccagagagtgcctatttctgctggcataccatgtgacagaaaatagaggatccaagcacactagtgaaaccttagattcggcctggcacagggcagggactgcttccctcaggtgctggcagcctggcactaacccacagtgccagtgggatagttggcttttccagagctcatgttgattccccattggtccaaaggcagtatttaaaacaaaacaaaacaaaacaaaaagcaacaccaataacaaaaaaccataataacaaatgctcgctgcttcacaatacagtagatttgcacctcgatgctgatctctggagtttatttccccggttcgtgactctgcctccctcatcccctcttacatccctgtttccacagtaaacactgcacatacaaggcagaaacaggaaacttctccatccagctggctagctagactagcactagtattaagctatgaattcagcaagagactgcctcagtatctaaagtggggagtcactgatgaagccacccatcttatcttcaatctcagatctctacatgaatatgcacacacatacaaacattcatacatacttgcacatgagcgcatgcacacacacacacacacacacacacacacctgtaaaagtcaaataaacaaatctgttgaatgttcacttctctaagatactcctgaagaaataggaaacccaaacatctcctgtattgaagataggatacattttacaaagcggggtagtggtccacacctttaatctcagtgctgcagaggtagagccagtgcttaatctcagtgctgcagaggtagagccaggcagatctctgagttcgagggcagcctggtctataaagtgagtcccaggtaagccagggctacacagagaaactgaatcagaatgttaaagtgcttcacaacagaacctgctggccttcatttgtacattgctccattctttgtcaaaactagagccaggctttttttattcttttctttttttatttaaaaaacaaactttttgtatcaaatggagttacatatctttcccgcctctctttcctccctttcacccctcccagctgcctgtccttgaagccctgtcatatccttcaactctcaagatgatagattctttttcacagaacattattgttacacatatacagtttaaatctcaggttcatcaaagaacttgtgtgtagcagccaagcttttcccataaagaaaacaacagaaaatagtcttccaagtattctttacacttatagacacgaaaaaggaatattctccaagtattatgatttgagaacatcttgattcacaaaccaggataaatacttatcaacaaataaaaattccagactaacctctcttgtgagactatatgtgaaaaatctcaagcataatattagcaggccaaatatactatccaataaacatatataacatgatacccaatttatttccatgatgtaagagtggaatttctattacaagatccataactacaaataacccatattaacagagtggaggacaaaaccctcatcaataatcaaaaaccctcatcaataatcatcaaatgctctcccaacatgcctccttcccttccctcctcctttgacaggtgtcatggctgcactctgctccaaagaccacccttgctactcctctagcctttcatgcataaacaatacccttccttagttcgtgcgttttgggaaacatattaatcctcactgcttctgtcccacattccattgcatactagagatctggtcagtgcattacccagaagtctctgctcctgagcctgtgttttagacacaatacagcaattacctttccgtgaagtctctgcctgcatgtctgtcttctaatctttgggttcttgtcagctcaactcgtgccaatctccgatctctggatactgagcttgggatttgaacagaaaatctcctaaatccccaaatttagataaccccaaattctataactgtgctttataaaagtcagagttcaatcaagaaacaccctgatccaccaattcaggtcttgcagattacaaaacctttccactcaccactgcccttcattagaataacggtgcatacagcaacagaactggagccaaacccctacagtgaactgcaagatcattctagaccttcactttctccaggcacagttcttcctgaaaacagcagcagcaataacaacaacaacaacaacaacaaaacaacaaccactacaaaaacaaaacaacaaaacaaaacaaaaaaaccaaaaaccaaccaaccaaccaaacaagaaaaactttttaacattcagttagcctgacatccaggaagttcctttgactttggctgtggcgatccattgtcattttgttttttttttttttttgagagagcactagcccagatagttctaaactggctgactcatgaagcaatatcgtggctacagatgacacaagagaatttatttctgctaagatttgaatgttttaaaaagttttgatagaagttggtggtattggtgaaaactttgcctcctggcacagggtgacaattaaggtgtgttagagtttgcttttcttcccagtgttggcactactgctctaaggccctgagagaaaggggcgaggggggaagaacctttggcaacattccctgaggttataggccaccatttccccttcctactgcactgacatgcaattgctggcaaagccctaacaattccctaggttagctctcttgtgtccacatttcccaaacatctcaagacaatgcccgtaagaaaggtctggggaaacttgtaggtttaagtcctgattcatgaaccaggcaacagcagcagaaggaaatgcacgtgacattggtgcaatagggtagacgaatgcaaactgaggataaatgtagctttttgctttgtgctgctggcaaggaccatgccaacagactcacttttctcagcggtaactcattatgttatgctatcctgttcatctgattagctattgattcatctattgttcatcagatagacaagtggctagctgtgctatgaaattccattcttaagtgactaccactgaccaaaaagtactagctgtacctaatctatttctagatgcagggaaagaggaagcatagaatacagtcggttgtcctgtagctatgagcatcctgaaagatgttgaaagaacggttgagtaagcatatgatacaatcacatcactaaccagttttctcaggaagctgtttaaaatagccttcatcctccatcactggatatagccaattttatagattggggtacagccttaggtatggagttcactgtatgtctcgattttcatggtttaagacgagcacattagtgacatcaactagatagcttcatggaattgcttgtcattccttccccaggtaataggtgaagcaggcaggataacactacaataaaggataaactggaaagtatgtaaaagaatcgtcaaaagtggtggaaatccggtggaccttgaaaacacagcatagctccatagagagaaaagtaaggtttcttgcacctttttctaccctgaaattcatttcagagccaggattcctatggcagaagagctggaggctccacatggtctcattgctgtttctgttgacagtacaggagactcctcgaccgctacagtctctgaacgtagtgtggaggggggctgctcaaagtacagttacacagtcaacagagctctccgtagttcacatctaatctgagcaactgaggatcagtgttagcagtaacccttctggtagagtgcagccatcctgaggctagctactgtccatagcatatctccatactaaagactactgtgattcaactacactaacacaagcagcagcctcatttctccaactatcctgtccaggcccagccgcaaggcccctacactggcttccaaacatatgcaatgccctatctccaccaaacaggtaaagccttggcttaatggataactgggtagcagccttggtgtcttgccaggcactggcctacagcacatgtatccttctaccacatcccaacaaccatttaagttccccttccggactgacagcacaccacatagctggccatcccatagtaactgtacaatcaaacccaacctgacagccattgagtggttaccatgcccatattggtgagtctgctacaactgtcctgtcctaaatgtcatcatcacaagcctgggatggtccccaaaccaaccaactagtaatccccatcctccagttatccccatcctctagtaatccccatcctccagttatccccatcctccagttatccccatcctccagttatccccatcctccagttatccccatcctccagttatccccatcctccagttatccccatcctccagttatccccatcctccagttatcctcatcctccagttatccccatgctccagtnnnnnnnnnnnnnnnnnnnnnnnnnnnnnnnnnnnnnnnnnnnnnnnnnnnnnnnnnnnnnnnnnnnnnnnnnnnnnnnnnnnnnnnnnnnnnnnnnnnnnnnnnnnnnnnnnnnnnnnnnnnnnnnnnnnnnnnnnnnnnnnnnnnnnnnnnnnnnnnnnnnnnnnnnnnnnnnnnnnnnnnnnnnnnnnnnnnnnnnnnnnnnnnnnnnnnnnnnnnnnnnnnnnnnnnnnnnnnnnnnnnnnnnnnnnnnnnnnnnnnnnnnnnnnnnnnnnnnnnnnnnnnnnnnnnnnnnnnnnnnnnnnnnnnnnnnnnnnnnnnnnnnnnnnnnnnnnnnnaaacaatagcatgaaggtcctcagctttgagagcaatgtgaacaccctggccaatgaatcctgattagatccaatccaatgaggcttctctgaagtgttacattaaatcagtcaaaggacaacgaaagaattaaaaaacaacatggaaaaaagtcgagtcacctatatggaaagcaataccaagccaacagcagattcctgctcagaaatattgcagccccaaagaccataggataatatattctgagtgttagaagaaaataatgccagtgaagtgtactatacaaagacatccttcagaaatgaagggaaataaagccttcctcaggcaaacaaaacctgagggagatcatcaatactacaaagatttgtaaaaactccttattaagggaggaactggcatcatgaaaacttgcaaacgattaaacctcaccggcagagtgcatacaggaataggaaagagcaagaaatcaaagcttctcactaccgaaaaccaccaaaccacaatgattcacaacaagagaggaagaaaaatacacaaaataacaaaataactaacaataggacaggcatagtcatatagactaataaggactttagtgttaaatggattaaactcctcaattaaaagaaatgttcctcagtcaaacatagatctttttttttttttttccattttttattaggtatttagctcatttacatttccaatgctatcccaaaaagtcccccttacccacccacccccactcccctacccacccactccccccctttggccctggcgttcccctgtaccggggcacacaaagtctgcgtgtccaatgggcctctctttccagtgatggccgactaggccatcttttgatacatatgcagctagagtcaagagctcaggggtactggttnnnnnnnnnnnnnnnnnnnnnnnnnnnnnnnnnnnnnnnnnnnnnnnnnnnnnnnnnnnnnnnnnnnnnnnnnnnnnnnnnnnnnnnnnnnnnnnnnnnnnnnnnnnnnnnnnnnnnn

SEQ ID NO: 1415 - DNA, 2199 bp, Mus musculus
gaattctcgagctcgtcgaccacgccctccttgtgcaagaactctgagccccaggtgcaggaggctgaggcctgcagagagacttgcagagagacccagcaagccatggtgtttccatggagatgtgagggtacttactggggctcgaggaacatcctgaagctgtgggtctggacactgctctgttgtgacttcctgatacaccatggaactcactgttggacttaccattattctgaaaagcccatgaactgggaaaatgctagaaagttctgcaagcaaaattacacagatttagtcgccatacaaaacaagagagaaattgagtatttagagaatacattgcccaaaagcccttattactactggataggaatcaggaaaattgggaaaatgtggacatgggtgggaaccaacaaaactctcactaaagaagcagagaactggggtgctggggagcccaacaacaagaagtccaaggaggactgtgtggagatctatatcaagagggaacgagactctgggaaatggaacgatgacgcctgtcacaaacgaaaggcagctctctgctacacagcctcttgccagccagggtcttgcaatggccgtggagaatgtgtggaaactatcaacaatcacacgtgcatctgtgatgcagggtattacgggccccagtgtcagtatgtggtccagtgtgagcctttggaggcccctgagttgggtaccatggactgcatccaccccttgggaaacttcagcttccagtccaagtgtgctttcaactgttctgagggaagagagctacttgggactgcagaaacacagtgtggagcatctggaaactggtcatctccagagccaatctgccaagtggtccagtgtgagcctttggaggcccctgagttgggtaccatggactgcatccaccccttgggaaacttcagcttccagtccaagtgtgctttcaactgttctgagggaagagagctacttgggactgcagaaacacagtgtggagcatctggaaactggtcatctccagagccaatctgccaagagacaaacagaagtttctcaaagatcaaagaaggtgactacaaccccctcttcattcctgtagccgtcatggtcaccgcattctcggggctggcatttctcatttggctggcaaggcggttaaaaaaaggcaagaaatctcaagaaaggatggatgatccatactgattcatcctttgtgaaaggaaagccatgaagtgctaaagacaaaacattggaaaataacgtcaagtcctcccgtgaagattttacacgcaggcatctcccacattagagatgcagtgtttgctcaacgaatctggaaggatttcttcatgaccaacagctcctcctaatttcccctcgctcattcatcccattaaccctatcccataatgtgtgtctatacagagtagtattttatcatcttttctgtggaggaacaagcaaaagtgttactgtagaatataaagacagctgcttttactctttcctaactcttgtttcctagttcaattcagcacagaagctaatgccaaacacagtgaaaatatgatccatgagtaattggaaactcagactccttgcgcatagtacgtaccctatgtaacatcgacaaaaatctttcatttccacctccaaagaacagtgctctattcaagttgggaaagtcctacttcctctgtagacccactatctgtgagtgacagccactgtagctgttcacattaaccttccccatctccttttcctaggagaataattccacacactgcaccccatgatggccaccaaacatcaaagaagggaaaatctcctgcattgagttttagttttgagttttcccttctctttattagatctctgatggttccttgaagtcagtgttctgatgattattaatagttaatgataacacaacccactctcttggagctgatgttatgaagacaacaggtagaaaaattcctgggctcaggctggagtgacacccttttctttccctaacatcttctactcagatacctaaatttaagattcaggacagctgtccccaactcttaccatgtcttttataacttgctccttaacttgcccaacctgtaggctatctcattttctcgcttcactctgcaaggtttataacatgatgaatttaaatac

SEQ ID NO: 1416 - DNA, 1119 bp, Mus musculus
atggtgtttccatggagatgtgagggtacttactggggctcgaggaacatcctgaagctgtgggtctggacactgctctgttgtgacttcctgatacaccatggaactcactgttggacttaccattattctgaaaagcccatgaactgggaaaatgctagaaagttctgcaagcaaaattacacagatttagtcgccatacaaaacaagagagaaattgagtatttagagaatacattgcccaaaagcccttattactactggataggaatcaggaaaattgggaaaatgtggacatgggtgggaaccaacaaaactctcactaaagaagcagagaactggggtgctggggagcccaacaacaagaagtccaaggaggactgtgtggagatctatatcaagagggaacgagactctgggaaatggaacgatgacgcctgtcacaaacgaaaggcagctctctgctacacagcctcttgccagccagggtcttgcaatggccgtggagaatgtgtggaaactatcaacaatcacacgtgcatctgtgatgcagggtattacgggccccagtgtcagtatgtggtccagtgtgagcctttggaggcccctgagttgggtaccatggactgcatccaccccttgggaaacttcagcttccagtccaagtgtgctttcaactgttctgagggaagagagctacttgggactgcagaaacacagtgtggagcatctggaaactggtcatctccagagccaatctgccaagtggtccagtgtgagcctttggaggcccctgagttgggtaccatggactgcatccaccccttgggaaacttcagcttccagtccaagtgtgctttcaactgttctgagggaagagagctacttgggactgcagaaacacagtgtggagcatctggaaactggtcatctccagagccaatctgccaagagacaaacagaagtttctcaaagatcaaagaaggtgactacaaccccctcttcattcctgtagccgtcatggtcaccgcattctcggggctggcatttctcatttggctggcaaggcggttaaaaaaaggcaagaaatctcaagaaaggatggatgatccatactga

SEQ ID NO: 1417 - DNA, 40955 bp, Homo sapiens
atcattgtgagggctaaaggtcaatagaaataaaagggaaaaaattttttaaaaaaggaggtgtaaaaatagcacaagaggaagtaataagagagaaaaaggaaagatactaaaagaaaaaatattgagatgcatagagtaaacagtacagatgctacagaagggaaagatctagttttgtattcactcacctgggagcttaaaacatccacacaagtgctgggcatggtgactcacgcctgtaatcccagcactttgggaggtggaggcgggtggatcacgaggtcaagagatcaagaccatcctggccaacatggcgaaaccccaactctactaaaaatacaaaaattagctgggcatagtggtgcgtgcctatagtcccagctactcaagaggctgaggcagaagaatcgcttgagcctgggaggcggagtttgcagtgagcagagatcacgccactgcactccagcctggcgacagagcgagactctgtctcagaaaaaaaaaaaaaaaaaaaaaaaatccacacaagcgtacatgctaatgtgcacacacatacacagagagatatattcctaaaccctaacccacaggtaatttgccctgaagataatgaaaattaagcttcagggcccattacttagataaacctttaaattacaagggcctgggtcctaggaatgtgtttacatggtaatacatctttgtaagatctataaaagcaagacgcttttacgttccttttctcaaagagagacctcaaattatataaaccttggaccctgaaaaactcctgaatgttcctgaaccaacccaaaatattctgattcagtaggattgggagcgaatgttgcgtgtatatttttttgtttttttaatgttaccaagtgatttggatgcacaaccaggtttggaaattactgaaaaaggactataggctgattagtttaaagtgtccctgatgtctatgtggtatttctggagctttgccaccgttgattgggtcatataccatataacactatgtagtttgggaaaagtggacaatgggtaacattcatttgcacagtgcggtgatggtcacatccccccgtgttgagtaattagctatccatctgtatgtactggctgtagcaatatagttcttttcaacaagaaataaagagaattcagacacaacattcacagttgtaaatatcaagaaaacagaataaattcattaaacaaaaatccaattttggaagcaagatatatctgccaacagtgtaactgtccaatgggttccttttgtttgctgcccagataaaggtgatttatcaagatgggaactgcaatagagaaagaatttaattcatgcagagccagccaaatgggagaccggggttttgttattactgaaatcagcctcccccaaaattctaaggctaagatttttcaaggataatttggcaggcagaggaatggttgctgctgattggttgggatgcaatcatagcggtgtggaaaatggtccttgtgcatgttaagtctgcttctgggtggagccacaggacttgttgatgggtccaggtagagccaccagttgaaatgtaagaatctgaaaagacatctcaaaaggccaatcagattctatgatagtgctgttatctgcaggagtaattggcgatgttgcaaatcttgtgacctccggaataacagttggtaattgtttacatctacaccttagcagaattcaggctcctctcatcctcctaacctttcattggtggtcttttattagttttacaaaggcagtttagttttggagaagggctattatcatttaaactataaactaaatttctgccaaagatagcttggcccaagctcaggaattattaagggcagtctggaaggtaaaggcaagatgggggttgattatttcagatctctttcactgtcataattttctcactattataatttttgtcaaggcagttttaatagtgcagcatagacttgaaataaataaggagaaaccaggtggggcatagtggctcatgcctataatctcagcactttgggaggctgaggcaggtggatcacctgaggttaggagttcgagaccagcttggccaacatggcaaaaccccttctctaataaaaatacaaaatcttagccaggcgtagtggcatgcacctgtagtcccagctactcgggaggctgagacatgagaatcacttgaaccagggagatggaggctgcagtgagccgagatcataccactgcactccagcctgggcaacagagtgagaccctgtctcaaaaaaaaaaaaaaaaaagaaacaaataaacaaacaaacaagtaaggagaaacctgatggttagaaataaggaaatgtttaatggcctggaggttcaatgaggtagaagtaaaaagcattgcaatgagatacttgagcaatacacttgcaagaataggagacagtggttaaagagtgaagtgtttgaacatgtgactttagagacggtacagtcttaggtgttgtcgaggttgaggctgtgcctagggaaggaggtagctcaagtctagtggaggaaaatgtcattggagagctgaggatctgggctgtggtattggttgtgccatggatggtgaagtcccgtaagactatgagaagtgcttacagggaaaggaagatcaggaactaggtgccaaagccaatcttgcatgaggagttgagaggtcactacaatgaggacagtgagatggtttatctcagtgtcacaagcttcaaagaagcagagttattttatttcttctttgtgtgtgtgtgtgtgtgtgttttacaagagggcagatgaataaacatatataagaggcactcattataaaggagaagattgcccctgccttccaaccctgaagtatgtgctgtgtggagaataaatattgtcatcttgagagatctgcaggggaagtgatgtcctagggaggcagtcgggctaatgacaaagcaaggaggtaggagaaaagtttgaacaggaaactggaagattgaggggagtttggtgatggtgaagacaggaatcccagagatggcaaggaagcatttgggatgaaaatcaaggttgggtcaggagagaacagtttaggtgaactgtgtaggagatagatgacagacagtaagaggggcttacatgccaaatgtaaggaaatgtgagccatggtgatttgtcctgataggattgtggaggtaggtgggcagttagttagttctctactgcacattccttttacccatgataaactgatagcaactgcagtgagtgcagccttggttggcagcaatgagcaaataaatcttgcggtcatctgtaatggaggcgtaggctagggaagggttgggtagtggtcctttgaccatcccttggacccagggatgctgctttcaatggcattcactggtacttccctcatgtctcatggcaggcaaacggttcttcagcactgggtcctctctccagggttttgtgatggttttataatgctcaccaactcgatctagttctaccttttgagggccacaaaacagtctaataaccactcttttccttaccacccatcaaatggctgttaatatatctccatgacctttcctattccaaatcttcttttggctgaatgtacattaaatatttttttttattgaggtgaagttcacacaacataaaacaaccatcttaaagtgtacaatccagtgacgtttatcgcattgtataaccaccatctctgatatggtttggatccgtgttctcactcaaatctcatgtcaaattgtaatccccagtgttggaggtggggcctggtgggaggtgatttgatcatgagggtggggtttctcatgaatgatttagtaccatcctcttggtactgtcttcatgatagtgaatgagttctcacaagatctggctgtttaaaagtgactgtcacctccccacatccctctcttgctcctgcttttgctatgtgatatgcctgctcccctttcaccttctgccatgattgtaagcttcctgaggccttaccagaagctgagcagatatcggcaccatgcttcctgtaaagcttgcagaagtgtaagccaattaaacatcttttctttataaattaccaagtctcaggtaattctttataacaatgcaagaatggcctaacaaaatgtctatctagttccaaaatatttttatcagaagaaaactctgtaccctataagcagttagtccccatttcttcctcagcccctgggaacctctaatctactttctgtctctatggatttacctcttctatatgtttcatataaatggaatcagacaacatgtaaccttttgtatctggcttcttttggaacaggaattaaaagaaattaaataatgtgtaagcggaaactcagttgtatgtaacaaaacccaactccccctgagaaagagaaagagctggagccctttaaaaattaactgcctgtttttctgtggctagtgagacttacctctcctcctttcccaggcattgtgaagaccctgtttctctagctgtgcagctgcaaggtcactagacagataaactcaagtcgcaaaacatgtttcttcttgaaaagtaagaaatgatgtaatgcatgtctcaattaattgaataactgtctttatttctcacttctgtagtatgcttccccctgcacagatacccctctctcccaccccacaaaatgcttaaaaggtaacttaactctttgttcagggctcagtcctttggatgttaatctgacttggccagtgcacctaaataataaatatcctcctgaaccccatcggtctctctgatttcttaaaaaatcccgcaatatttccactaccaaaatttgttgacacattggatatgacttgtgaaaaaaaagagaggtgtctcagttaactccaaaagttttggtctgagtaactggaaggatggagttataatccactgagatggaaaggctgtgggaagagccctacagattggaggagaaattcagaagttcagtttgggatatgtaaaatatgagaggcttattgaacaactaaatttgtttggggatggagatgttgagtaggcatttggctacaggagaatggttctggttgtacagaatttagaattcgttcgcatttaaatggtattcaaagtcaagagtgtgaattggaccaccaagttagtgaggttagacacagaagagcaaagcggtgatctctggagtactccaagggtttggaggttggggagatgagggagaatcaacacatgatacagaagaaatagccagtgaagtaggaggaaaaccaggagctccctggtgaagtaagatgaggatggagaataggctgtttgtgttagtgaagtgtaggaccttggtgagagcagtctcagggaattggtgtggctgaaagcctgattggacaagcttcaagacagaattacagcctgagcaacatagtgagatcctgtctctacaaaaataaaaaataaaaaaattagtcgagggttggggcatgtgcctgtagtcttagctacatgggaggctgagggagaaggggcactagaccctaggattccttgagtgcaatgagctatgatcgcaccactgcactctagcctgagtgacagagcagcattcccatctcttagagaaagagagagagagattgagagaattagaggagaggacttagaaaaaagtaagtctagatacttctttcagggtatagtgggagcactggcactttcacaagtctccctggctccacgtttttccccattttaccatgtcttccaagttcctgccataagttcagcttaatgatcaagagcatggatttggaactgattggcctctgttcaaattcccaaccatgtctcttactagttatgtgactaaggcaactttctttttttaaactttttttaaattatactttaatttctgggatacatgagcagaacgtgcaggtttgttacataggtatacatgtgccatggtggtttgctgcattcatcaacctgtcatctacattaggtatttctcctaatgctgttcctcccctagccccacatcccctgacatgccccagtgtgtgatgttcccctccctgtgtccatgtgttctcattgttcaactcccacttatgagtgagaatgggtaatgtttggttttctgttccagtgttagtttgctgagaatgacggtttccagcttcatccatgtccctgcaaaggacatgaactcatccttttttatggctgtatagtattccatgatgtatatgtgccacatcatctttatccagtttatcattggtgggcatttgggttggttccaactctttgctgttgtgaatagtgcctcaataaacataagtgtgcatgtgtctttatcgtagaatgatttataatcctttgggtatatacccagtaatgggattgctgggtcaaatggtttttctagttatagatccttgagaaatcgccacattgtcttccacaatgattgaactaatttacacttccaccaacactgtaaaaagcattcttatttctccacatcctctccagcatctgttgtttcctgactttttaataatcgccattctaactggcatgagatggcatctcattgtggttttgatttgcatttctctaatgaccagtgatgatgagctttttttcatatgtttgttgactgcataaacttcttcttttgagaagcatctgttcatatccttcactcactttttgatggtgttgtttgttttttcttgtaaatttgtttaagtttcttgtagattttggatattagccctttgtcaggtgaatagattgcaaaaattttctcccattctgtaggtttcctgttcactttgatgatagtttttttttttctactgtgcagaagctctttagtttaattagatcccatttgtcaattttggcttttgttgctgttgcttttggtgttttagtcatgaagtctttgcccatacctacgtcctgaatggtattgcctaggttttctcctagaatttttatggttttaggtcttccatttaagtctttaatccatcttgagttaatttttatataaggtgtaaggaagggatccagtttcagttttctgcatatggctagccagttttcccaacatcatttattaaatggggaatcctttcccaattgcttctttttgtcagctttgtcaaagatcagatggttgtagatgtgtggtgttatttctgatgcctctgttctgttccgttggtccatatatctgtttttgtaccagcaccatgctgttttggttactatagccttgtagtatagtttgaagtcaggtagcatgatgcctccagctttgttctttttgcttaggattgtcttggctatacaagctcttttttggttccatatgaaatttaaagtagtttttttctaattctgtgaaaaaagtcagtagtagcttgatggggatagcactgaatctataaattaccttgggcagtatggtcattttcatgatattgattcttcctacccatgagcatggaatgtttttccattcatttgtgtcctctcttatttccttgagcagtggtttgtagttctccttgaataggtccttcacattccttgtaagttggattcctaggtattttattctctttgtagcaatcgtgaatgggagttcactcatgatttggctctctgtttgtctattattgctgtataggaattcttgtgattttttcacattgattttgtaacctgagactttgctgaagttgctgatcagtttaaggagattttgggctgagacaatgggattttctaaatatacaatcatgtcatctgcaaacagacacaatttgacttcctctcttctatttgaatacactttatttctttctcttgcctgattgccctggccagaacttccaatactatgttgaacaggagtggtgagagaggcatacttgtcttgtgccagtttttaaagggaacgctttcagtttttgcccattcagtatgctattggctgtgggtttgtcataaatagctcttattattttgagatacgttccatcaatacctagtttattgagagtttttagcatgaaggggtgttgaattttatccaaggccttttctgcatctattgagataatcacgtggtttttgtgattggttctgtttacgtaatggattctgtttattgatttgtgtatgttgaaccagccttgcattccagggatgaagccaacttgattgtggttgataagctttttgatgtgctgctggattcagtttgccgtattttattgagtattttcgcaatgatgttcatcagggatattggcctgaaattttctttttttgttgtgtctctgccaggttttagtatcaggatgatgctggcctcataaaatgagtgagggaggagttcctctttttctattctctggaatagtttcagaaggaatggtaccagcacctctttgtacctctggtagaatttggctgtgaatccatctggtcctgggctttttttagttggtaggctattaattgctgccttaatttcagaacttgttattagtctattcagggatttgacttcttcctggtttagtcttgggagggtgtatgtgtccaggaatttatccatttcttctagattttctagtttatttgtgtaaagatgtttatagtaatctctgatggtagtttgtatttctacgggatcagtggtaatatcccctttaccattttttattgtgtctattgattcttctttcttattagtctagctagtggtccatctattttgttaatcttttcaaaatgcagctcctggatttattgattttttgaaggctttttcgtgtctctacctcctatggttctgctctgatcttagttatttcttgtctttcgctagtttttgaatttgtttcttaacctctttgagactctttagaatggggataataatcatatctatagcagagagctgttataaagattaaacaatataataaatatggggcgctgagcttcagagtttttgttgttgttattattattttcctaaaaatgcaaatctgatttgcatttgactcattgactcacatcagtgggtcttcctttttattgtccttcatcatatgggtcctaatttcacatgcagtcttataaaaccatctcattttatagtccaagaatattaaaggtacttgtaggctcccaaacctacacggtgaaaagctagagagcatgggctctcttcaggggttaacttcaggaagtgccactaacaaggacgtccactaggtggtgagcaaggaaagacggaggtgaaggaaccgaaacgagtcaagtccactgcttagctctactgaagttttgcaaacatcataaatatgtctgaaatgcagttttgatttgtagtatttgcaatttccaagggccatttaccacaggtagccaagagttagtttagcatttatgaaaaagataggggagggtggtggaaaagaaggaggaggaggagagagagaaggaggaagaggagaacaagaaccaaacaaaaacaagaacaagaacaagtagaagaagaggagcaggaggaaaaagaagaggaagaagaacagcaacaacaatgagtgaaggaggaggagggtaaggaaagatgcataggagaatggaaggaaggatagaaaggagggaaggaagagagaatctagtcacattactttctgatcagcagttcatttttgtctcagtgggaggcaatagaggccagtctaggaaaggggtggggaaagaggaaagagaagtgcaggaggaaggggagggaaaaggggaggaggaggaggatgtgagactgggttagagaaatgaaagaaagcaaggctttctgttgacattcagtgcagtctacctgcagcacagcacactccctttgggcaaggacctgagacccttgtgctaagtcaagaggctcaatgggctgcagaagaactagagaaggaccaagcaaagccatggtgagcctttcagcctaaaagacgtttagatgctcagatagaaactcttggggttgtagaggcaggtggcaaggataggaatcaccccatttcaattctggttttaaataatatagaaactaaacattttctcagaccctcaaaaaaagtgatcctgaaatctttcttctcagatatgctgatttcctcttcttgactttgtctctggggagactcttgaagaaatactattgaaatcagatcttttgcaataaacactgtgtctacctgagaagtgatatgctttggaagatagaatttttttaaaattatactttaagttctagggtacatgtgcacaacatacaggtttgtcacacatgtatacatgtgccatgttggtgtgctgcacccattaactcgtcatttacattaagtatattttaaggtgtgcaggaaatttgtgactttgtcatttcagttgctcaaaaaggtatttctttttattaaaaaaagaaatacttttctttcctggtgtctggctatctaattttttttttttttaggtatttgaggcattgacccattatgatcaagagtgaggctataacattaaatataagcatcaatagttaattaagcagcaacaatactttaaaaaatatacatagtaaatattaaatagttttatctaatagctcagcagaaaagcaggtataaaaattaccaaaccatagaaaaaattcagggcagtaccgattagcaacttgagactaaagcgtaaaaataaaatagaacaaaacaaaactgtgcatcagttctgatgtaaatttgaagtaatttttcatctatgtctgagaaacctgttacctcagacagggttagtagacatatgtgttttattctgattattaagaaagttgtaagcaccacctcaaaggctataaatgtgtggtttaagagtatacatctaaatataattttgtatttcatttgcagatatttccatggaaatgtcagagcacccagagggacttatggaacatcttcaagttgtgggggtggacaatgctctgttgtggtatgttatgatatttatatatcgctaagtctattttacttatattcatttttcttaaatatccactagttatacatagtctaagggaaaattatttcacagagctgttaattctatcccttctgtaaacatctcttttcttcttacctttagttcttccccagaaactcctgaacactatttttaacctataatagcccatgctgtagagttcaaatcccaataaccccacaaaatccctcaattataaaggaataatgttaattaagaaatctctgttaaggtacttacaatctgtaccaaatatttagcacctcattttctattttttattcatagttcagtgtacattaatgtcatttctacaattacaatacgagcttattaagggacgggggtttatcattttttggtccttctcccattgttgtgacaaattttatatctgattcttgaagactctccagcaatagctttgaacttggtttttcatttcctaagtaaactaatgtcttctttctccctagcctggattttcagctctagccaagcaaacatgctaactctcccgttcacacattccttatgccatgtctgcactgtgtcacatagaaacttagtgctcttttcatacaacaggtattttctgagtccctacaatgtgtgaaatttatgctaggcactaaggatacagcagtggacacaacagttttttccctcttagaacttgcattctagtggaatgctcattcaaaactctgttcaaaatgtttattttatgatgctctttaccatcaattatatctgtttctttactgtattaaatagtgattcatgtagatcataccatgcttagaatgccatatattattatgaagtcattgtgtaattatgtgtttaattagatatcttcaaagccctcatatttgatgggtccatatgtttattaaacatcatcagttgagtctctttgtgtatagaacatgatctaatgaatttcataatcctataccatttggctttgtaaattgttctttttaaaaattatacagttagatatataagagttgagtggtatattgggcttttccagaagcagttcttcctatggtaaaataaaatgttttttatgtaaaagaggttacttaaaagtatgtcactgttcttcctgtccttattatgcttctcccataggtacatatgtgttggccttcaagaaatgattccaggattaaaaagtatacgtaaattgtatagttatatgatattacacggtaattagttgtaaatcattaacagctacaaagaaaaagaaatatgaatgtctaaaatatgttggttaaatttcacctgaaataattttgagaaaaaaattaataagaaaataaacctagaaaaccactaaatttgtttcaaatagaaccttagataaaagcatcttatattcaagccagaaggtctaggttctacttcaaatctgcaaacaactattctgtgatcctgagatggtcacatacactcttaggctctgtttcctcatctctaagtgtctagctcagcctggagtagtgctaggttctttttagctgtaacattatgtaagtctgcataggtcacactgatgtcttgcagatttcctggcacatcatggaaccgactgctggacttaccattattctgaaaaacccatgaactggcaaagggctagaagattctgccgagacaattacacagatttagttgccatacaaaacaaggcggaaattgagtatctggagaagactctgcctttcagtcgttcttactactggataggaatccggaagataggaggaatatggacgtgggtgggaaccaacaaatctcttactgaagaagcagagaactggggagatggtgagcccaacaacaagaagaacaaggaggactgcgtggagatctatatcaagagaaacaaagatgcaggcaaatggaacgatgacgcctgccacaaactaaaggcagccctctgttacacaggtagggagtgacaagacggctatgctgcctcagactcaggaagggccacggttaagagaatactcagatttaccccatggaaaggtggggggatgagaacagcttctggttcattctaaaatacatctagccctctatataatcttgcatcgtgtcactcctaagaatttttggtgtgtaagatttgtccctgtgcacaaaagctatacccctaaatcaagttacatcaaaatgatagatctacgtaggaagtacagaggaagagctagacaatcagtgcctttgataataaggcaggggaggagaagctgacagctggggccagttggaaacttaggctcacatcacctcagttttcacattgtgaagtagagagtgtggtgctgcgtgcttccttcttggtctaaccttatataattttatataaaaattgcactatctttggtgtatgaatatttctgtaaaatcttctacaattccaaaacagccagcattttccaagtgatgttttaataatgaaccatagttaatttggtctcttataaattggactctaccgttttagcaaatttggactttttaatctttgatttctataaagaaagggattgccaagaaataattgcatgcagaaatgattgaggtcaggtcatcatttaaccttctcactcattaaaaacaagtaatttcaagagtttcaaggtatgccactaagtttcctataagtgttacagaatattagtattggtaatttcattccaaaagcaaataaatgcctatgactatatgcttagtgtattttatacgtaaaaattttagcatatgatttttatgctatgaatttacaaataaacctttcctgattatttaaatcatctcagacaaaaggttatctatgtctaaagaaatgactttgagtactaaaatgtaatcacattaaaatattttttttctgacctccttaaagcttcttgccagccctggtcatgcagtggccatggagaatgtgtagaaatcatcaataattacacctgcaactgtgatgtggggtactatgggccccagtgtcagtttggtaagtctctttcctttctttgcttcttcttaggtaaagtcacaggaatcattatagcttatcatgaagctggttggaacaaaatgatactagccactctgagaaatgggaagttttgatcagaaagctctgctttcacaatattgttacctttccgtaaagatttcataagtcagcatgaagtttcgactcacttctcaacaagtctttttgagtaccacaagaagcacagtgttgggataaaagctgtcagggttaccataaggaattagcatggtagattcccgctctcaagaagctcacgatctaatgagcttgttagattaattagaactctaaggtctggaagaaactatgccatttatcattaggaggctgagttacccagaaagtatcttgctttttccttctagtagttcctttccttcttgcagttctccacacttaacacatgtgctctgtagcacactgactttgctggtggccttctctctcattttgcacatggccaaaaaacatgtcatctttaagacattgttcaaagacagtttcttctaggaagctttcttagttctgatagctccacatatttcttcctcatttctcccacttatgttgaagtcatctgttcacttgtccgtctcctctggtactgaaaacttcttgagatcagtaagtgtcctatttatcattgcatctttgggatccacaaaatgcctgtatatatgaggcacttgcttgtgagcctgaattgaattggacaatttaattttttaaaaaagcaatgtttgtaaacaataaagaattaaaaccaaaatacatttaaatgtcaaccaactgaaatagatctatagatctaactcatttcacttgatccctgggccatgactccttcctaatactttaccctcaccccatttttgaactctattttttaacccttatgttattggtatgcctattttactcatttttaattattggtatgcctatttcactcatttttaacattttacttttctttgtcttggtttctctcatatcactcttttctcattctttctacctgtgatcatttctcctgagatccttcatgagcacttatccaggaccataaactactataatttctcagcttttgtcttttgtatattgctcttctgactctaatctacatgtatcctttggtcaaacttactgacttttgcggactcacaaatctatgtgatctttggactgataagcctatctccagctctgaactcaaatatgctaaggatgtcctttgggatgtttaaaagactataaaaccaattgttcccagtcagcttttctcttcgtatttcttatctcagtatgtggaatcaccatttacatgggcaccctggtatgagactctcttaactcccccaacatttatgcagggtaacattctaccaatttttacaacttagtgtttttctaatttgtcttccacttgtcaactctactaccattgccgtcattatctttcttctagattcttgcaatagtttattagatgagttccacaattttaaattagctcccctcaaatacattattcatactacagggagactgatcaattaaaagcaattaaaacacatcacacatacatgacaatccacccattaatttctacctaccattttgtcctacagggtgaaatctaagctcttcaagccccagagtaatgcttgatatataatagatactctttaaatcaatgaaaaaagataacattttctcttagttcccatgtttctccctaatctcatctcatatagtttccaaatacaaaaattcttctgattccttgagtccattcttccttgaagtctctagagcaaggtagcaataatggcttaaatttgacagatgaggaataagacatgaaagttgtactgtttactaaatggcatggcagggtctaaaatgtgaaaactttgatttccaagtcttaaatttacctattgtaccaccaatcagaacagggaaatagatacagtttctggagagggttgtcaaaatcaaaagagttaaaattctggaactgagctagaatagaagacagaattgaggtcaaaatgcttcctagacttttatattctctccttgcaaagaaggcttattatggagacccactctttctctgaacatcttgctcccaatactctagtagactcaggggctctgatgtgatagttatttcccgactaagctggtcattcccagttacacctatttggctttaaggattctcactacagataatgctgaagataataatatgaagactagctaatgtttacttagaatttctgatgagtcaggctttgttctaaggtccttgacttatgctaattgaattacatttagtttccatatcaatttgataaagataacacaatttcattattcctcttatatagatgaagaaactgaagttggagggttcaagtaaccttgtttaaaggcacatggttatcaagtggcagggctaggattcaaatccaggcgtcagttcctcttaactcttccccatactgtttctttccctattgaagtgattcagtgtgagcctttggaggccccagagctgggtaccatggactgtactcaccctttgggaaacttcagcttcagctcacagtgtgccttcagctgctctgaaggaacaaacttaactgggattgaagaaaccacctgtggaccatttggaaactggtcatctccagaaccaacctgtcaaggtgagtaacttcagactagaggttttgtcatgcaatcctgggcttacagtcagaacattcagtagaagtttgctgagaagtcaaacttaggagcctaatttaacctaactttgtttaacctactgtgatgtttctcaaaggacttattctaactaaatttttttgaaaaacctcccaaacaaaaagtaaaaaccaaatacccctgaagccatctcccagtgtgtaacatgacttatagcaatacagcatggttatactgtgttttttatttttctcattgccattgcataaataatgtcttgttgaacctcagttacattttggttcttctcctctcaataacacctgttttatgtggtgtcctacttaataccaaccagtttccttcccagggtagtggaggtctttcttggttgttttatttggcttattcttaaaatcacttttacttttcctcatgcataaacttttaggagaataacaactgaaaaacaaaaacacaatctcttgatcttttcaagtttgaaataaggtaggtttttttttttttttcatttttaactgccaaccttatctccatatgggagaaaaccaatgtcatctgaacttacgaagttttggttaacttttctacaagtatgctcctgatgcattagtttaagtagtttaattcttagaagtgctatcaaaatcccttattgaaattataaaactgtcaacccacctactggaatttacggaagttggacttgcttcagtgaattgggatgtttttcaaaatgcttgggtagatatcagaacagatgaaacggcagagattctctgagaatatcccataagagcccttgatgcagaggccatatggcatggtacttccagcagaaggggagggtcaccttagctagggcagcagcctggagtagctactcctctccccacagctttcaatgcttccttgccttcatctctcattcaccacccaccatcattctcaagaaaataaagcctggaagcaatatcacaagtaatgtagtcaggcagctttggctaaaaatcctttgctcaagggagggtctctactcagaaatactgttttgtcttttttttttttttctttttcattgaagtgattcagtgtgagcctctatcagcaccagatttggggatcatgaactgtagccatcccctggccagcttcagctttacctctgcatgtaccttcatctgctcagaaggaactgagttaattgggaagaagaaaaccatttgtgaatcatctggaatctggtcaaatcctagtccaatatgtcaaagtgagtaagtttgtcctggaaaactgaaatcttaacgatggagctgatggatgagcagatatgaggaaagacatacataaacatttacatgttgttttgctaagaatatgtggcctagaaataaatttgtatgcttaactcactgtaaaatctttggctggtctttcctcctcctttaatgacaatcatttcctttttttgttctcacctcttgccatcttaactcctaaaatctgaactcactgatttactttttacccattcttctattccactacaatctaacatctctgttagcccattgaaatgcctgtaaaaggtcactaatgaccacctacttccccaaataatggatactcctgaatcatcactaagctaatgcctccaaaatctatctgtatatgagaagaatcatgtcttgttcatctttgtataccctccacctgacacagtgcctggcaataggtgctaaagcaaatgcatgttaagctagcatgtgaaagaatagctacctgtgtctgctcctgagactatctgcatggatgacaaaagtctttaaatggtaggatctacagaagctgtcagaaatgctgatctctgtgtgctgcgtgcccagggccagggagtagagtggatgagcagagagaggcagggaggcctttagcagaggactgtgtattaggcctatcagagacatttccctttaaggcctagctagtgttcatttcctcctcatcttcatcaagccaacaggtaccttctgtctggagctcctgggaacttgagccttctctcaatcatatatttgggtgtggggatcaaatcaccttgaaaaggttcatcaaagtaatgggaagaactaaggatagaatcagaccctctgccaatatgtaaaaaagtagattccttcaaatgttagtatcaggagacagatttttttttataccagtattttcaaatagaggctcccaaatgaacttagtttacacttacaagagtatctctaaacatgcccttttacttattcgtgaaggaagtagagggaagtggtaactactgcattggaaagaaattagtgcaggtccttggcatgtaaaaatcaagtgcttatttttgcacaactgctttaaagtaaaagcattaatgatttcctttgactggtgaattatccagttcagatcattggcttttatttttcctgaagttgtattaggcttttagctcttctctgtgtttcagagttccagtcattgaacaagtccatggagctaaatacaacgatgaccattcttgccaacatttttaggtgcattttcaggaactctatgaaccacaaatctgggcattgagattctgtaggcattagactagcaaggctggtccagtctttgcctatgctgtagactcatcaggggccttcccatgccagtttcctcatctgtcaaatggcatcaaatgggctactactgggagatgtaaggaggaaaaaagtcaaatatcatgagatagactaaggaaataatgctggtggtctcatgctatgtgccttactgatttctctttcagaattggacaaaagtttctcaatgattaaggagggtgattataaccccctcttcattccagtggcagtcatggttactgcattctctgggttggcatttatcatttggctggcaaggagattaaaaaaaggtatgtgagtttaacttcacatgaaaagaacacaactttaaagtgaaaaagaaaaaaaaaagaaacccacaggaaattaaatgtgatagattcaacacaagcaggatgccaagctttacattctagagccatcagtccctggagacatgtaaatcagcccaggacacaccttcattaaaacaggttggctgattttcgcttttcatctgataaacttttaaaaatgtctattaccttcaaggcagcttgctaggctgataacaactaagtgagatattctaatggttctttgctcttatgtaattctttaatacttttttttttttgagacagagcctcactctgtcaccaggctagagtgcagtggtgcaatttcagctcactgcaacctccgccttctgggttcaagctattctcccacctcagcctcccaagtagctgggactacaggagcgtgccaccatgcccagctaattttttgtatttttagtagacacggggtttcactgtgttagccagagtggtctcgatctcctgacctcgtgatctgcctgccttggcctcccaaagggcttggattacaggtgtgagccaccacgcctggcctgctcttaattaattctgaaaaaatgacacactatctctgtcctctaagagcctacatgccttggatttcaatgctacaattccactaggaagtgggtctaatgtccactaaggtttcaaggcactgctcccaaatacctgacctcttcaagagtcacctggttcccaacacatgggcattgcattaaccctgggagaaattcccatgtattctcccaagtatctattcaccaaggccacagctctaaccaaatgcaccatatatgctttccaaccatccgtcactggagaggaaaagagaaggaggactgccttgagaagttaacatctgctgcccagattatcactccctttaccttaaggcatgagtgtgtctcagctttaaagtgtgagcaacccactagcctgcagcaggccttgggtgtatggtgccacatttggccaaactcacctggaagaaccattcaaggctgtaacattcatggacattgggcagcttttaagatatacctgttttggccaggtgtggtggctcatgcctgtaatcccagcactttgggaggccgaggcgggcggatcatgagctcagcagttcaagaccagcctggccaacatggtgaaaccctgtctctactaaaaatacaaaaattagccaggcgtggtggcgggcacctgtaatcccagctactcgggaggctgagacagaagaatcacttgaacccgggaggcggaggttgcagtgagctgagaccgcaccattgcactccagcctggtgacagagtgagactctgtctcaaaaaaaaaaaaaaaaaagatatacctgtttcaagttcagggatgatctcgaaacaattgctaaccaactgctctgtgttgcctttctgtgggctcagttgattgtcattttaattttccttccatcaaattagttagtacgtattctgttcactgaatatggtatgtaaaggttgccccctgtccatttacactggcaattacaaaaatattatttatcagtccctaattgcgtgccactctgatcttatctttcatttaaatttgagaatagtgggtgctaggtaagttttctaaccaatccagaaagacaaagtgtgtgaggggggtggggattgttgatatgcaagaacttcattagctatgtataacctgagagcactgagcagttaaaatgtctctgcccttgctattagaaattctgtgctgattgaatctcactatcttatagtattatacagtactaagtactatacagtactaagtataagtatcaagtactgcattaaggcaaaagaagaatgacagttttctccaaccactgattattctttccattgagacttcaaatcttgaccccggttgtcctgtctttcttcctaccttgggcgatgatggcagaactgacggatagagaacagggtgggttattacacactgccccctgggataaggtggctattgtctaaataattttaaggactttggggctgtaagtcaccttaataaggaagctatttatttccgaattctaaaatcttttaataagtgtttgtagaatcaaaagaatagaatcaaactcatttgcatgtagtgaggggttagctggctaaggctgttttataagcaagggtaaaaaaattagaggggttgtttttaaattttttaccttggagtcatttctgtacaagatctcaaaccgataacttgaaaactgctgtgggaatcagtgtggggcaaacaggaaacagataacgggcagttaggctagttacagttatgccaacaaagaaaacagaagccccaaaagatcactggcttggtaggaagcttagggtatctttaagataacattaaatagtcttcatctgtgggccaggcaccttggctgtcacctctaatcccagcacttttggaggctgaggcaggaggattacttgagcccacgagttcaagaccagcctgggcaacatggcgaaaccacatctctacaaaaatacaaaaaattagtcaggcatggtagcatgcacatgtagtcccagctacccaggagactgaggtgggaggatcacttgaacccaggaggtcaaggctgcagtaagccatgacagcaccactgcactccacaacagagtgaggccctgtctcaaaaaaaaaaaaaaaaaaagtcttcatttataaaacaacatcttccattttcaccaacttacaaatgattctgctttccaaagattttagttgtaggttggtcctttaaaacatgaagagtatttttcctatggaggcaatggtagaaataatggctacattcccaggctaaatctaagacaaaatatagttaatggcatttacaaggataaaagtaaaaagtcataaatctctatgtgtgtgtttaggtgtgtgtgtgtgtctatgtgtgtgtgtatatgtatatatatacacagagagagagagagagagagagagaatttataggctttttgggttctaatagttagaaaaagggcacaggtaactatttagagcatggtagccaatgaagtgactagagccttcacccctattcttctgtcctcagatgaatcttctgactctagcactttgtcccctgccctagtagtcttagtatggagactttccctcctttcttttaggaaaggaataaggaacagttccagaaacatgtgtccttgtgcatgggctcatctagacacattttgtgcaccaggcattatcattttctgattagtcactaccattggccctgtttggtaaataaggaaaccagggcaatgatgttttaggccaaatctcaaaaataccatatcagcaggacccagagtcagagattagactccagtccagatacatcttctaaaatcactggtcttcagatttgtgaactggttttttcctcggttggaagaatttcccaccagaaccaacacacagggttagaccagggcatgaaactgaacacatgcccccttagttcctttttcttcaaaatgaaactctctcagtaggaacagattcttactcatctattgctgttaggttcatcatccctaaaaaaaatatttatgtgaagctaaccagaatctgaaattaattcagatttgattccccctgctcaagtgcacttggtcatcagcaggctgaattttagaagaaaagatttcaaatagtagtctttaatactttaaaggattaaaacagtaatgcaacactgtctacgtgctaggacctgaactaaatacttggaaatattttattttatcaacccaatgaggatgatacaattattatgcctctttaacagatgaagaaattgtagtttagaaaagaaagtagctgttcaaatacacactacactacaggtggcaaaatagggctttcacctgggtaggatgattctagaatgccactttacagccactgaaatatattgcctcccaaatgattctttctgctcaaagagttttttttaagttatctacttatttatattctgcttttttcaaaaagaatgtgagaacagtacaaaatgtgttcagtatagcaaattaaaattaattaaaaagtaagaaaaagaagccaatttgggcaacccactcgggtccccttccacgctgtggaagctttgttgtttcgctcttcgcaataataaatgagcttgatgttttattgagtacaaaaaaaaaaaaaagaaagccaaatttaaacttagggtacaaaaatcatttggaaccaaggttgaagttatggcacaaaaatgtatgtcacaaagttttatatacttggtaggagagggtctcagatctagctctgagtttccttacagccagtcaaaggagaaccatgtgatattccttgtgtttgtaagataaaaacacattagttactcagatgaggctgcacaattcctaccaacaagaccaaagtgaaattctcttgtggattctcatagagatgatgctgtgagctgtaatggcacatagttttacagtattagcagctgtccctcaagggaagaatctgcaggtaggatgagatggcagattgggaagggataaacacttgaatggacatattgggtcttgccaccaggcaatttagcaattctgtcttcttgagtagcacggagaatggaatggaacctcaggaggcatctgcatcaacatgtctgttctgtattagtgtctaccactgtttattaagccagttcctcaaatctcctttgacacagatagggtccacctaacaaatacctaatatacttcaaaagacagttttgagagtgggagtcttccttctcccttacttgaaaaactttaaattgtctaatttttgctaatgccttttctctattttctattttcaggcaagaaatccaagagaaggtaagttttattagtggcgaggagtttccacatctgctgattcattctctacttccttaagttacttcctgctctagctagacacattaaccccatagtagtttatttacctggggtcctcatccaaatgaccagataaggtgataaatctactagcttcctttcagagctgtgctttttggtgctagtggagctgaatgaatgaatgaacgaacaagtaatccctattagaaaagggcagtttatgtaaagggagatttttctgattacctcagaattttttctgagggttaaaaacattgtggtgtgttcttcttgttcttaaatatattatttaagaaatattcaattgaacaagcacttattgagaaatgaataaatgcttattcaattgactatttgcattcaattgctctaacaggcattgtccttcagaaatgtgggaaagatagggagcatgaattctacctacagcttccccaaggaggcaagtatttttcagtttggtcttgaagctcaaatttcttctactggagaaatagcacagtgggaggagatgcagacatgtgaaagttgatggcccacctggcagaaatgaagatggaaaaatatttctcagtatctagggtttagtgacttgctctggaattttaggaaggagagtttaagtaaaataaactatgaaaggaggactttggtgacatattcagtacccagctggacaactgagcttcctttaaaatgctagaaatgaagtgagatgatttctgaagggattggatgctggtttgggcaaccatcctaccaatcacaaacttagtatgggccattgcttagaatgcaaaggaaaaagtggggaaaaatgaggcaccagaagccagatcataaactaatgtataagccatgtgatatgggctttatcttgaggtcttttgggatatcactaaaggggtttaaacagtgagtagccttacctctggcatcttataaggtcaccctgcagagcagtatggcaagtgtgggagacaggtgagcctggattcaaagagacttgttttggaggcatttgcagttattagattaaaaccgatggcgcctgtctagggaactagtagtaagaatgggttcatgaaataagaggaggtgatattaactgaatgtgtctgttaattggctaaaagtgagagagaagaatcaaattatcatctttctcacctggaaactggcggatggtagtcctgtttacttctgagaagggaacataaaagaatgagaggttttggaggtaaagatcatgggttcagttttgtactgagctttgggtgtatgcacatcattcactgtggctcattggacctatccaaagcacagaggctatggcaggagaagtggatttgggtccctcacatttcaggaggtaactgccatctcaggagtgggtactatcatccagggagggtgtgagtgctttaagaatggaagaggacctgggagagagtatgggagccagaggaacatcattatctaataagtcacctaagggaaagagaaatgaaaagatgttgccaggcagggagaaggaagaggagaaagagtgtggggtaatgaatgccaaggaaacaaagaaaggggaacggtttcaaacattgccaagagaaccagtaagtatcccctggatgcaacaagggtgtcagtggggagactatttgcagtgcagacatcaagacagaggtcagacggccaagcattgagcattactgaggatgagaaagtagagacagaacaagcagtcatctcttttaaaatgtttggctgtgaaggagaagtggggcaggggtaactggatgaggatgtacgatcagtggaggttctttttattctttttaattactctgtcttctctttactagtgcaaatggagtctagtgaggaaaggcttctttctctgggctggtctccctatgtctgtggcaggaaacccacagatgtgaagatttctttcaaactcgcacctactgagtgaaagtattttctggcacaatctacccagagctgttttctggctaccggaaccacctgttttaattgccactagatggaagcagatcaactagattttttttttttaagatgtccttgaggcacaggaggagagactggctggaagaatattagcaaaaagctaattaccatgctaagcaaattgctatattaagtttaatggttcactgattttttataatcagtcaattaatagttgtttattgaacatttttgtgttggaaactgctaagctttcttgagacagcaagaggagtcagcctggtccctgatttcaggaaaattattacctagctggggagttaagacaggaatatagaaagaaaaaaatcagaaaaatacaaggcagagcatggtaatggccaatgggtgctatatttaagaaggaaaaggtcatttggcttggtggttatagaaaatgttataaagaaggttgcttatgaagaatagataggatttaggtatatggagaaaagcaggaaaggaaggcagtctgtaggaaggaaattgtgtaagcagtggtatggtagtgagactatgaaagcatttttcaggggccactgagcagaactttcttgagcccatggcttattgaggagttgtggagttgaagttggaaaggaaggctggccccaataacataagtcttgaatgcttcaccagatggtctagaaaggcctagcaaagaagaattatttgcccagctctcatttattgaccaaggctgtattaattcataagaatcacagaattctaggtctgaatatgatcttggtggatatcacattcaaactctttttgtagttgaactaattaagtaagttttctataggccttgagcaagtgacagagttagttacaataatcataaacctttatcaaatattaattccatgttgtatactgttatgaatggtttacatgtcttaaatcatgaaatatgcctttaagtctgtgggagaagggtctatgaacatcttcattactgataaagaaacaggcacagagaaataaaatagcctgaggtcacaataaatggcaatgctgagatccatactcatttggatccaggaatcatgctcttaacgcgtatgcttttagaactcaagacccttgactaccagcttagagtggcaagtcccaggcaccctccttttccagtaacgtggttttttttttcacactgaaaccattgtgtgacggcactgaggaagggtggggtagaagtatggtgtgtttttagaacaagtcaaaggtaaaatgaatactatcacactaaacaccatgagcctttttttttttttttaagttcttgggtgaattttcatagtagtttgtgttcatttctattagcttttgaatggtgaatgaatgactccttgggcatttgtggtttcatttcttgctgggttattttgactcttctgcaaaatgactctgtttatcacctcatttggtttctactgtctaaattctggcaggatagaagctacacccaagatacacaggaagatatgatgccaacctcagaggagggcatatgtgaaattttgttttcagaaacatttttttgtctctattttggcaagcacatttgcagctgctgaactgtggtttaccctgacagttcatcatgagaccagctcctcagaatctggttctccctttgaaaggtgctgtgaagacataccatatttcattctctccttgtcctttccaagaataagacagttgtgtcacacaaaaaaagtgtcacttatttctttaaactaaatgtgttaccatctcattaaattatatcccaggatataatttatcacgagtttataaccaccactatttcatgagtttaaattttctccaatttcactttccatttaagcatgccttctaattccttgactttccactgctcaaaatcaatctacagctgggctcggtggctcacgcctgtaatcccagcactttcggaggccgtggcaggtggatcatgaggtcaggagtttgagattagcttggccaatgtggtgaaaccccatctctactaaaaatacaaaaattagctgggtgtgctggcacgtgcctgtattcccagctactcaggaagttgaggcggaagaatcgcttgaacccaggaggccgtggttgcatgagctgcctccgtgccactgcactccggactgggcaacagagtgagactccatctcaaaaataaataaataattaaataaattaaattaaattaaattaaattaaaataaacataaatttaaaaaatcaatctacactgtccttcagactcattagatctggagacaaagaccgtatgcaccacaaaaatttctccaagtggggtctgtgcgccagtggcataagcatcactaaagagcttgttaggggtgcagaatctcaggctccactcagacctactgaatcagagtctgcattttaacaccatctctgagtggtaagcacatgaaaatctgagaagtgctgctactagggtttgcttacatttgttcatcttcagaggttcctaaagcctggcctcttgtctgagatttccagctgaaagcatttccttgctcctcttctcatctctaatgaatatttacctttactactaacactccaagttttgcaatttttaaactcttattatcttttgtttttctttcagtatgaatgacccatattaaatcgcccttggtgaaagaaaattcttggaatactaaaaatcatgagatcctttaaatccttccatgaaacgttttgtgtggtggcacctcctacgtcaaacatgaagtgtgtttccttcagtgcatctgggaagatttctacctgaccaacagttccttcagcttccatttcgcccctcatttatccctcaacccccagcccacaggtctttatacagctcagctttttgtcttttctgaggagaaacaaataagaccataaagggaaaggattcatgtggaatataaagatggctgactttgctctttcttgactcttgttttcagtttcaattcagtgctgtacttgatgacagacacttctaaatgaagtgcaaatttgatacatatgtgaatatggactcagttttcttgcagatcaaatttcacgtcgtcttctgtatactgtggaggtacactcttatagaaagttcaaaaagtctacgctctcctttctttctaactccagtgaagtaatggggtcctgctcaagttgaaagagtcctatttgcactgtagcctcgccgtctgtgaattggaccatcctatttaactggcttcagcctccccaccttcttcagccacctctctttttcagttggctgacttccacacctagcatctcatgagtgccaagcaaaaggagagaagagagaaatagcctgcgctgttttttagtttgggggttttgctgtttccttttatgagacccattcctatttcttatagtcaatgtttcttttatcacgatattattagtaagaaaacatcactgaaatgctagctgcaagtgacatctctttgatgtcatatggaagagttaaaacaggtggagaaattccttgattcacaatgaaatgctctcctttcccctgcccccagaccttttatccacttacctagattctacatattctttaaatttcatctcaggcctccctcaaccccaccacttcttttataactagtcctttactaatccaacccatgatgagctcctcttcctggcttcttactgaaaggttaccctgtaacatgcaattttgcatttgaataaagcctgctttttaagtgttaactagtttgcctagtttgttattttgaaattatcatatgttttgttttctccccagtgagattacatgctccttcagggcagagtttgtgtcagatccctggagtatctagtgcattacttgacactcaataaatgaatgttcaaataaatcagaaagagcatacagtgcactgctgatataagtttcagcaaaccctctttctctatggcatctgatgacctgggcagatatcacctaatgtcaacagctgaattcttatgagagaatagagccctttcagaagctagctggaaatacctccttgtcccatggccaatatagatttcatacaaatttgcacacattatgagaataattttttggtaatgattacacttttctttctcaaagacatctcagattctgtattatagcaaaagctgttgcaaaagattctccctatagtacactgtaaatcttggatgtgcaaatcacattcatgtggtttagggtacatcccctggaggtgtacagtgcacacgtgcacagacacacatggcaaccctgacaaaaatgtttattccactaacacatcagggccaaggaacccaaatggacactactccttgtaattatgatgtatatagatttaaaaataaagttctatattcaagctctaggattcctatatgatcttaggaattacataatagtaatcccataaatcaagattcataatataaaattctccagaaaccttggtcttaacctccctgagacttacttcctatgcccataaaacaagaatgaaatttgccttgcttaccccacagggttattgtgatggtaccttaagtatgaaactgctttgtgaactgaatctgaaacacagactttttttttttttttcctcactcaaatcttacctttcatgctttcatggtgtaagattctggttcttatcctaaggctggaacagatggagctctgagtccttatcctgagattagaagccaggaagtctttcacttgtgttccaataggaactcagccctcagattttcactgcacagggtcagctctgccccctgcacttctgcttgcgggaggaggaagggcctgggacagggagtcagaggcatcagtgggaaccctgcctctgtctccgtgatgtgaccctggccagttgttactctctctgaacttcagatttatttatgaaatggggatcccattatcttcgtcacatgattgtgctccacattttatgaaataactcctcctatgctttactcagagtaccaagttcatgaaattgtcagagtcccaggaacacagaattattcattccttctgatttgttcacccaagatcaatgtgcctgggctgtattattgtagtttcctacagaaatagttcaccaaattaaaatctaatttttaaaaaattagctgggcatagtagcacatacctgtagtcctagctagtcgggaagctgaggcagaaggattgcttgagctctaatgatttaatgagaatagaaagaagcaagaaagaggcttcttgtccaaattgcactgtggaaaatgaataaatgtattctttagacatctatatttttccccttaaacttcctcccatctgccagttgacttctctgtacagttctttctccaaagttctttgcattgccctctttcaacttcagcaatttgatttttcccttctgttcaaatgtcctattatggacattttatggaaagaaaatctgccatcaccataacagcctacccaccatttatgacaaaggacagggaaattattaggagaaataatgagatctttacttccctttggcctttgtggccttgtctgatccagtgggccccaacattttatgagatatatacagccttccctgcgagactctgaaagggttttagttaaaagtaatataataattatcacgcgtgtcggtgtgaagagaccaccaaacaggctttgtgtgagcaatgaagcttttgaatcacctgggtgcaggtgggctgagtccaaaaatagagtcagcaaagggagatggggtggggctgttttataggatttgggtgggtagtggaaaattacagtcaaagggggtttttcacttgtgggtaggggtgggggtcacaaggtgctcagtgggggagcttctgagccaggggaaggaatttcacaaggttaatccctcagtcaaggtggcgcaggaacaaatcacaatggtggaatatcatcagttaaggcaggaaccagccattttcacttcttttgtgattcttcacttgcttcaggccatgtggatgtatacgtgcaggcttgggctcagaggcctgacatttctatcttcttatattaataagaaaaataaaacgaaatagtggtaaagtgttggggcagtgaaaatttttgggggtggtgtggagagataacgggcgatgtttctcagggctgcttcgagcaggattaggggtggcgtgagaacctagagtgggagagattaagctgaaggaagattttgtggtaaggggtgatattatggggttgttagatgaaactgtagcaggacaagacacagacaaaacccctcagacactgagttaaagaaggaagggctttattcagctgggagcattggcaagactcatgtctcaaaaaccgagctctccgagtgaacaattccttttcctcttaagggcttacaactctaagggggtctgcgtgagagggtcatgactgattgagcaagcagggggagcaagcagggggtacatgactaggggctgcgtgtactggtaattagaggaacagaacaagacagggattttcacagtgcttttccatacaatgtctgtaatctatagataacataactgattaggtcaggggttgatcttaaccaccaggcccagggtgtggcatcaggctgtctgcctgtggatttcatttctgccttttcatttttacttctttctttggaggcagaaattgggcataagacaatatgaggggtggtctcctcccttaaaacatttgtcgtatagaatgattggtgatggcctggatacggttttgtatgaattgagaaactaaatggaagacacaaggtctgcataagagaaggagaaaaacaggtattaaaggattaagaatcgggagaacccaggacatctaattagagtgcccaagggggttcagcataattacttgcttggttggcaaggtttttggctctatccttgagttttttttatgttgtcatataccaggccagattgatttaggtaaaaacaacactcttcatttaaaaatatgcagagtccccttttttagcagtgagtaaattgaggactcggtgattttggaggaaagagaaattgtaaagccagcaattgtttgttaaagaaggattagaaatggctaggagagagtgagtgagattgatagtgtggtggagatagctggggagaggtagagagtggcataagaatgggaacaagaataagagtgaatataaaagtaaagaatagggctttattagggtgaaagtattggagtgtaccttgtcactgaagatcttctatccactttaagagagacttaagggtggcggtttgaggtaaaaccaggagatatcagttatgatggtttggaggaaaagtataaatcagcactgtaaaaaagggcagggcatttacaagtagttgagaatggtgaataggagtatgactagacagaagattgtagggatgacaagtttttggggcacagttcaagttgggctggtgtctggaatgagactggggcctaataaaaaggagcgtccatacagaatcttaaatgggctgtaccttgtagcatttcgaggacaggcccgaattctgagaatggcaagtggtaaaagtactgtccagtcctttttaagttggaggctgagcttggtgaggtgtgtttttaaaagaccattaatcagttctacctttcctaaggattgaggacggtaaggggtatgaaggtttcactgaataccaagagcctgagaaactgcttgcgtgctttgactagtaaaggcttgtccattatcagactgtatagaggtgggaaggccaaaccaaggaattatgtctgacagaagggaagaaatgaccacggtggccttcttaggccctgtgggaaaggcatctacctatccagtgaaagtgtctacccagaccaagaggtactttagtgtcctgatttggggcatgtgagtaaagtcaatttgccagtcctggggttggggagattagctggacatgatcagcagggagagcacgtgtgttttcatgaagaactatgcctggataggtaatggatgaagaagaaatttgggttgactgaggtaatgggggctgtccatgaagccttgcggcagtacagcccaggtaagttgctgaggctgatgggtgtcagggtcagtccaagtgaaagtgaagagaggctgggatgaagggtgcaaatgaatagtaaagaaagcatgttttgagatccagaacagaataagggttatggaggggttttggagggaggtattgaggataggagagtatatgggtttggcaccatggcgtggataggcaagacaatttggttgataaggcacagatcctgaactaacctgtaaggcatgtccagtttttggacaggtaaaatgggggaattgtaaggagagtttacaggctttaaaaggacatgttgtaacaggcaagtgataacaggctttaatccctttaaagcctgttgtgggatgggatactggcgttgacccaggtaagggtgattaggttttaatgggatagtaatgagggtgtgatttgttgccagggagggagtagaggtgtcccatacctgtgggttaaggtagggggatatgagaggaagtggcaaaggagttgccacttttgggttgggaagaagggcagcaatgagatgtggctgtagtccaggaatagtcagggaagcaaataatttggttaaaatgtctcagcctaataagggaactgggcaggtggggataactaaaaagaagtgtataaaagaatgttgtttaaatcggcaccagagttggggagttttaaggggtttagaagcctggccatcaatacccacaacatttatgaagacaagggaaacaggaccttgaagagaaggtaatgtggagtgggtagcctctgcattgattaagaaggggacggacttaccctccactgtaagagttaccaaaagcatctgtgatggtccaggaggcttctgaggcgatcaggcagcatcagtcttcagccactaagccaagaagatctgggaaggagtcagtcagagagccttgggccagagttccaggggctctgggagtgggtgctgggcaagttggacagtccgatttccagtggggtcccacacagatggaacatggcttaggaggaatcccaggctgagggcattccttggcccagtggccagatttctggcacttgaagcaagatcctgatggaggaggtcctgtaggaatgcttgaccactgtggcttaggcattttgaagttcttgtgtactggagatgtggctggggtttctctcacagtggaggcaaggaattgcaactcagaaatatgttgctacttggctgcctctactctattattgtacgctttgaaggcaaggttaattaagtcctgttgtggggtttgagggccggagtctaacttttggagctttttctaatgttgggagtggattgggtaataaaatgcatattgagaataagatgaccttctggcccctctgggtccaaggctgtaaaatgtctaggagttgctgccaaatgagccatggagtgggctaggtattcatatttgatgaaaaaaagcctaaatactaactgagatgggagaggttggataaagaaaaaggagcattaaccttgactatgcctttagctccagccacctctttaagaggaaattgttgggcaggtgggggagggctagtcacagaatgaaactgtaagctggaccaggtgtgaggaggggaggtgatagaaggattatagggtggaggagcggacgctgaggaagaattggagcctgattcagcctggcggggagcgacctgaggaggagcagtctggggaagaggggagaggtcagatgggtcagtagaaaaggaagattggaaagactcagcgacacttggggttgggactgaggggacaggcaggagggaaagaaggaggatttgggatgagttgcattgggaacagagactagggagggaccgacgtgtaaaagaatgcccagatgtcaggcacctcagaccatttgtccattttacgacaagaattatttagatcttgtgggatggagaaattgaaagtgccgttttcaggctatttggaaccattgttgagtttgtattggggtcaagcggtattgcagaagaaagtaaggcatttaggttttaggtcagacgtgagttgaagaggttttaagttcttgagaacacaggctaagggagaaaagggaggaatggagggtggaaggtggcccatagtgaaggaggcaagcccagagaagagagggtggagacatggagagaaggggttggggggtacttgccccccaggagaggtggtgcttgccccccaggagaggtggtgcttgccacccaggcaaagtggtacttgccactaaggtgaaggatccaggcaggcgtccctgcagtgatcagacagctctgaaatgtgggtgaataatcaggcaggcatccctgcagtgattaaacatcaagggaagactgtctttccaagtccatgaccagtgctggagttttgggttcacagatagaacacgtttcctctgtctctaccagaaaaagaaaggaactgaaattaagggaagggagagattgaagcgtggtgccaagattgaaaggagaaagatgttgagggatagtgagagaggctggagaagagagtaaaaagaggccacttacccaatttaaaattggtgagatgttccttgggctggttggtctgaggaccagaggtcataggtggatctttctcatggagcaaagagcaggatgacaggggactgatctcccaagggaggttccccgatctgagttacggcaccaaatgtcacatggtctgtgtgaagagaccaccaaacaggctttgtgtgagcaataaagcttttgaatcacctaggtgcaggcaggttgagtctgaaaagagagtcagcgaagggagataggggtgaggctgttttataggatttgggtgggtagtggaaaattacagtcaaagggggtttttcacttgtgggcaggggtgggggtcacaaggtactcagtcggggagcttctgagccaggggaaggaatttcacaaggttaatccctcagtcaaggtggggcaggaacaaatcacaatggtggaatgtcatcagttaaggcaggaaccggccattttcagttcttttgtgattcttcacttgcttcaggccatctgggtgtatacctgcaggcttgggctcagaggtctgacaataatatttacttgacatcttggtttgaagcttgatctggtagtggtgttttcaataccaattgttttaacactggtagtaaccataatgatgataacagtaagtaatgtgatttcttttaaaagtttttaaatcttggttgagtgctgtggctcatgcctgtaactccaacaattagggaggtaaaaggcaggaggattgcttgaaaccagaagtttgagacgagcctgggcaatacaacaagaccccatccctaattatttttttaaaagtagctgggcagagtagcatatgcctgtagtcctagctactcagggagctgaagcagaaggattgcatgaactcaggactttgaggctgcagtgagctattattgcatccctgcactgcagtctgggtgacagaataagtacctatctctaataataataataataataataataataataaagtttgttaggttaaacttatcttggcatccagttatcttagtaggcatccaaatccctttttaggagaaagctatcttcttttgataagcctctaatatagcaggtgtgaccctacagacgtagtgttggcaggaactcaaacaatagtaatatgtaattaaggcactctgtgttaagaaaacttagaggagttaattttctctgctcccgtgagcacatgagaagaaaaaaaaaaagagagaaggtaatgaaagtagagagagaagaactagaaatgtgagaagctgaagagctctgtggcgggaggggtaggggtggcagaagcagcctggcctctggggactagtatggatttaaacagcatgactcctcctctgcatcacactaacctctgtaacatcccactaggaatacaaacccagacctgtatttaggttgctttgaaggaggagtttaaggtgaaggggctgcttctttagtttgggaaagtggatatgaagaaatagccataaaaggcaaaattgggacaaaatattttggtagaaacaaaatatttagaagaaaatcggtgctatggtgagcatgaaaattaagctctctgagaattttgagaactcttagagagggtttgcggccagtatttttaattcattttatctggattttagagagatggtacctgacatctggtttacattcctcatagcatttaatccccggccatagatggtattgtcctcattttaaattttaagaaactgaagctcagagatattagtttgtctaagttcatatagctagacagtgtctatagagttactgaatgtctgtttaatagataacgaaaggtagtttaaaagagctgtgtgtctaatgccatagagaaaagggaataaaaaattacttagaatagatttggtttcaaacactcttgctgaagtgggtagtccaaaagtaggcagccagttctcaattcacaacaaaatcactcttgaaagcaattttgagagaataggctatgtctcttgatttcagcatcctcggaactgacccctatgtcaggaagaaaatagatcaaaatagttgttcaatgacaaaggacacaggcatgtttagcaaaaagagaggcttaaggcatgggacagttgtcttcaattaaccaattaaacatttgctgaaaatgtacgactgcaagacatactaccaggggctatggacacataagggcagagttcctatccctggggatccagcatctggaaggggagggaaggtaaacaccctgaactgcaagctaaggctgtgtgtgctatggctatgctaagtgtgcaagctcagagatgctgcggctcagaggaggaagagatcacttggcaaagggcaacagaattcagaggcaaaattagatcctagatcaggtttaattagaaaccaggaggagagtctagtatctaagacaaaggtattgaagttagagatgttggacaggttatactgccttggcagagacctggggatgaaaaagagatagagtggctttcaactctaaagcttataaagtttgtactctagtttctgggaaaacttgagcaagagtggaacaggatcacaatggtattctgggaagattaaggtgtcagagggtttaggagtggagataaacggaagcaggggagaccagtcagtgaatgtaattattcaggcgtgatgatgagggtggggccaggaaggttcaagtgtaaaccattgtgaaggctttggtctctgactagttggggtcagggagcgggggggttggctgggaggaggtgtaacaaagtattcagaaaggaaaatataaaacaacagttctggctaaatatgacttatgcaaatgttccatttttcaaagatcttgtaggaaagtccctcctttgttatatttcctctgcatgaacttagctgttta

SEQ ID NO: 1418 - DNA, 2324 bp, Homo sapiens
ctccctttgggcaaggacctgagacccttgtgctaagtcaagaggctcaatgggctgcagaagaactagagaaggaccaagcaaagccatgatatttccatggaaatgtcagagcacccagagggacttatggaacatcttcaagttgtgggggtggacaatgctctgttgtgatttcctggcacatcatggaaccgactgctggacttaccattattctgaaaaacccatgaactggcaaagggctagaagattctgccgagacaattacacagatttagttgccatacaaaacaaggcggaaattgagtatctggagaagactctgcctttcagtcgttcttactactggataggaatccggaagataggaggaatatggacgtgggtgggaaccaacaaatctcttactgaagaagcagagaactggggagatggtgagcccaacaacaagaagaacaaggaggactgcgtggagatctatatcaagagaaacaaagatgcaggcaaatggaacgatgacgcctgccacaaactaaaggcagccctctgttacacagcttcttgccagccctggtcatgcagtggccatggagaatgtgtagaaatcatcaataattacacctgcaactgtgatgtggggtactatgggccccagtgtcagtttgtgattcagtgtgagcctttggaggccccagagctgggtaccatggactgtactcaccctttgggaaacttcagcttcagctcacagtgtgccttcagctgctctgaaggaacaaacttaactgggattgaagaaaccacctgtggaccatttggaaactggtcatctccagaaccaacctgtcaagtgattcagtgtgagcctctatcagcaccagatttggggatcatgaactgtagccatcccctggccagcttcagctttacctctgcatgtaccttcatctgctcagaaggaactgagttaattgggaagaagaaaaccatttgtgaatcatctggaatctggtcaaatcctagtccaatatgtcaaaaattggacaaaagtttctcaatgattaaggagggtgattataaccccctcttcattccagtggcagtcatggttactgcattctctgggttggcatttatcatttggctggcaaggagattaaaaaaaggcaagaaatccaagagaagtatgaatgacccatattaaatcgcccttggtgaaagaaaattcttggaatactaaaaatcatgagatcctttaaatccttccatgaaacgttttgtgtggtggcacctcctacgtcaaacatgaagtgtgtttccttcagtgcatctgggaagatttctacctgaccaacagttccttcagcttccatttcgcccctcatttatccctcaacccccagcccacaggtgtttatacagctcagctttttgtcttttctgaggagaaacaaataagaccataaagggaaaggattcatgtggaatataaagatggctgactttgctctttcttgactcttgttttcagtttcaattcagtgctgtacttgatgacagacacttctaaatgaagtgcaaatttgatacatatgtgaatatggactcagttttcttgcagatcaaatttcacgtcgtcttctgtatactgtggaggtacactcttatagaaagttcaaaaagtctacgctctcctttctttctaactccagtgaagtaatggggtcctgctcaagttgaaagagtcctatttgcactgtagcctcgccgtctgtgaattggaccatcctatttaactggcttcagcctccccaccttcttcagccacctctctttttcagttggctgacttccacacctagcatctcatgagtgccaagcaaaaggagagaagagagaaatagcctgcgctgttttttagtttgggggttttgctgtttccttttatgagacccattcctatttcttatagtcaatgtttcttttatcacgatattattagtaagaaaacatcactgaaatgctagctgcaagtgacatctctttgatgtcatatggaagagttaaaacaggtggagaaattccttgattcacaatgaaatgctctcctttcccctgcccccagaccttttatccacttacctagattctacatattctttaaatttcatctcaggcctccctcaaccccaccacttcttttataactagtcctttactaatccaacccatgatgagctcctcttcctggcttcttactgaaaggttaccctgtaacatgcaattttgcatttgaataaagcctgctttttaagtgttaa

SEQ ID NO: 1419 - DNA, 1119 bp, Homo sapiens
atgatatttccatggaaatgtcagagcacccagagggacttatggaacatcttcaagttgtgggggtggacaatgctctgttgtgatttcctggcacatcatggaaccgactgctggacttaccattattctgaaaaacccatgaactggcaaagggctagaagattctgccgagacaattacacagatttagttgccatacaaaacaaggcggaaattgagtatctggagaagactctgcctttcagtcgttcttactactggataggaatccggaagataggaggaatatggacgtgggtgggaaccaacaaatctcttactgaagaagcagagaactggggagatggtgagcccaacaacaagaagaacaaggaggactgcgtggagatctatatcaagagaaacaaagatgcaggcaaatggaacgatgacgcctgccacaaactaaaggcagccctctgttacacagcttcttgccagccctggtcatgcagtggccatggagaatgtgtagaaatcatcaataattacacctgcaactgtgatgtggggtactatgggccccagtgtcagtttgtgattcagtgtgagcctttggaggccccagagctgggtaccatggactgtactcaccctttgggaaacttcagcttcagctcacagtgtgccttcagctgctctgaaggaacaaacttaactgggattgaagaaaccacctgtggaccatttggaaactggtcatctccagaaccaacctgtcaagtgattcagtgtgagcctctatcagcaccagatttggggatcatgaactgtagccatcccctggccagcttcagctttacctctgcatgtaccttcatctgctcagaaggaactgagttaattgggaagaagaaaaccatttgtgaatcatctggaatctggtcaaatcctagtccaatatgtcaaaaattggacaaaagtttctcaatgattaaggagggtgattataaccccctcttcattccagtggcagtcatggttactgcattctctgggttggcatttatcatttggctggcaaggagattaaaaaaaggcaagaaatccaagagaagtatgaatgacccatattaa

SEQ ID NO: 1420 - DNA, 51281 bp, Mus musculus
  misc_feature (3889)..(5506): n = a, g, c, or t.
  misc_feature (12248)..(15107): n = a, g, c, or t.
  misc_feature (34241)..(34260): n = a, g, c, or t.
  misc_feature (35928)..(35947): n = a, g, c, or t.
actagatttaaaaggctgaatatgacctcacaggcaggcctgaggatgactgatatgtattgaatgtcaactgcgtactatgaacagttcgcgagcctgaataaagcaatgtgtaaaaatagacacagtactggccttcacggaacttatagtctagtgtaaggcgtcagaggctgccacatcatttcacagataagtagagagttgtaactatgataaaggctctaaagaaggtttgaacagagcatgaggtgggagattgtacagagtgtgaactgggggtgtgcacagagtaggaagtggggtttgtacagtctaaagtgggggtgtatacaaagtaggaagtagggggttgtatagagtgttaggtggaactttgaagagactgtgaaggggatggattttctgaatcagactagataggaaagcctccctgaggacaaatctatatggggaggtggttttggggacagaagagaggaacagaaatccaggcagagaacagaaacatttgtcataactccccctttccagggcctgcggcagtctgtgactgggtctaggaataatcaacgtgagtctccagaatgagtccccccaccccccacatgcaatcctaagagattttttattttgagagtctaagccttgtgtcctgaaatacttccaaacacatcctaaccactagctgggtgaccttgaacagatttccctttaagcatcaatggtctcatttgtaaagttggggtgacgtgttccttgaagaatgtgaaggtgacattcaataaagcaagtataaacgtgtgcatgacagccagacacactaacagaagcgagcaggtgggcgtggtgtgtttggctcaggaagattttcaggcacaaggaagatttgcagggcgtagtagggaagcctgacccaaaacatagggacatggtgctttgaatgcaaattgccctcataggctcatgtgtttgcatgcttgggctgtagctggtggactgtttggggaaggattgggaggtatggccttgttggagatgtgtcatttgggtaggctttgaggttacaaaagaacactctgcttccgagttagtggaaaaagcatctgcccccagggaggccagtttcccatcaagccattgcttctgtctcgtgtcactgtgactccctacaacctgcatgtccatttgactagactctgatggacttctggtcgaccaagaccacccaggagccagaagatagcagggcataaaagacaacacataaaaatctcccagggcacagtccaggaaagggaagacatctaggaagtgaagaaaagacagattttttcatttctgttttagtgactggctttgttctaagcatgttacatggattgtgtcctttgcttctcatgataaaaaacaaaagtataggtatgtatgtgtgagtgcataagtatgcatagacacacacagatggagggtgttaaatttctctggcaaagcagtaaaaatgtctctcttgcttagacgaaggcagcctactgacgtagagttaaattatttcggtaggtgttaatattgcagcttttaaagaagctgcggtagaaaataggactcattaatgtgcagtgtgctgagctccaggctgtggacagggacagggacagcaggcaggctgagctattgcctctgctgcagttctcagttctgctccgtcactgcctgcgtgggtggtgtgtgatcaggagacaggtggcctgcttctgagagccacgggaatggctgtactttgaccaacagcagggacactggcagaggagctcttccccattctgccttgtattgggaagaccagaaataatctcaggaaataaacacacactgtagtttgtgctcctagaccttagtgtgcctaacagccaacacaaagctcattaaagaggcaggttcctgggtgccagctgaaggacttcattcagttaagctgatcagggatttagtaatctgtctttcagttacttcttcagggatgcagggttgtctattagttcagtgtaattcttttgagtgaaaatgtggtgggtgtcaagctgataaagacaggaagattctctggtgaccagttaccgtatttaaacccattgatgtaaagcacattgtagaaaggtgttaagggagtaagtagaccaatgcgagaatgtgtacacatagttaaagggtcatgagcgtgggtgtgggtcttagccagatgtgatcagagtactctgcaaacggaaacaacaggagacagaatcgatgatggtatagaaagactggcctccctaggggtgggaggtgagcgcttcttccagtaacttctagccttatccatctcatcttcaggatgatcagaaggccggagtcagtaaatataatatgaattgtctctcccgaagttggaatggaccaccttcgttctctaaaggagatacttaccctgtaataagatgttacgtcctctgagagacctgaccaatacattggaattgatcatcaaaataaataaataaataaataaataaataaataaataaataaataaatgggagagtgtttttaagatcttttgtactagcggcataggcttgtatgtgaagatctcctcacccactgttctctaactgtaaacatcactgaacctctcaaaacctaagcctatacgtcaactaaatggaaatgatgaaaggtggagtctgtgcccaggaacacaaatatgaactgggatcatattaagccccagggaagaatatatatttcttgtttctctggtgcctgctggattatgtggtgtctatacgtattatataaaatgatgcacacgtgaaaggtactgttattacttcacacgcaattaagcttgagctattataaaggtgacttgaattaggagatttgtcatggaatggcatcacaggagcactttctggttgtgtactatccctccccaattttcccattcttgaatccagaactctctttgggacattctgttagcatgctcttcattgcgaacttcaagttgcactaggaattgtgatcttgtttgctccatcgaaagtgctatatttaccaaagcagtgatcttcacacatctgtcagtctctggcctccattcatcctcacagatcccagacatctatttaagagacaaatcacaggagagcttcctgcattgggcatttcagctaacttgacttaatatcactattcactccaacacacattcttgggtagtctaggctccactcctccaggaaaatggcttctccatttctctgctgcttcaggtgctcctgagtgcccctccccaagtcatgctccccctttagtgttcagtccttgccttcatgactgctccccctggaagcttgctctcagacatctccacaatcacactcatccacgtgtctaatggaaccccatagaatgacagaactgtatcatcaagctttgttcattccgtaaaccctgcagttacttctctacacaaagattctctgctgcatgcagagcccaggggttgctcattaccctgatttacttgatgatgccctcaactccggtgtctagtgtttctctgaggtcacaatgccaaccttcatttgtatcaagcattacagtttataatgtctttaaaagactattatttcttattattttattagatatttattttatacatttcaaatgttgtcccctttcctggtttcccctctgaaaacctcgtatcctctcccccctcctcctgctcaccaacccacccacacccatttcctggctctggcattcccctatactgggcatagagtcttcacaggaccaagggcacctttgcccattgataaccgacaaggccatnnnnnnnnnnnnnnnnnnnnnnnnnnnnnnnnnnnnnnnnnnnnnnnnnnnnnnnnnnnnnnnnnnnnnnnnnnnnnnnnnnnnnnnnnnnnnnnnnnnnnnnnnnnnnnnnnnnnnnnnnnnnnnnnnnnnnnnnnnnnnnnnnnnnnnnnnnnnnnnnnnnnnnnnnnnnnnnnnnnnnnnnnnnnnnnnnnnnnnnnnnnnnnnnnnnnnnnnnnnnnnnnnnnnnnnnnnnnnnnnnnnnnnnnnnnnnnnnnnnnnnnnnnnnnnnnnnnnnnnnnnnnnnnnnnnnnnnnnnnnnnnnnnnnnnnnnnnnnnnnnnnnnnnnnnnnnnnnnnnnnnnnnnnnnnnnnnnnnnnnnnnnnnnnnnnnnnnnnnnnnnnnnnnnnnnnnnnnnnnnnnnnnnnnnnnnnnnnnnnnnnnnnnnnnnnnnnnnnnnnnnnnnnnnnnnnnnnnnnnnnnnnnnnnnnnnnnnnnnnnnnnnnnnnnnnnnnnnnnnnnnnnnnnnnnnnnnnnnnnnnnnnnnnnnnnnnnnnnnnnnnnnnnnnnnnnnnnnnnnnnnnnnnnnnnnnnnnnnnnnnnnnnnnnnnnnnnnnnnnnnnnnnnnnnnnnnnnnnnnnnnnnnnnnnnnnnnnnnnnnnnnnnnnnnnnnnnnnnnnnnnnnnnnnnnnnnnnnnnnnnnnnnnnnnnnnnnnnnnnnnnnnnnnnnnnnnnnnnnnnnnnnnnnnnnnnnnnnnnnnnnnnnnnnnnnnnnnnnnnnnnnnnnnnnnnnnnnnnnnnnnnnnnnnnnnnnnnnnnnnnnnnnnnnnnnnnnnnnnnnnnnnnnnnnnnnnnnnnnnnnnnnnnnnnnnnnnnnnnnnnnnnnnnnnnnnnnnnnnnnnnnnnnnnnnnnnnnnnnnnnnnnnnnnnnnnnnnnnnnnnnnnnnnnnnnnnnnnnnnnnnnnnnnnnnnnnnnnnnnnnnnnnnnnnnnnnnnnnnnnnnnnnnnnnnnnnnnnnnnnnnnnnnnnnnnnnnnnnnnnnnnnnnnnnnnnnnnnnnnnnnnnnnnnnnnnnnnnnnnnnnnnnnnnnnnnnnnnnnnnnnnnnnnnnnnnnnnnnnnnnnnnnnnnnnnnnnnnnnnnnnnnnnnnnnnnnnnnnnnnnnnnnnnnnnnnnnnnnnnnnnnnnnnnnnnnnnnnnnnnnnnnnnnnnnnnnnnnnnnnnnnnnnnnnnnnnnnnnnnnnnnnnnnnnnnnnnnnnnnnnnnnnnnnnnnnnnnnnnnnnnnnnnnnnnnnnnnnnnnnnnnnnnnnnnnnnnnnnnnnnnnnnnnnnnnnnnnnnnnnnnnnnnnnnnnnnnnnnnnnnnnnnnnnnnnnnnnnnnnnnnnnnnnnnnnnnnnnnnnnnnnnnnnnnnnnnnnnnnnnnnnnnnnnnnnnnnnnnnnnnnnnnnnnnnnnnnnnnnnnnnnnnnnnnnnnnnnnnnnnnnnnnnnnnnnnnnnnnnnnnnnnnnnnnnnnnnnnnnnnnnnnnnnnnnnnnnnnnnnnnnnnnnnnnnnnnnnnnnnnnnnnnnnnnnnnnnnnnnnnnnnnnnnnnnnnnnnnnnnnnnnnnnnnnnnnnnnnnnnnnnnnnnnnnnnnnnnnnnttttggcaatgtttggaggctcttctggttgttacaatggagacgacaggagtacgtctgaaatcttattgatagaggccaggcatgatgctcaagtgctgcagtattcagaatcctccacagcagagattcactgggtctaaagaatcagtagcagtggagtgggggaaacttgatgctaggtcattaagctttcttacagggattctactctgatagttcccacttggaatccttcttctcttcaggactacatgcagtgtcctatggtcctactgtgacagttgagtacctcgggcaataaaatctcctcactaagagaaccaaactgattatttcaagtctgtacagtgtcctgcgaaaacagaggcaagttaacattgaccttttgaaatgtatttacttttttttatgtgcattgatgtttttttctgaatgcatgtctgtgtgaggatgttagatcttggagttacagatagttgtgagctgccatgtgggtgctgagatttgaacccaggtcctctggaagaacagtcagtgcttttaaccactgagccatctctccagccccaccattgacttttttaaaagctttgattgtctcagccccaaattgtttaccttctaactgtttgaagagtaactggtctaccacatagaaagcaggtttcaagcgcatagttgttttaccttattctgcatcttccagtaatttctcagcatcatttctcacaattctctcattgcctctagtatgtgcattttacacctcgttggaagctgctgggactaagtccagatgcttgaatggtgggttccacaacagaaaagcaatggatcatgcaaaagtaactgtcagatcggtgtgaattcaggccccaaaaatgtattacctaagcacttgtgggtttccacagcttctataactcaggcaatgacaagtgctggcgaggagatggaggaattggagccatcatctgatgctgctagggatgtaaaatgatgcagctgctttggaaggcatcctagtagttcctcatcaggttaaacataacgttaccattagctcagcataagagtggaaacagccgggtgtcacccttatgaatggttaaacaaaactcatatattcacacagtggaatcaggaaggaagtacaaatacatgccataacttggatgaacattcaacataaaccaggttaaagaatttggtcatgaaccatcacattttgaatgattccattaatatatccagagtagaaaaattcatagaaatagaaggagattatttgttgccttgggctgaagagttgaggagaaacagtgaccacgaactggttgaggatatcttgatgactaattgaaatggcctcaaactgattgtcaagatggttataaaactctttgactatatactgtcagtgtgtgatataccttaactggtggtgtacaaattagatctccataaagctactgataaataagaaataaagaaaaagaaggaagagaaagagaagccaaagaaaagacttgtgtagtctcttgattatcccttggctgcatttcttcaaagcctcccaagttattaggaatgtgaaggagtgaagcctcatctctctccttgccttagtaagaactaagaacccgatctttagttctggttataaattaaattatctttaggcagattaacaagagacgaggcatacaagttttactaactttatgtgtctgggaaatttccacaagacagtgaagtctgaaaaaaaaaaagtccaaagcaagactcttttctactttgtaaacaaagagtaataaatcttagggtagaggctagacataagagaatgactaaacacagggaaaacagtggagagcaaatatacggaagaattcaatgaagcaaggcttgtctgcagtcccgactggcacctggctctgagctgataaagctagcatcagttaggaatgattaatgccctgtcattaggcagaaatgagaaaagcagaaagtttctctgtgttggaatatttttaaggccaataaacatcaatgttttgggttcctttggcttccaggagaaatatcctctagtagtggtgagctccagctttggagttacgatgactgagtgggattagataggcttccggattactctcttctcccaccagtgtggatcccagaacttgggtgcagtatgaggactctcccttcagcatgcatcagaccttctgggggcttctcaaactatacttggctgtattccactgacagagtgtctgaggcagggggattgagtgagcagagagagagtctacattcttaacaagtttcttggtaacaaccatgctgctggtcgtagaagaacaatctgagataatatttagccccctaggcttgtagacatactttgcaaacaacacagaaatccatagtttaaattagttatgtatgttaacataaaatgctttataaatattttatttgtaatgtccaaatgttgatctaaaaacataactgcagttttgataaaatgataagaaggattgaatcatggaatcaaaagacccaacccatacatctctagctctagtaattgaggtaaagaatttttcagactataacatactcaatagtgaaaaattaataatggttcctcagtatagatcatggggttataaaggaaatgtatgataacctacctgaaaacacattgcaaatcctaaatgcacttctcctttggctcttcttcttcttctgtctgttctgacctattctggtttttatttatttatttgtttatttatttattattattatttagattcttatttgtatccttataagtgagagaaagatgtggtgtagacttgggtgggcggggaaatgggaagaatctgggaggagttggagaatcataatcatactatgttatattttaaaaatctactataaatataagataaatgcaaattaaaaagagatactccaagtgattcaaaatgctagaataggtaagacatttttaaaaatgtgttccataccaaaaatctaatgaaaaaatttctcaaaatcattagccaggagacaaaaatattcatgccaaactgccgctatacgcctattaaaatgaccaaaatgtaaaagaaaggataattttctggtgccatagcacagacagcttcttttaaagtttgacagtctcttacatagcaacctggaaatcagtcatgagtatttactgaagcaaaatgaagaagaaactttatacgaaaacctctgtgcacttatagcaattttattcgtaagcacttatgcatagttatatataaatttttacaaatgagatattccacatgtgcttcagatgatacctttgaacgggacacccatactgtggaacccttctcagcaattacaagaggtcagtgactggcagcacagtcgagtctcaaaagcaggggtaacagagactgacccgtgtggtgtgaccccagttattaacaatctggaacaggcaaaactgtagagacgaacatccgattgttgggtagcagaactaggtatcgggaacaaagaggatgcagagggctatgaggaggtgctctggactatccagtctactctatagcatgatttcagagctgcctgcaggactgtatgctacacagttgaaaagctggcctttattttatacacttcacctcaacaaacagaaaagtcaatgtaaagtttgaaagtgccagctgaaaaaacttaccattcatttgagcttaaccagttccatacttaagccagagctgaagggaccactttcagcagctcaggcagatgctgaagcagagataacgccccgctgctctctccatggaccaatagcacttctacctgaacgttagacattttaacagtagacctgaagacagatcatctgcttctacccccaattaaaagacggactaagaacataaaaagaatccaggcacctaggtttgcagaaatctaaaggttgagttcctttaacttatcaacgtttgtgttttgaaatctccgcctggatttccgtataattctagagagctaagcaggagaacagctaccagatacctggtttgctagtaagaaggggcgtggcagaggggcagcatgccgagagatgagggaaggataggtaggcaattgagggggtctttctcaggtgtttctgagcagagtggagcagctgcctctggtccctctccgtgaagtgattctctggggagatttccttgatttacatgttccttgcatgttcatagaattccaccttaaaacaagctggacgcaagcaaggccagtttctcagcgtggaaaagcttttgcttgagcaatgacacactgcagttggatccagttcacccacatctgggaaccacatgtcagcggcagctgtataaagtcagcccagcaaactgagggtgacattttttttgccagaagccgggcagtatggacctcactcttctgtgggttcttctgccactggtgaccacagcctggggccagtatggtggctacgggtacccataccagcagtaccaggactacggtgatgatggatgggtgaatcttaaccgccaaggcttcagctaccagtgtccccacgggcaagtggtggtagctgtgaggagcatctttagcaagaaggaaggctctgacagacaatggaactatgcctgcatgcctacaccccaaagcctgggggagcccactgagtgctggtgggaggagatcaacagggccggcatggaatggtaagaagcagagagtgctctagagatgggaacatctgtgtatgtactgcatgggagaagtttggtccttaaaatagcagggctcataacctgggcacatcctaaacttgctattgcatgctctggcgggcaggtgtgtacaatgtagataacattgtaaggtgaaaaaccaggatgggggtatgtcccatgaaggatggatctggttctactccttcaaaggccatccctaggctcagtgtgtcccgcaagctgggtgtgtgtacgcagaatgcttaccagacttccaaaatagagatgtcttaaggaatttatagaaagtgggcatccctgtgacatgggaataacacttccattttgggatgatttaccgttttccaaaaatactgctccagggtggttgggacaaaataaacaattgggtcctcagtatccatatcctgaaaaaaaaatattgattcaaagtaagtgattgggtaaacaagactgagaactagaaacaaagggtcctgaagttaagtagtgctctgctgttctgatgaaatatgttctggcgagttttactactgagatttctctgtctccctctctctccctttctcttgaatttaaatagcctctgttgctaggatatagtttaccaaaggtttttagaggtactgtcctgacttctgccttttgcctaatcattggaactgcattggtcccagtttgtgcttctctgtggtgtttgactatcccagccctggcatttgctcagaagcccatcttaagagacaggggtggctatactggtcattcatagctgtccaaatggagcccaaatttcagggcttagggagatggtggaggctgaccctaggagaggcagactgagggaggaggtagcccagctggaaggctgccaggtgtgccctctgctgaacaagacaactgcatgaggggctcctgcagggcactggcagagtgagcatctgggatggatcaacataaaacattagtggtgatactttcagccatccagggagaaatgccctgagcatacatcacaccacacactacattatctgatctgatctaatgctttaagcaagcctataaatcatgctgtaggttggcaaactgtggtctggagataggtgggtttccttagctagaaagacaagatttggatccagaaagtctgagctacagcggtgggcttccaagagcctgctgcctccaccctaagtggactcctgttgacagagccagggccccagaaccacactcaagctgagagaaggtgggaactacagggactggcccagtgtggtaagtggcagtttgattagagctctgctcctgaggacagggcctatctacccgtgttataggcagcattataggaacagaagcagactgaagaatctgtagaggcctcttgagcagggctgttaggccatccttctccattccctctgcttctgccaaacagatccaaacccccttcagacacagatgactcagagaccaaacttgtcttgaggacagaggacagaccctggtgagtcccagcaggcaggctcattgcctggcttcaagggtagaaatgacctagttgtaactgcctgtccagtccacccaccccaagggaccatcacatagacgggccagctttctaacctcttgaaagagccacagaaggacagcactgggtgaagattgcctaacccctaactgggggcagggcaggggggagccctggggtgagtcacaagctgggttttggttctggtgctaatgataaaatgtaatgggaccttaggccaagcttcagctgtctccctgctgctgcctttggaagatgaaccctcaggctttgcagtctctacacaaagcagccactcacttcagcgtgcgcttggcttttgcttgcattctcttgaactgtgtgttcaccnnnnnnnnnnnnnnnnnnnnnnnnnnnnnnnnnnnnnnnnnnnnnnnnnnnnnnnnnnnnnnnnnnnnnnnnnnnnnnnnnnnnnnnnnnnnnnnnnnnnnnnnnnnnnnnnnnnnnnnnnnnnnnnnnnnnnnnnnnnnnnnnnnnnnnnnnnnnnnnnnnnnnnnnnnnnnnnnnnnnnnnnnnnnnnnnnnnnnnnnnnnnnnnnnnnnnnnnnnnnnnnnnnnnnnnnnnnnnnnnnnnnnnnnnnnnnnnnnnnnnnnnnnnnnnnnnnnnnnnnnnnnnnnnnnnnnnnnnnnnnnnnnnnnnnnnnnnnnnnnnnnnnnnnnnnnnnnnnnnnnnnnnnnnnnnnnnnnnnnnnnnnnnnnnnnnnnnnnnnnnnnnnnnnnnnnnnnnnnnnnnnnnnnnnnnnnnnnnnnnnnnnnnnnnnnnnnnnnnnnnnnnnnnnnnnnnnnnnnnnnnnnnnnnnnnnnnnnnnnnnnnnnnnnnnnnnnnnnnnnnnnnnnnnnnnnnnnnnnnnnnnnnnnnnnnnnnnnnnnnnnnnnnnnnnnnnnnnnnnnnnnnnnnnnnnnnnnnnnnnnnnnnnnnnnnnnnnnnnnnnnnnnnnnnnnnnnnnnnnnnnnnnnnnnnnnnnnnnnnnnnnnnnnnnnnnnnnnnnnnnnnnnnnnnnnnnnnnnnnnnnnnnnnnnnnnnnnnnnnnnnnnnnnnnnnnnnnnnnnnnnnnnnnnnnnnnnnnnnnnnnnnnnnnnnnnnnnnnnnnnnnnnnnnnnnnnnnnnnnnnnnnnnnnnnnnnnnnnnnnnnnnnnnnnnnnnnnnnnnnnnnnnnnnnnnnnnnnnnnnnnnnnnnnnnnnnnnnnnnnnnnnnnnnnnnnnnnnnnnnnnnnnnnnnnnnnnnnnnnnnnnnnnnnnnnnnnnnnnnnnnnnnnnnnnnnnnnnnnnnnnnnnnnnnnnnnnnnnnnnnnnnnnnnnnnnnnnnnnnnnnnnnnnnnnnnnnnnnnnnnnnnnnnnnnnnnnnnnnnnnnnnnnnnnnnnnnnnnnnnnnnnnnnnnnnnnnnnnnnnnnnnnnnnnnnnnnnnnnnnnnnnnnnnnnnnnnnnnnnnnnnnnnnnnnnnnnnnnnnnnnnnnnnnnnnnnnnnnnnnnnnnnnnnnnnnnnnnnnnnnnnnnnnnnnnnnnnnnnnnnnnnnnnnnnnnnnnnnnnnnnnnnnnnnnnnnnnnnnnnnnnnnnnnnnnnnnnnnnnnnnnnnnnnnnnnnnnnnnnnnnnnnnnnnnnnnnnnnnnnnnnnnnnnnnnnnnnnnnnnnnnnnnnnnnnnnnnnnnnnnnnnnnnnnnnnnnnnnnnnnnnnnnnnnnnnnnnnnnnnnnnnnnnnnnnnnnnnnnnnnnnnnnnnnnnnnnnnnnnnnnnnnnnnnnnnnnnnnnnnnnnnnnnnnnnnnnnnnnnnnnnnnnnnnnnnnnnnnnnnnnnnnnnnnnnnnnnnnnnnnnnnnnnnnnnnnnnnnnnnnnnnnnnnnnnnnnnnnnnnnnnnnnnnnnnnnnnnnnnnnnnnnnnnnnnnnnnnnnnnnnnnnnnnnnnnnnnnnnnnnnnnnnnnnnnnnnnnnnnnnnnnnnnnnnnnnnnnnnnnnnnnnnnnnnnnnnnnnnnnnnnnnnnnnnnnnnnnnnnnnnnnnnnnnnnnnnnnnnnnnnnnnnnnnnnnnnnnnnnnnnnnnnnnnnnnnnnnnnnnnnnnnnnnnnnnnnnnnnnnnnnnnnnnnnnnnnnnnnnnnnnnnnnnnnnnnnnnnnnnnnnnnnnnnnnnnnnnnnnnnnnnnnnnnnnnnnnnnnnnnnnnnnnnnnnnnnnnnnnnnnnnnnnnnnnnnnnnnnnnnnnnnnnnnnnnnnnnnnnnnnnnnnnnnnnnnnnnnnnnnnnnnnnnnnnnnnnnnnnnnnnnnnnnnnnnnnnnnnnnnnnnnnnnnnnnnnnnnnnnnnnnnnnnnnnnnnnnnnnnnnnnnnnnnnnnnnnnnnnnnnnnnnnnnnnnnnnnnnnnnnnnnnnnnnnnnnnnnnnnnnnnnnnnnnnnnnnnnnnnnnnnnnnnnnnnnnnnnnnnnnnnnnnnnnnnnnnnnnnnnnnnnnnnnnnnnnnnnnnnnnnnnnnnnnnnnnnnnnnnnnnnnnnnnnnnnnnnnnnnnnnnnnnnnnnnnnnnnnnnnnnnnnnnnnnnnnnnnnnnnnnnnnnnnnnnnnnnnnnnnnnnnnnnnnnnnnnnnnnnnnnnnnnnnnnnnnnnnnnnnnnnnnnnnnnnnnnnnnnnnnnnnnnnnnnnnnnnnnnnnnnnnnnnnnnnnnnnnnnnnnnnnnnnnnnnnnnnnnnnnnnnnnnnnnnnnnnnnnnnnnnnnnnnnnnnnnnnnnnnnnnnnnnnnnnnnnnnnnnnnnnnnnnnnnnnnnnnnnnnnnnnnnnnnnnnnnnnnnnnnnnnnnnnnnnnnnnnnnnnnnnnnnnnnnnnnnnnnnnnnnnnnnnnnnnnnnnnnnnnnnnnnnnnnnnnnnnnnnnnnnnnnnnnnnnnnnnnnnnnnnnnnnnnnnnnnnnnnnnnnnnnnnnnnnnnnnnnnnnnnnnnnnnnnnnnnnnnnnnnnnnnnnnnnnnnnnnnnnnnnnnnnnnnnnnnnnnnnnnnnnnnnnnnnnnnnnnnnnnnnnnnnnnnnnnnnnnnnnnnnnnnnnnnnnnnnnnnnnnnnnnnnnnnnnnnnnnnnnnnnnnnnnnnnnnnnnnnnnnnnnnnnnnnnnnnnnnnnnnnnnnnnnnnnnnnnnnnnnnnnnnnnnnnnnnnnnnnnnnnnnnnnnnnnnnnnnnnnnnnnnnnnnnnnnnnnnnnnnnnnnnnnnnnnnnnnnnnnnnnaacatctctaaagccccatttcatgtataaagcaggggaagtatcatgctagcaatttttgcccatttcatagaattgttttgatgattaaaatgactaaacagataccatatttaacagaatactcaaccatgtaactccttgtgaaggtttgttcatgatcactgttagggacacttggttctctgagacaagccacacctagctagtaagtttcaaaatggaagtggcaggatacatggacttttggaatatataattcagttagaatctatgaatatgaaatgtacaatttcaagcatcttgaatacttgccacaacttaatagatactgagctggcattatgccaacaggttataaagtagtttaataacttttgattatgagccctccacccttaagcctgcttgctgtcttttcatagtctgaaagtttaggtttaaaaggacatatcacaaaacaagcgggatctcctccaatgccctttgaatagtcgctactgactgcttttctacagtacatctttctgcctgacaggtcatttctgcttaattcttggtagacagtccagcagctctagaacatggagtctggtgacagaactcatatctaggaacagcaagaacagagcagcctgcgtacagctgaacgttattttaaaagaccgttcatgcccccatcattggggcaggaaaataagtgatgcagtatttatcttcaaaaagcttgtcttgtcacactgggggtgggtgggcagccagatgaagactagttgaaatgaaatgtgtgcatcgatacatcccaaggaagaaaaacatcaatctgagtcagaaagtgtgagacttattagggagtagagactgggactgcatcttaacctctgaaactggacgcattgttgggggagttcagtactaacgattcttcatggaggacccaaggattataggggcttcttaaatccataaataataagttttaaatggaaaaatccagaaattcagttttttagactaaacatccttatcctgcatcaaggtttatatccctgcctgttacctcaacattaccttaccaggtcactaccatgacccgtctagtcccctgctctgtgctcttccatcatcagtctcactttgcttctttttaaaatgtctgcactgtcagaggacctgcttgtcagtacctgaaccccaagaagaagaccaggctcagtacagagcaggctttaactttaatactttttgaaatatttaatgggtaccctaaatttctgtggattatgttttaaatggttaatggtaactaaagaattattccagggaagaatagaattaaacacctaaagtttgattctatgttacaattatccactacaaggaatggaagaaaatttaggaaaagttcaaaaggctgtgtcacatggttccttcaattcagggagttggccactggtatgaaacatgggcaaaactactcttattccatgccagccatggcactggagacaagctaacagcccttaaaatatgtgtgttatgaagtgagacaaaactaacccaaccagaatcttccaatttagaaattttttgagagctactgaccaaggatggtgctgtggcctttgcttttatacccaactcaatcctagtttcagttcattgatatcttgggttttccatacatttgaacatgggctagcagagatcagagttggtgggctaaaactccacaaaccacttaaaaagaaaaaagaaaaagaaaacctgccctccccctcctcctccctccccctcccctccctcccctctctttcttcctcctacctctgactggtgtcattcgttcttccagtctgaccatcccagactcggtgaagctcacatataagggacagtctagctgaggagctgttgggagcagatggacagcaatgccatttttgtttgtttatttgtttgttgtttgttccgtacctccttgaagggaagtgtgcataaacgttttggtaaaaaaacaagtcgcagatccttttctagttagtgactggcttggctactctcattcaggtgtcacttcattgagtcctcaccaggtctatgaggacccacggagcacattcatgtcaaggtggaaaggagactccctgcctgcggattcctcagaatgaggtcctcccatgatctattatttccattttaccattgcagacagaggggtccattttctgtctctgcttctaaggtggtgaccttgagataaatcgttttcagaaaggccattttcctcagaacacgggagcaaatgttgttgtcacgggaagagtaatagcctcaagccttcccttccagaaaactcccagcctttggcggcgtggaactgatatcgctcttgtgtttgaagctgaaattgaatagcaaagagataatgaaaaaaaatgggaggggactctctgaagcagagcacctggccctcgtgtgccaagggaacattttcttggagtctgatgaggagtcgggctcatgccacaactcatcagtaaagctacagccttggagctgacacggtattcggcagaccattcaaaagcaacaagccagtgctgtgaagtgtcccagagcctcgacatgcccttgtaccgttgtttgttttctttggttgagctgaaatgtgtggatcaatgcagaaccttcccgctccctccctcagcctcatcagctgccctcatccattctcacctccttgaaccagggcctgtaattctgaattctgcagctctactcaatgttcacataagctttgttatctaagaggttattgcgaaggcgactgagggtataaacagggcatgcgagtactgcatgaagcagtacccatttggcaccttcatcctccaaaaggactgctcctgcagcagacgttggaaacaggaagattaaccactgctccagtttccataggaacaacctaggaagagttccagagcctttcaaaggctcaaatgataggcccttacaagttaagtctacctccaatagcaggagacagctggtcagtcatttgctcattcattctatcaaacatttacgggacaagcctcaggcattacgacgaggaatacaaaataaaaattaaatggtcttttcccacaaggcctgtactatctgcctggggtgatgagagatagcagagcatctgtgtacagagtggccgaggcatcctctctccgtgagtttcatcctaggggcacaacagctcagaacacgtatacaatgcttcagtgacactcagcatgggactggctctcacaaagtagactccaactggttgtgtagactacaccaaagtataatcacagtaggtgatttacacagccccaaaacaccagcattctcagggttttctatgcatcctcttatttggtttttagagaaatacaaatatatattatgtgcattttacagagaagaaacctacatcattagatgatgtggtaactgttctaaatgactcagctaacggtgaggcaccagtctagaagcatagcccacgatagtaatccccgccccgccatgtccgtctttacattgtgaatacataccgctaccaaagtccagttctagaaggaacaattccataccaccaaactcatatcaggctcacattaacaaattatgaaggccatccagctgacactgtagaggaccactgatattcagttacctttctccaaatggtctggagccggggtcatgtagggagcagccactcttcacagggaagctttatttgagggggcttgtgaaaacgacagtactcttcttgcaagggccatgaggctggctggctagcggagcgccagaagggaatttgtggaactcggactgctttcagaactgggcttccatgaaatgagtctgcttaccttcggatattcattttccataagggagttcaccaccatgggaactcttttccttataggaagctgagtacacagaacagaaggatagaagtgtcttggggataaaagcacacccgagatgggagtaaaaaggctctgctttggaggaaagtagttatttaatgaggacaaaacaggaaatctcatagcacaccagtgtgctctgccttctccctctgaagaccttagggtttgcctatgactcttagagcatagactgatttcctcccatccacactgatttggaattgagatgagcagacccacctgagacacaggaggaaagttatttctccatcacactatgacagtcatagtgtaatgccaaatgtataagcccaaagtgacaatacttttgcagttaaaaaaaaaaaaaggctagataatcaaaagccatccatctcaatttacatattgaatttcattattgatcgctgagttctcactccaaacttgttaccactcttgagaacatagttgagtaagcacccagtccatctctaaattcccttttcatcatacatacagtggttaaaacagaatagtagtaaggtataagttgttgatgagtgaatgtatatttaagtacacatatgaatgaatacacacataaatgataaatgaataaaaaggaaagatgcatgagttaatttccaccaatgggggaagaaaaaagatgatacttaagtaaatgccccagtatttcagctcattagattgcctgtaggttttaatttttctcaaaccctattttttaataacattcttgaatgctttcaacccccttccagctcacagaggtagtggaaaagaaaagttattaggatacaggggaagtggacctgcttagaaattgttctttggagcaaatcccatctgccttgtcaggaaatccacagttcagttcatgggtcagcagtggcagctccatccatttgcaaacacttcatgaatataccagcagtctagtttggtagagttggggtagcaaacacgaatcagcaggggtggcacaacctagcagaaacagccaaggcttggctgaatcagcataagtgagcaggaggaaccagggccaccagggatcccaggagttctttgttgtacctctctcaacaaagtggaggtcagcaaagactcgagacccagaagcattgattgcaaagctagctatgcaagcaagtgctctctgtcactgtctgttgagtccaattgatattccctccaaacatcatgtgtcctccaggagtctggcctcaccacatgtcttgcctcagcccatgagtctgttttagcaaaactccacgtgagtctgtaacagcagacatcactctgccaatcagctggagtccaaggaagcagcaagaagccaccagagcaccaccagaagtgttttggtgcatttctctctacagagtcataatagacagagctcagctacacattgtaaggcaaaccaacacttgcacttcattagtgaagaattcttcatcatgcatccttccacgtgcttgctttagcaaaacatccttccacctgtgcctgcttcatgaaaacactccatcacgtgtctgtctgtcccagcaaaacaccatgagacacaactgactttccaaagaacccttaagtttccacttcagtcccccactcagtagtcagtgaagggaacaatcccccttccatactttctagaggcagttttatttgcaaatcaaggttaatctagcagccttcagtactatgtaccatcagccacccaccttctgtctcacacgagagaggacagatcgatgtcccaggtacctaagaaaccaaaggatacagaagaagctgaagacctgatttggaggggcttgtactgtagtttgaatctgtttcatgtattataaactaaatccttgaacctgtgtgtggacagcattgagacataagtcctttggaaggtaataggaaacagataagggccccgtgatagaattagtttctctgtaagcagggaaagaaaaaatccaaactggtgtgctgttctgttttaacaacagaaaccggcctggaaaaacttagaaaatatcatgttctacataagacaaggaagctccgaggccaggaaggaaacagtcaacatccaaacagaaaggaccaaaccgtcaggcagtgtgtgggtggggcaaaggcaggaagaggaggagcctcactgttcctcacttagagagatgccttaaagatggaaggggtgggccagcagcaccggtagatgaaagtgaaaattccctcccaaattaggaccaggatggaggacacaccatgaagaaaaaaaattggaaacgataggaaagaaaaggggcctctggaaagagtttgaactcagttggcctgtggattttctgttgtgagtttttccaggttcctggcttatctgtaggttctaggggtaaagttcagagacccaactagaagatgatagaaagattcctggatacgcagacagaatgttgactatgatcctaagcttctcatcaggttcccaaaaccagcactgcatctatctatactttgtgtgccgtgtagggagagagtaaaatattaatttgaagtttaacaactcattacagttcttcgtcagctttctagtttaaattcaagtaaaatgatttatagcatcctcaattgtaaaattcacaaactttctttcatctaagcatacatttatggaaagtcattaggagcagggtctcccaagcttccttccattcaaagttactgagacattggaacctttatggcacacatgtaatttctacaatgcaacagctactctttgtatcaaatagaataacttgtgggagtgtgggtcaaagagcatattaactgtgtcaagagggtctgaggaagaggtctgcattcatcagtgctctgatgccttcttctcttcaggtaccagaagtgctccaacaatggattggtggcggggttccagagccgctacttcgaatcagtgctggatcgtgagtggcaattttactgctgccgctatagcaagaggtgtccatattcctgctggtgagtctggtaactaaatcttactccttagagctcctgggggtgggggtgggggaacctacaatgatctgttccttcaaataagcccaggatgtcacaaaccagtgtgataagcagcagctagacaatagaagagaaggaatggctgagggagaccattcatactggaaaaagccctacaggtcatccaacccaatgtccctgtatacttctttgccatgcaaaaataaacagaataatgcctagtggctcctgtccccaagcctgttccctctgtcatgatgatgaccttgcctcacatccaagtctgtttgggacctgtatccctgcagcacttccaggagtgaccaagtctcttctggaccacattctgataaagagttggagacaggaagcaaagcaacaatcacagcaacagcaaaacagcactggtgttttctgagttgcttggcagccccagcctgggatgtcctatttctctgtctctccctgggatgaagcccagtgctccctgactctggcttccaatcttctatgagatgacacacacacatttagtcaccctgataactcacaccagttaaccgcacaacttatcccaaattctttggcctccaaacaacccaggcttttaagccttggatagttatccaaaatcaacatttgaagcttggctcattcaagggcttcgtctctccatagtctgatgtttgggaggagagccttgcagtttctgttctctgtaatcatggtgttactccacagatgtgccagtggtgcacaaagtctctagagtccaatagttcttcttgcagcagtgacagtaaattcacagctcaaagtcagctgaagtctgaagctacatgccagaaaaaaacctcctctagcttcaccaaaactgcttcttaccctaccatgactggtgagcaggtacaccaagggctgatgattgagaccaagcagatccagaatcaaagaccaaagatctgcatgctatgttgggcccaaggaatgctggtacaggcaagggcatcctgaatctcaggctccgtgccattttttactgtgacctctttcctcgttgtcccctctataacgtccctggaaaggcacctttacttctctgaaaacctcaatgcatcattggaaatgatggcaaggtttatttactgtgtttccataaaaaaaagtctgatgaaaactgcagtttgcagtctgtaaggatgagaacaacacactattacattctgtgtatggatacctctttctacccagactttgaatacctggtataggaaaactcattgatctttgcataaccaatgattgtctagcacagtgtttgggtcttatatgtctgtgtgtgcacccatatgcatgacagagagacagacagacagacagacagacagacagacagactaggctgaagtttcttgttttcttgcgttaccaggaatccgtcattctaggcaagtgttctttctagggctgtaccatagtcccagtcataagtggttcattaataggaagagaattcttttttgtttttttgttagaaaaaaaccataggttgttgttttaaacttaaatagatttttaactcttcattcctaccctccctcctctgcgttatgagctctgagctcacagagatcttggtacttatgtatgccaagccctttaaaaagaatttttatatatttttctctgagtgtgtgtgtgtttgtgtgtggatgaacatgtgttcagatgtgtgcacacatatgtgtggatgttagatgtctacctgggatatagccccttaggcgacatctttctgggagacatctctctgaaagagtctctttctgggacttggatcttgctgttctaggttagattggctgaccagtgggcctcagataccctcctatcttggattccccagggctggtgatcactagtgggatcaccatgctctgattttgacacaagtgctgtagatcaaacccttcatgcttatgcagtaagccctttacagactgatctctctccccatgtcccaagaccctttggtgacatcagatacacagcagacactcccatttgttcaattaatgaaggctttagcctacgccctagctttctagtgagggttaaatgtgataacaggatcctggctttgccatgggctatgatcacacaaagctgggttgttttcaaagcagagtcccttccactttcctcaatgcagaagagaccttctatcctaataagcctttcaagggcagaaacacccaacaaggccaagcattgccttgcagaaaacagaacatgtgacaggagttggatgtgcagaggaacaggggtgagccaggggtgcaccgaatcgtgctcacccagggagagaaagaggattctgggacagacacatttgccatcacagtaagagcctagggtctctgccaggatgaataagagagcccacagtgtctgcagacagatcatcatgcctgctgcctggggttctgggcaaacagaactacagggaatgggcttggggcccaaagctttcagctgccaggcagataaatgcccaagaaaatcttactgacaacagaggctgaacatgacaaaggcagaagcgtctaaattttctgtaatccttgtcttctaattgagcaaccaatgaaatgatgcatattctgcattattgtgtgtcaacacttggagcgttgatgcttgaaacttaccctgtttatggccggatacagataaatcactgtgtaccaaattctactacccatctaaggatgccccagactccagcggtcatctgccttgcttccccacaaatattacatgtcctttctctctttaaaaatgacttccaaagtttccccttagatacagctcatcacttataatactaagaatttaatgactatggaaaggtacagataagggacagagaggatcttggttaatttaacaatggtctaaatgagatgagtaactcttctcgaattgacagaaacattcaggtttcataaaattcacccccgagccttggtcttcagggttcttccacttgccttcctgacccccaatcccttattctccctcatcccacctgggtccagatatatcacaattggtcagagtcactgggcagtgagaatgatatcacaactcaactttgaagcagacgccacaaaatgactgcttcaacgtgattggctatagctcagacagcaccgtgtcagaacctcgtggttctgtggaaatgatacttttctcaaggaaacactggagaagtggcataaacactgtgcaccaaacaccacgcaacacagcatatgactcactgttccaagggtgtctggacattttagtgggatctttaaattgcctgagtcatggtgttatattatacccttctaaattgaatgaagcccccaaggtcatacattttcaattcttcagtatctcagcatactgtctggcccttagtataaaaggtgtcaaaagcgtaactatatgttgctagctcttacgagcagtaattgcagtgaaattaatattgatagagtgagtttttaataaatggtaataataaaaaaacttcttttcaccgtaataaaaataccctgaaaaggtaacttaagggagaaaggatttattttggctcacagttggaggatgcatgtgctcacgtacagaggtcatgaggcaggagcttgaggaggcaactggtcatattgtatctacagccatgaatcagagaatagcaaatgctgtgaccacttggctttttcacttttaaactacttcgtgtatatgcatgcatacctgtggtgattcaatatgcttggcccagggagtggcactattagggggtgtggcttattgtgcttgatccttttaacagccctgcatggtgaatggacagctatgttctaccttccccacactgacatgctgctaagccctgtccttggtaccttctcttacgtcactttagctgacttgaattaaatggtggaactagacacatgaaaggatgaacctttccacctacatgtgtgtgtgtgtgtctgtgtgtgtgtgtgtgtgtgtgtgtgtgtgtctatgtgtgtatctgtgtgtctgtgtgtccaggcaccatggaatcctaaggagaccattagatcccttagatgtagatctataggagattgaaagctaccctatgtgggtgctgagaattgaactttggtcctctgcaggaacagtaggtgctttgaatcactgagacacctccccagtcctgtgtgtttgtctgacacaagttttatatatccttggcttgtctaggactgcctttgtagatcagggattcttcaaactttcagcagacatttcctgtctttgtatcctgagagtgctgggattgcaggcatgctccaatgcagcctccttcccttctacattgaaattctctctgcagcatgcatgagaagcctgtcaagtgaatgtctggcacctctgtattttcgagcatttagagactcagaaataatatcattccgggatagaaaaacaaaatcatcaccaactcccagatgcatgtgggatttatttgtttggtgggagccaaggtgctgttctgatttcagcgtgatatctctctggatatcacaacatcactgaaacctggcaagaaagtaaattcctgctcgatgcaggcatgccatttctaatcggttcccactggactagatgagtatgtaaatgcaacacatatttatttagctggaagaatccaaatttgtagtccaatggtctgttaacagccaacacatgtcaccaaaagggcggcaaacaagactacggagaccttttgcctcttccactgtcctcaaacagctccagctcctccaggtcacatcccagtcagtcggcctgctggatggaagctgcgcatatgcatcctgggaccgaggggtttgaatttaggaacgtgttcgcttctttattgttttgcctaatgatccttctctggatctatgactgatcagtaggtttgtagaatgatctgcttggacacagtcacttgtttaaatgacctttacattgcctttcactgtcactggctttctgtgacactcaaactcagcattctccatcatttcccccctgacttccccatcatgtccagtttataaggcagagagtagcttcgcttaattcctggacattcctagttctcaacaacaaaagtcagttaaagagagcatttgtctcttctcttccactgtgaataatccagtcaaagaaaatctttgtgaaatcgggcacctttgttctgattttaacactagatgaggtttcttggcaagaccattcctgtgatgctgtgtccaagtcaggaatgagctcataggccttccgtcagggagtctgtcagcctgccctggctggctggtctcctgtagcatgtttcccagaggcctgataaaaagaggaactgtacacactgatggctctgagctagcataggagctattattgcagagatggaagctcctatatcttgataaaatgaatctggatgttagtgtttaagagggcacactgcatgtgggtactcctgtttttcacaagcagccaccaccctgccctgtgtacactcattctggagaaccacagctcccctgagcctgcgcagaatcaattgtccctttcctcagctggagcagctgtcacagttactgtcccctatttataatgttggcatctatttgcgcatataggagatactccgttttgtgttcagacttcaaacgcagacacttcaaagatgtgtctgatcgtcagagtatcagctcacccaacctgagccacttagaacaaagcaaacctgtcaatcacagccaagtccacttcaatcgacaggactctagaagacatccttcatttctttatccagttagttactaaatgtgaaagaatagaaaatatgtaaatttcacagatttaggagaagttctgaaccatggctattatattgatttatttagtgatatcatccctgtgctcgtggagaccatgagatatggaagctgtgatgctcttcaaaagagtgagcttgattcagaaaggtccagccacttctagatcccatgttatgtgtatagtgtacagccacttacctttatcacaggaagaaaataagaatacagatcaagtgttaggcagcaacacagcagacatctaatggcaaagtgaaggaggggggggtgtttgctttatttggagggaaggagaagttggaggtgaaactgtccttgttgatgtacagctcagggtagccaggcttatgactgtcaacagtaatcaaaacaaatgtgaccactgccgaccagccctgggcttgaagcaagagctcgaggctcccttccaaaacagcaatttgaaaaaagttcagggactttcctcttctaatttaagtcacagacatcctgagaactgtgcttccgctgtgtggtgatacatatctgaaccgtttgaaatagaaacccccaaatgccacagaggatagacactaacattttatgttccctctcacagcccaggttcccagaattcagtctgtcgacacagacaagggcactaatgtgactgtagaggacatggcatgtggtcctatttggccaatgcccagctctctgggagggaccaagacacctgcttctttgcccctgtctatttatatttattttttaatgtaagtccatttgggttttgttgtagtaaacatttaacctcaattgagggtttctaccctgtctttgaccattcagttctcagataaaggacacacaacctttatatttatatccccaatgaaggatctagagaaaagacccaaggagctaaggggtttgcagccccataggaggaacaacaatatgaactaaccagtaaccccagagctccctgggactaaaccaccaaccaaagagtatacatggagggactcatggctccagctgcttatgcagcagaggatggccttgttggtcatcaatgggaggagaggcccttggtcccatgaaggattaatgccccagtgtatggggaatgccaggacaggaaagtgggagtgggtgtgttgatgagcagggcgagtgggaatgggataggaggtttttggaggagaaaccaagaaaggggataacatttgagatataaataaagaagatatctaataaaaatgtaaaaaaataaaagggaaatataaacacacacacacacacacacagtagtaaaacaagaaagaaaccaaaagcactggagctgggcagatatctaccctatgtgttattatgtctacttccctatcaataaccctgagttattacttgctatattccatctgggctgctcttaagtccaattggccagccctcatggtcatattttcatgactcacctaccccatggtgtcttctctctccaccttcttctctctccccttgtggtcctcctcagacacccagtccaagaattgaagctccaccttcctctctcctgctcagctataggctgtcagcacctttattcaaccaatagttttcaattaagaagcaagttcacatagcattactttgtgtatgtgcagattctctcatccctgggacaacccggccttggaggtcagtatgtggcgtcacaacacctagcaaaagaccaaaaccccaacagtgttttatcattctgtctttgcaaaaatagcttgaacaagtcgtgatgtagtatggattttgcatgtcagaaagttatcatctttgatttacatatacattgtaagccagtcttaacatatcaagcctatgcttgcttagtgtctcttctatgctctgtaaacattagctcataaaatacgtgtatgatgccgtacaccaatgatgcctcaaagacatctccatacccaccagccagtgatgcactcagcaactgttcatccagtctagtggtacctattgacaagatctgtgactcaaaggtcacagatgggaaagtcctgtgtcaatctcccttcggttcaaactgagttttttcatatcctttaagttattcctgtcttatccatccctgtctgtgcaagaacttatacaaatcttaagttttccacttctctacgttttggaacaaaaaattgagacgctgtaccccaacagatactttttgaaagtgttaggaaagtgtacacgcatggatgtggtcacacgcacatgcaaacacacacacacatgtgaatatacataaacacagtggattttttgatgaaaagagcataaatatgccccctatatttctcagaaatactttaaaatacactaatttctttattacactgcccttcttctcctcttgtcaagccgcagacgtacttgtttattttacctgggctagaaatgtgtgccaatgctctgtatgagggactttgccaaaaacctgtctgaaactgcacaatgattcacaggaaagctgaaaccacactgaatcttactcttatctgcatggaagacaatactgtgtgcaataaaacattatcatccagtttccgctgccctctcttgactttctgaaaaagtacataaactttgtctcagttttaaccctgtaagtttaaagccttttattttcttgattaactattactcaggcttttatttattaggacagtgtgtgtgtgcacgcgtgcatgtgtgtatgtgatatcataaagaagtaaataaacatatatctattggactaaaaagatggaatcctagattaaattgaaaagaaattcttgctgcgggtggtgtttggaaggctcttattttattaatgattgagaccgtttctgtttccatatctttagtttccagcctccttcactatttcccctaattcaaggttcgggaagaaagtaagtttgatctcctggttttatgatgaaaactaagcaaaacacaaccaaaaatcaaagttaacactaatttggaccaataccaatggcagacacctcaccttctctgggaaactctagaaagtcactggtcagctgactctgctactgcagagggaaacttcctagaaacctatgcactgaccacaaggctcccatctgctcactaaattaataagaaatcctcaccaaagaaaccattaaggaaccgtttgcccctctggaacctaagccctattgatgtttattctaagtgcaaaattttctttccggctttattccagatgtttttaattgtgcaagtgatctgtgggcagggcagagggtcaatagaaacaacagtcaactagtttgggcaattggatgtagcctagcacaatagtgccaaatacagacaatgctagagcaaaattaaaagttttagtaatgaagtttgatacgttgtgtctaaatgtagctttttaaagttctagaatgttttatggaatgaagaaaacacacttaaatcctacttacattatgtgtgttctcaacagtccaccccccttctctggataaactgtcatacagcagctggcactgaattctcaggtcacaagccagtgggatccaactgaggcctggttaggtccctttatgtagcacttagatggatttttgttgttgttgttagacaaagaaaatgctatttcaggatctctttacaagcccaaaagagatttgaattttcctttcatgaacatatcgattaaaaatgcatgtgagattgggcttggtatctaagatggcctagtgatttcttccaaagaaacaaatcaaaaagggagtgagttattcaaagccaaaggaatgactaagaaaagcccaaagagacaatttagatttctgactaagtccacctatcttgtgctaacctaggccctgctgcacctaagcattccttgtagaccctcccatcagcccttctagttcataaatcaggtttgtttgtttttaattctacaaccttaagaaagaccattggattacacaatggcctagtacacccaaatcaaatgggattactggcacttacaaattagctgcttcctgagccgccctgaggatacagatgtgatccagaagcgctggtacatcatgtaaacttggctcttgggaggtgaaggcagaagtgtctggagttgaaagttatcctagctacatagtgaatccaaggccagcttaggctacatgagacctgtctaaggaaagacattgatgtctttttcttttttatcctgaatggatctattttggtcttgaagaattccagtggcaattttttatgagatccaggggattctaaatttgtctcaggattgactcaatctttgagaataaagaaggaagaatgacaaaaggaaggaaaggggcaatgctggcagcggaggagaatattgtttaatgattctacacctgccttagatcattttatcacacatactttggctagttgcagcgaaatgtataaaacagtttttatttttaataggttgggggaaccaattaaatcactctcacaaagccgcttgtttattcagaaaatatttgccatgtagcaggaactgttttagctgccagagataccatagtggacagatagaactgtacctttgtggagttcatattttacctagatattttaaacacatcgactattaccagttatgataagaaatgtgtgtgaaactatcgcacaatatgtgcaaacaataaatgcatacatatatttaaagttttcatgcacaagctctattataagcaaaacaccatgtcaattaatgcttcctgttctggcaagttctcttttaagctggtgtattagttatattttctcagcactgtgacaggagcaacttaagggaggaaaggtttaatttttgctcacagttcaagggtacagtccatcatggtggagaaatgatgaatctggaaacggatgcaactctaggttgtaaggccatgtatcttagtcagggttctattgctatgaaaagacaccatgaccaaagctactcttataaaggcaaacatttaattggtgctggcttacagtttcaggggttcagtccatgatcatcatggcggcaagcatagcattgtgcaggcaaacaaggcactggagaagccaagagttccacatcttgatctgcaggcaacagagggagactgccttctgcatgcagccaggaggagactggattgcacactgggcagagcctgagcataggagacgtcagaacccacccccacagtgacacactttctccaacaaggccacacctcctaatagtgccattccccttgggccaagcattcaaacacatgagtctatggagaccaaacctattcaaaccaccacaccatggttctgtctaccttcagcctcaataagcacaatctagaaaattccctccaaggtgactctagactctttcaaattgacaatcaatataaacctagtcataatcatttcaattgattttatgatctaataatgagtcatgatccaatttgaaacagcacccctggctgacttgaataggatggaaataattcagcatgactttcaaaggcaggagagtcttttgcctatgttatagctacagttgctgatgctgacgcggttgctgtaggtgctaagtggacagtttgatagctagggaaaggaagtggagaaatggaagaaggtatctatcatcatggcttggcagaaaccacctaacttcagttgcgatttcccaagatctcccgctctccttcacactgacctcctgtctgctccaaccctttgttctctctgcacaggatgacaacagagtacccaagccactatggggaagacatggacatgatttcctatgactacgatttctatatgcgaggagcaacaaccactttctctgcagtggaaaggtgagagaggtaacccctgtccagtgatctcagggctggaggctgtgcagattcactcccttgctgaagtcctgactgtggggtcttttacctgatgaccccgataatctagtttcctacttagtcaaggattagactgtgggtttggttaggcggcaggagccagtgagnnnnnnnnnnnnnnnnnnnntgtaagtttaaagccttttattttcttgattaactattactcaggcttttatttattaggacagtgtgtgtgtgcacgcgtgcatgtgtgtatgtgatatcataaagaagtaaataaacatatatctattggactaaaaagatggaatcctagattaaattgaaaagaaattcttgctgcgggtggtgtttggaaggctcttattttattaatgattgagaccgtttctgtttccatatctttagtttccagcctccttcactatttcccctaattcaaggttcgggaagaaagtaagtttgatctcctggttttatgatgaaaactaagcaaaacacaaccaaaaatcaaagttaacactaatttggaccaataccaatggcagacacctcaccttctctgggaaactctagaaagtcactggtcagctgactctgctactgcagagggaaacttcctagaaacctatgcactgagcagaaggctcccatctgctcactaaattaataagaaatcctcaccagagaaaccattaaggaactgtttgcccctctggaacctaagccctttgatgtttattctaagtgcaaatttttctttccggcggaggagactggattgcacactgggaagagcctgagcataggagatgtcagaacccacccccacagtgacacactttctccaacaaggccacacctcctaatagtgccattccccttgggccaagcattcaaacacatgagtctatggagaccaaacctattcaaaccaccacaccatggttccatctacatttagcctcaattagcacaatctggaaaattccctccaaggtgactctagaccctttcaaattaacaatcaatataaacctagtcataatcatttcaattgattttatgctctaataatgagttatgatccagtttgaaacagcaccctggctaacttgaataggatggaaatagttcagcatgacttcaaaggcaggagagtcttctgcctatgttacagctacagttgctgatgctgttgttgtaggtgctaagtggacagtttgatagctagggaaaggaagtggagaaatggaagaaggtatctatcatcatggcttggcagaaaccacctaacttcagttgcgatatcccaagatctcccgctctccttcacactgacctcctgtctgctccaaccctttgttctctctgcacaggatgacaacagagtacccaagccactatggggaagacatggacatgatttcctatgactacgatttttatatgcgaggagcaacaaccactttctctgcagtggaaaggtgagagaggtaacccctgtccagtgatctcagggctggaggctgtgcagattcactccttgctggggtcctgactgtggggtcttttacctgatgaccccgataatctagtttcctacttagtcaaggattagctgtgggtttggttaggcggcgggaaccagtgagaagtgagaattcttgggaacttgcctcacaaggcagtgtgaccttgccaagaaggacagagaccaacctactgaagtaccactgcagccgtgaacttggcatgggcattccttaatgtcctaaacaattcctgcagtcagcctcagacactgcttgcatgccaaggaaaggttgannnnnnnnnnnnnnnnnnnnatttcctatgactacgatttttatatgcgaggagcaacaaccactttctctgcagtggaaaggtgagagaggtaacccctgtccagtgatctcagggctggaggctgtgcagattcactccttgctggggtcctgactgtggggtcttttacctgatgaccccgataatctagtttcctacttagtcaaggattagctgtgggtttggttaggcggcgggaaccagtgagaagtgagaattcttgggaacttgcctcacaaggcagtgtgaccttgccaagaaggacagagaccaacctactgaagtaccactgcagccgtgaacttggcatgggcattccttaatgtcctaaacaattcctgcagtcagcctcagacactgcttgcatgccaaggaaaggttgagatggctggaagggcattcgccctcaaactggatccccttctagtcctgtgcctttgtgtgctcctcacttagaactgtaggaaaggaagagaagaaaagaagaggagaggattcacaaggaagaacacacaaaatccattctctcactacattcagtctggtctaatgcaacatttgagactagacaacttataaaagtcagaactctactgtccacagtcccagagacttggaaattcaagttcaaggaagcagaagatatttggcaagggctgatctttgctttgaagacggaccctctcattgtgtctccacacagtggaaaatggtcttactgcttcagtttcttgagggctaggattacaagcatagttggtatacccactaccacctcgggtttccaatctaagcacagtagattgtgaggttcctgcttccctcagcacatgctcatgcttggtgtgcatgcacacttccccgtaagtccatttgaaaagcaggatatttagggttgttagagggaggggagttgccaaagcccatggagctagtaagcaattcaatctcccatgatctcacccctacccttatacaacataagctgttgttacaaaggcactaatacgactcccaaggacagcataattttacataatcagcccccaacccttacctcttagtactacttagttctatgattactttagacactagtttccagcacacagattttataacagacattaacatgcagaccacagcatctaactaatcatatttagaaatgaaaagggaggaaatcattatgtgatgaagtcagaatatttctggagtaaaaagacgacctaagtaactcaagaaggaaaagcactaagttgcacttcggccctgcttctcccctcattcctttctgggcctctcccaaggacactgaaaccataagaaaagaagagtcaaaaaattcctgtagataagatcatcatatggctcttgtgttatctctccattaatccatgaaaaagtatggagaaatgcagaagttaagagatgagttgactagctttcactccatgataataatgtcacacaaaaatgaattctggaagattacccacacatgctttgcaaaccaaataaaaccgaaagccaatcctctaacgggctatgagctggagtcaatttgagtgccatctccttttgtgtatatgcttccaaagaaagttgcatttcacttagctgcagttaacttatttactatgaaacccacattttaaagacataaaaatagctgtggaaaagcacattgtcttttccaggttccatagacaaagattctggtttcttcacagaaggacaccacagttttcatatgtaactggtctctgtttgagattgggttttaacttacttggttaactgctttctaaaagccacagtttagaagaggaggaatactatggataaactcagccaatgaggagaaacaactgagtggtaaagatacttaagacgagaccaacccaagaactcaaagaatatggaaatctaatgtcattgagcaataaagtgtctgccaaagttcaggacacagtgccagtatcaagcattcctaaagattcccggggtaaaggggaaattggtcctgagttttctggttaaaaatataaaacaaagtggaaacattaaagaatgaatgactatcacctaaaattggtgctaaataaatatttttttggcagccaaaatggccaattctagctggcttggaaatgatcagttacataaattgtacagaatcactgaagtctgaggcttagtgtctctaaattattttaaaatgacttctgcctcccccagataaacataaaattagcataaataaaattagcatgctaattaattagttttgattcggtcttcaacaatcagtggtttggaaatccacagttttagtttgttcatttccattgaagatggggtgcttacccccaatcccattggacaaaaaccagctgagcaagggcttcccttctggaacgaagctcacttgtctatgtccacttgtgtatgggatggtttctcattctggggacagatcattcttccttgcaagggtctgttctatgattctaggtgttagccccacccactaagtgcaactggtatctatctacctacagggtgacaggcaaaactctttgcagccattaccaaatataccatggagtcacttagcccctagatgaaagctactgtctggcatggaaaacagaaccaaggtagaccccccttgattcttttaggaccaagtctaaatttttctcaacttctattaactgcctcttaaacttatatcacagatgcctggccacagggccttccttaccttcttcatgcatagatgcgcatttcttagctgtggtaattaaattcactctcaaaacacactgtaccagtttgttagtcatctaaagcaagccgtatcctctgtgggtgatttttacaagaacaaatatcaatacacatctcattcccccaggcccttaaagacatgtgccggagaacactatccccagtggcactgcataggacacgctagaaaaacagactcagaattagaaagcttgccttgccttgggctatttgctcaccatcccccatcccccaactccaaatagcacagtcatcccacatacttccttcccatccagaaaccagatactggagctgtcagccattggtgtttggtatacactggatcagaaatgagcccagcaggttcaaagagaaggaagaaggactgtactgtggaagaaactgctcagctgaatatggataaagtagttccactctttattgggattatgccaagagcatgacagctgtgtcctctggtggcattaaggacacctggcaagggaagcagcatggtacaagagaaagaccaatatttgagttcagcaccttcgaaatctgacagcatcacctttcactggttggtaatcccttaaagcaagtccgattacactaagcctatttcttcacaaaacaatgagtcacagtggggattactgataggacaggttgtagagcatctagtgcagggttgggcacattggaagcactagggacttcacaatgacaatggtcgctgtcatagttaaatagtatcagaccgcaggagtgctgggcagagtatataactccctgcattcccattaagtggttgaaaacaggacatggtcctaagcttagcaaacagcaggtatctgcaccatgttttccaaaactgaacagttctgtgccctctcaattttatcctatcacttaaataggctattccatttctgataggtgaggcattttcttttcacattttaaggtgccttgagtggtttcccactcaccttagatgtggtttcaaaggggaaacacacagtgcatctcctggagcctggcatatagagagtcctcaggagaaaggaaatattatgggaaattgcattaccttttagaaggaaaatagattcttcaccgtgaaatagaggtagtgctagtaaatgctgaacttgtgagtcctggatgttgagccatggaggactgaccaccagccatagtaaaaccctccatgtgccccattaccagcaacgggcaatccaacctcacagatccatcagttctctggagactttattgaaggtttctgagaacaaggtgagaatctccacagctccgaatcctgccaaagcccatcagtgcttttccccgggagccgctctttctccactcactgacatttccttttctggcgctcctcctacagggatcgccagtggaagttcatcatgtgccggatgactgactacgactgcgaattcgaaaacgtttaggctcgccgcgtacagaagtccgggtgaagggtcagggcccaggtgtcctgagggtgtcatatcacatatgttaatattgattagaacatctacacttctttcttttgctctcttccctgggatgggagctatggtgtcggctgcctaggcctttctcaccacgatcacacatataaataaactcacaattaagccatgtttctccctttcaacacattccaagacaatcatgtctagttgctgatggcagcttccttgcacagcacatgtacagagcctgcatgcttacagcctgccacccggagcacctgtcgcagccttgctgtgattcgcactataacttgagcttcagattcagcttcgtgaacttggagagaaagaaggagcttgagagaggtgggataaaggttctctgtagccaagtctgtttgagtgacagcacctagagacctcacctggggtggtggggggtcactctctgtcttgagggaacacgtctactctctccttccacaaaagccacatagacttagaagttcaagtaaagatctatgtgcttcagaagagaggggacttggaggtgaaagggggaggtgagagggtttgaggactgagctgaaagactttagacagaaagaacgtcctctattcaaagatatacaccagcagacccaacagtgagaatgaatatgagggccaggaaaacctgtgcgaatcagtctcaagacagaaacaatgaaagaaagataagtgaatgagattcacattgggaacctggggagacaagagtggtcagaggagaagagatcttgggttatcagcagcttgagacacacccagtattcatatgaagactgtaatatccctagaagccatagggacgccatctctggattggtcctgaaggataattctccctttcccatggcacttgaaagtgtattctgcagagatgacactgtaatatctctgtctctagccatttgtaccttcttctttaaaaaaaaataaaagtatcaatattcactgtgccataaatattaaaggtcaatttgtgccccctatgctccccttttgatcattcattaacccattctgaaaatacagcttcacactgtgatttgtgaggaggcttgaagactatcatggtgggagccatgtgagatgattggaggaatcagatcattagaacacaaagttcagagtgctcctgtcaccgaagggtcggacaaaggatggaaccatgtttctctggctttagatctagctctttacctgctatatcacatgaccccatctagcacatgaaattgtagctgtaggaaactcatagctcctttatctgtatcacttgcttattaactgcttcagcttctccctgaataggcccaggaaaggcgctagaagaggaaagccccagtggggacactttgctatataccccagggaaatggtgacatagaacatctcagccaacagtggctgcctttccctcagtaagctcccagctttgggatgggcaagacagaaccaaagatggcttcctttgtctcaattcttaagaactctttgataacatctgtctgctgagttccgctatttctttgctgctgcttttctgcagttttaatttataaggagaagttccctggtgttatttttcacagagggtgccattaatattttagcaatcgcagcactggtgcaggatgacaaccaggaagtggccttagctgggttcatgtggagcccagcaggaagggagacaaaccatgcagactggctcactcagtagccacatccctggcggcaacaaaaaactggtaggaggatgggatgtgggggtgagaggcctgtggctggaggagctgtcaggagactgtgaaaagcacaagtcaaggaaagaacagaaggccatctagtaagaggagaccgtgccagatgaaataaaaggggcttttacaaaaaagaaaaaagtaccctttgtgtgcaagccaaggaccatgacaggaaagacatcttcagcttggtttggttatggatcatttacattttatattatctgtcaatcagcacaagagctgagcctccaagtaaggaacaagttccagacctgacgatgagtcttgggtctcattgctccgttctttctactaaccttctctactgtcttggacacaaaactaacattttctaggccagctgtctaaaatgaagtcatttatttaggtcaatggttctcaatcttcttaatgctctgactctttgatacagttcctcatgttgtggtgacccccaaccataacattatttgcattgctacttcatgaatgataatgtaaatatctgtgatttccagtggccttagatggcccccgggaaaggtctattagactcccaaaagaagatccactgatccaggtgactgttacatttcttgcagctttaaaatcgtctgcactctttcccaaatggttgataatgggattcctgaggcaatctctcctgagtaaacagcctggcactgtgacagaagacctaggccctaccccagaatctggcagaatagagttatacatctccaaacctatgttttcctgtgtccaatgaagaaaaaaaaaatccctttcccaggaacctcacaagatgctgccacttaaagcccagtgaatagcaggagagacaggagattcccacttgacaggacatgtgtgtgctgggaaaacagagtcaaagcaggccagtgaggcagaaaggggaaactggggaagctgagtccagatctggcatcgatgaatgaacagaaatgctatgggctatggatatcagccctgactctgtcagttcccaacatcatcatcttggccaagttagccacctttcttgattctatttccttacccaaagagacaacaatatctccatgatggacttgatatgaaattaaacgcaatcacgtaatgattgacctgtaagaccacagtaaatgcagtacaagtagggaagagtgtgcacacacacagaggtataatttctcagaaaacagggtcttaaaagaaatcatatcaatctttccaatgacaggaaaaccgagtgggacttagatttgtctctcattcattcatttggttagttactgaaacaatgaattattatatgcttattataagccagctgctgaataaggttcccatagtttagactctaaaatattgaggatgatgaacaaaaattgagagaaacagccttgtggtatagtggtgagcatagtcaccttctaagagtcaggaaaacaaataaaactctatagttccgtttcattcatgatgatgggtgtaaagcaatctatgaacttaaagagaatttcctaaggaatgggcctcgccaacagggtcttggagtttcatcgtatagccctaaagctatgagcaagaactgatagctcttgacaacaccataaagcatgccattatttgtgcatgttattgaaatttattatttttcctgaactcttggatatctaaggaaatggacggacacacacactcaagaaacatcacacacttgtatgtgcacaatttctccgtgtgctcccttcatcctgcctcttggtccacacacaactgtctttaggttccacttctttgactcagacataattttgacagaatgaaacagggaggacggtgggggcagggagaaactagaataaagtacgatacatacatatgaaaatgccatgatacccttgtattgtgttccaacctcaaatatcgtgtggtatatatttaaaacgatgtctgtgatggctgagagaagaggtagtcagtcttcctcaagtgtgagccccctgattagcttcccaatactaagtgctgagccctaaacacatatccatacaagcaacactagtggactcattgcagcggattgtatttatatatttatgtgtgtgtatataaatgtaacaataataatttaagaaaaaagaaaacaacagtaataataaaagtagggggacttggagatacaggaaggggaacagagggacagggaacagggtctgctaataggggattgaatgagatcaagtattctatactcgtgcatggaatgtcacaaggtaggtaacttatttgtgcaactttaaaatgctagtaaaggtagaaacagatactgagactcgagctttccttaatgcctccagaagaattacagaaagaagtaaaagaaagtaagagagacttagactactagacatgtctgtcttctgcatacattcttactccagcacctttcctggggcctctctaactccaagcctatagagtctctcctattcaccttacaaaatattgttctgtgaagtccacactgaagtgattattcacatcatggtggtccacagaagagaccaacattcactttctttataaagtctctctcagttttaattaaatcatatcagcttagttttgtttattgaaactgcactgttagggacttgaacctgagtaccttcctggaagtcagtgaggagggggaaggggaggtttttgcagaatctgtgtatactggctaggttttacatcaacttgacccaagctgagggagcctcaattgagaaaatgcctccataagagcaatctgtaaggcattttcttaattagtgattgatggggaaaggcccagtccattgtgggtggggacaactgctggaactggtggtcctgggttctgtaggaaagcagtctgagcaagccaggaagcagcatccctccatggcctctgcctcagctcctgagtaccagcactgagttcaagtcattgtaaggaacgattatcttttcacacacagccatgactgtcatgagacttgaggcttttcacaagcttaaatctgaaaaccaagcaaaacgctattgattgtaaaatgtacctaagagatgccgcggggcttgccaactcttcacaccctccactctgtgggctctttgctcttcttaccttacatacctgtgagctcagttcagtaagttataggaaatgctgaatagaaggtctgcaaaatgcagggctgtgtggctctgtggatgaagggcttatccagcaagtaggaggacaaaagctcagattcctagaacccatggaaatgttgggcaggcatggctgcatacctctaatcccagcacttaggtggcagaaacagacagaggataactggaacaaactaagttagctacagaagctggtatcggaaagatccaaggtcagtaagagaccctgtctcagtgaagtggagaagagctgaagaagacacaaaacacctacttaaggcctccacacacatgtgagcctacccacatgcagacatacatacacacatgcatacacaccatacataaaacaccgaaactgcaaattatgatattccttggaatgtagcaatactgtgttgccgtgatttgtacatagctttcttccttctccagttaaaacaattagcatcatgtttaccatcaaaataagagtaattctaaatcttatgagacaaaagctgttactggctgccgtgcagttcagccctaggccagcgttccggctgaaaggcaaccgaaggcttcacttcatggaaagaatgagattatagaatcccagaccctttcactttaccagctgcctagtgggctgtaatttaagatgcagaattacctgcctcttccaatgtttctcaccatccccagagagagcagcagatgtgctcagcctgtcctttggccagtgagaaacactgtccctcggtctgctggtaacatttaaggtagtaactagaaaccctttctctgcttcacccaagttcaatttctgaggacagactctgactccttataccacttttctataccttacaaatctcaagtccttccctggggctttggtctgctgtccttgccttctcttcatctggagaaggcactgaggagatttcatagaacatacatcctttcacaagataaaaacagccctaccccaactgcaaaccaactgaaaagtcttgataactttaaattgtgccacggaaccctgctaagcacttgactttaccacaagcaacctctttcctcttctaccgcactgtaagcctacacacacagaaggagcctagcaacacgaccactgggaataataacagtcagaacgtgagtctagatcgtttttactgggacgatctatcagtgttctaaacaattttcattgaaaattgaagtctgaacagtcttggccattatgcggttttattaagagacaaggcattgcaggggtactacggttctgggggtccgatgcccatctcttactcccttccagcatcattaagtaatgataatcattcatttttacccctttagaaactaaccactaatgataggtgagttggaaaacatgacagtctctctgtcacacaattggaaagcttatgccactatcctaagtaattgaatgccattttttttaaaaaaatgaattaaaagtcatattgaaatgagcatctgagcagcttttggtggagatgagatcaaacctcactgactaatcccccagtagactgcagaccgagggacgatggggatcaggctgacagatggttgatacacagtgaaaagatgtctgaaattaactggacatgtctgtgtgttagggaaagttggagataatgccacagaagtataaacaagtgtatcaggagactggaggaagggacaggggaacctcaataggattcttgcagagaatggtgtgatactggttctggctggtcttggctggtcttggctggtcttggctggtcttggctggtcctggctggtcctggctggtcctggctggctctgtggagggaaagggatctttttctctgtttattttcttgttatattgtttggtttcacgtgtgtgtgtgtgtgtgtgtgtgtgtgtgtgtgtgtgtgtgtgtgtgtgtgtgtgtgtgatttctctgctcccacattttgatggctggagttacaggggtgtacctgactcgtagcctggaacttcttacacagagaaaaaaggaaaaatttcccagtcacaaggcactcgaaggcaccattgctacctgtgttctgtatgtccagtgctgttagacacaccacaaacgtggatttatgcaacgttgctaactcaaaggaaatattcatattcgctttacttcacccacttgaaagtgaagtgttgggctaggtgtctgggttctctgagggatctctggctcaaaaccacaaatcaccctacaaccaagcatcagattcaggtaatatctgaggtgtgcttcatggccagagactccagcattatacaagagccacattaatcaatccaccaatgttttgtgtctgtggaactctttgttggcagactcacaggtgagttcgttagccagtaccctgtggagagatgttcttggaagccatacatgccctgtgtcatgcctgtcttccccctccccccacaacaatgtcatgcagattggttccactcacaggcttccaggaggaaggacctggaactctttcacagtgtaaaaacagtatagtctgagctggagaattcacaaggggtaggcaggttctcatgggtgaaccttgagaaaaattcactacaaaggcagagggattaaagaattggaaaatacaggtgaaactgtgcagtcaacccttcccacacggaccctgttctaaactgacaactgaacacgagtgtgccctcgtataacaaatcacagcaagatgtcactcattaatcacttctgtgtctcctggttcaaactgaaagaggccagaaagcacatagcacacttttttatttcttgcagaaaaaaaattttttttaattctaaacaaagggaacaaggagcaaaacccagaaaggttattgaatgacagaaggctctaggccactaagcatgtaggaatgaaacatgggtgactcgtggtgtttcagaggcaggagggtctctacaagctcacggaacaagctcatggacagatgacaacagcccaacgagtgaaggaagaagggccgtgccaggaactgaggtgcttgagcaagctaggggagggagggaacgcttcaagcttgtgaggggaccctcttgcctcctgccgccagctctcaggtggaagacaagtgggggaaatgatttatttaaaatgtagggacagatctagcaggcaaatgctccatacagactccaggggtgggaacacacatctctatacagccaggagtgggaacacacatctctatacagccaggagtgtgaacacacatttgtaacctagaacttaggaggctgagagaagtatattacaagtttgaagacagcctaggctatatacctagatcctgtatcaaaaaataaataaattccatctactcatacataggcaaatgtatttatacacaaatacataatatatacatctattaaaggacaatataacgtgcaagtccctatctggtgggttagtttgtggcaggagaaggaagcacatgcattttttggtgtttgtgccctatgatctagctgcccttccatctaatatagcatctacagaaaggtaggcatttataaaaacagacccccaaatccttgaagtaggagttaacctgcccaaactcacacaccagtgtgaatggacttgaattcaagacaagtggttctcaaaactcagctggttctacagtaacagtttggagttgagggaatagagagagatactgtttcaaactattttgcagttccatggccgaacacacaatagaaaaaaatgattggcatgcttattttaatactgtaaatgttttccctggagagagagagagacagagagagagagagacagagagagagagagagagagagagagagagagatctggtgtggtgagattattaggagaatgttgctgtaggtttacagagccagctgggtagtctgcaaatcggaggtatactcccctggtgtttcacatttccaggaaccttacctagcacaacaacactggagtgattgaacatctttggtggcagtcctctgactgtctgccttctaagatgatttctgataagaaatgagaaactcactgtgaccctgacaagcagaattcaacaaatccaatgattgcctcaataattgcctttgcttgactcctgggccctctgcacagactcatggccgtgttcagctttgcagcatgggctctgagaatctttctgcctagagaatctgtgtgctcagtagactccgctgtcttcatagctgatgagacctcaggatatttagtcctttggcagaagtgctgttctgtcgatcaaagctccaacccttctggctccatgatgtgctctcaagcttatcttgagcacacaggctacctacaccataaaccgcatcgatggcttgtatttggtagttataatagagtctagacatggaagttaatttattacctttaattttcagagaagaacctaaagaagggaaataacacattcctgttctattagacacagtgagaaattctcttactccatatgagacggtaaggaaagttacaatagtataaccttacggtcctttcccatggggccattctctgtggtcattgtagttaccctgaggtcataggcagctttgcccacactggcctcaatgaaatcagagcaggtctttcctatggctctggaaatatgtaacaaacaataatgatgacaataactaagtgcttttgcacctacaggaatctcacctggatactcatagtagactttaaagatagctccgtcgctctgttttataaggaggaaattgagaatcactttctttctcgggaatatatactgtacacattggaacagaactcaaactcagacctggatgaatataaggcacaatatgatagtgtttcctttactgtcctcagactccagtatagacggtgccatgcttccttctttaggtcatgccataggctccttgggttactgtatctctcctcacttctggcacagtcacatgagcatcaaatcaactcagcttcaaagctcatctaaaacttaagagccagtagtctttctctagacatggacacacacacacacacacacacacacacacacacacacacacacacatgctcatattatatatatgatattcatattaaagaatcacttaagttgattggactctggagtatagacactttattaatctactatctctcatcctctttatttgtattctttccttttataaccttacactgttgtttttatcttcatgttcccaaacatttataccttctgtgccttatagcttttataagctatagcagagatcaaagggaaacaagtagctattcatcttctaccttttcacagacccacacttaacctcctcactctatctgaaccctgccttgccctggaatcctcgtgagtacagtttgtatgcatctgtgtacatctggatactgtggggtcagtagttactgcctttacctgctaaggaattcctgcatggagctttttattgtctttcattgcatctcctgactccttctcatctccaagaaatctacccacatgctggaggaggagccacacttcccctgtgctaatcctcatgcctgggagcctctcacttcacacttttccagcatgagtctcagagctacatttcctggttcccgaggcaaattaatagtccctcgcctgtgccaccaaacatctggttatatcagcttggtcacaccttttcattttcctgtttggagagatattaaatgttctctttgttggtccctttgtacccagtacacagaatatagtaggtattcattaactaacaaatgtttaaagaatgagcaatgagagtctgtagaattgtggaaaataaaaagtggagcccattcattttttgtcccagactatgacaacaactttctgtcta

SEQ ID NO: 1421 - DNA, 1647 bp, Mus musculus
atggacctcactcttctgtgggttcttctgccactggtgaccacagcctggggccagtatggtggctacgggtacccataccagcagtaccaggactacggtgatgatggatgggtgaatcttaaccgccaaggcttcagctaccagtgtccccacgggcaagtggtggtagctgtgaggagcatctttagcaagaaggaaggctctgacagacaatggaactatgcctgcatgcctacaccccaaagcctgggggagcccactgagtgctggtgggaggagatcaacagggccggcatggaatggtaccagaagtgctccaacaatggattggtggcggggttccagagccgctacttcgaatcagtgctggatcgtgagtggcaattttactgctgccgctatagcaagaggtgtccatattcctgctggatgacaacagagtacccaagccactatggggaagacatggacatgatttcctatgactacgatttttatatgcgaggagcaacaaccactttctctgcagtggaaagggatcgccagtggaagttcatcatgtgccggatgactgactacgactgcgaattcgaaaacgtttaggctcgccgcgtacagaagtccgggtgaagggtcagggcccaggtgtcctgagggtgtcatatcacatatgttaatattgattagaacatctacacttctttcttttgctctcttccctgggatgggagctatggtgtcggctgcctaggcctttctcaccacgatcacacatataaataaactcacaattaagccatgtttctccctttcaacacattccaagacaatcatgtctagttgctgatggcagcttccttgcacagcacatgtacagagcctgcatgcttacagcctgccacccggagcacctgtcgcagccttgctgtgattcgcactataacttgagcttcagattcagcttcgtgaacttggagagaaagaaggagcttgagagaggtgggataaaggttctctgtagccaagtctgtttgagtgacagcacctagagacctcacctggggtggtggggggtcactctctgtcttgagggaacacgtctactctctccttccacaaaagccacatagacttagaagttcaagtaaagatctatgtgcttcagaagagaggggacttggaggtgaaagggggaggtgggagggtttgaggactgagctgaaagactttagacagaaagtacgtcctctattcaaagatatacaccagcagacccaacagtgagaatgaatatgagggccaggaaaacctgtgcgaatcagtctcaagacagaaacaatgaaagaaagataagtgaatgagattcacattgggaacctggggagacaagagtggtcagaggagaagagatcttgggttatcagcagcttgagacacacccagtattcatatgaagactgtaatatccctagaagccatagggacgccatctctggattggtcctgaaggataattctccctttcccatggcacttgaaagtgtattctgcagagatgacactgtaatatctctgtctctagccatttgatccttcttctttaaaaaaaaataaaagtatcaatattcactgtaaaaaaaaaaa

SEQ ID NO: 1422 - DNA, 606 bp, Mus musculus
atggacctcactcttctgtgggttcttctgccactggtgaccacagcctggggccagtatggtggctacgggtacccataccagcagtaccaggactacggtgatgatggatgggtgaatcttaaccgccaaggcttcagctaccagtgtccccacgggcaagtggtggtagctgtgaggagcatctttagcaagaaggaaggctctgacagacaatggaactatgcctgcatgcctacaccccaaagcctgggggagcccactgagtgctggtgggaggagatcaacagggccggcatggaatggtaccagaagtgctccaacaatggattggtggcggggttccagagccgctacttcgaatcagtgctggatcgtgagtggcaattttactgctgccgctatagcaagaggtgtccatattcctgctggatgacaacagagtacccaagccactatggggaagacatggacatgatttcctatgactacgatttttatatgcgaggagcaacaaccactttctctgcagtggaaagggatcgccagtggaagttcatcatgtgccggatgactgactacgactgcgaattcgaaaacgtttag

SEQ ID NO: 1423 - DNA, 52661 bp, Homo sapiens
aatacatagaaaattgtgattggaataagggctctgagggggtttatgcagtcctgtgagagtgtggggaattttctgatctgatacaaccctgagaggttcttcattttgagagcacaagctttgttttataacaggcttcaaaacagatcttctctaccagctggataaccctgggcaattttctctctaagcatcatcgccctcacttgtaaaatcgagaggatgtgtctttcaaagagtatggagatgacattcaatatagtggatataaaagtttgtaccacagttagacctactgatgtaagcatgcaggttagcaagatctcactttcctttgctcaggaggatctccaggcccagggacaacatggcctagtgggaagcctgacacacacataaggacaaatcagagggattcccagttgattttcaggagaagggttacctctgacttcctgaagggaaatggttacagaggtgtttggatggaatgatattagagttaagggtagaaaaatggtggaagtggtgctggctttgcattgaagagggaagcacatggatgcttcccaacatcacacagctggggaggactttcttctccccatgagcacctaaggaccacaagaaactggagacagatgcccagtgctggagacagtcacattgtttcaggatcttccttggatcaaatccagacagttgttccttatatcagtcaggtcctggcaggaaacaggtccatattcaacagtagtgactggagagaattaatgaaataactatgtacagagatgtgagcagggttaattgtgaacatcccagggccagctacagctataaaccacggtaagatcacccctatagtcttaaagctgcagggtgagggagtgaggttgctggaacctagcagaagcatttcccttggaaagggggccagccagcaaaagctaaggctgcatggagagaaacctggccactgccaaccaggccttggtggcagggagccaggggaattcatattttgacccctctcctgatccttccatattctgctggtgcctctcattggccaagcccaagcaggaaccagagggcaagagagcaccttaaggtagcacataaagcctcctagaacacagtgcaggaaagagaaagatctgaaaagtaaatagggaatattcagtacatccccttgcaaaatgacatctgattgttttttgtaccagcagtaccaggctctgttccaagcacggtacatttacatgtattgtctcatttagttttcctgataaattaaagtatgtgcatttctatttgagtgcatgtgcacgtgcatatactctgcagggctttagcaacacagcaaagatgccatagccccgttggtgtctttttcggctaagccaacccactgctgtagagagttgaattattttggtagttgttaatattgcagcattttaaaaagctggggtagaaaatagtactcattagtgtgcagcgtgctcagctccaggctgttgacaggcatgagaagaaggctgagctgctgcctttcctgcagttctcagttctgctctgtcactgcctgtgtgggtggtgtgtgacaggaggcaagtggtgggctccctgagagcaggattagggtgcaaagcccttagcagagcccacaggccacagagccaggggagtatttctactgtaaccaacgacagggtagttggcagaggagccctgcctggttctgcctcatacttgggaagcttacaaaatcataaacatccttatgcaccttagcctgtggttttacacttcgggatgcataaaagtcatgtgggaaagctcgttaaaaaggcagattccgcctgggcgcagtggctcatgcctgtaatcccagcactttgggaggccaaggcaggcagatcatgaggtcaagagatgaagaccatcctggccaacatggtgaaacctcatctctactaaaaatgcaagaattagctgggcatggtggcgcgcctgtagtcccagctactcgggaggctgaggcaggagaattgcctgaactgggaggcggaggttgcagtgagccgagatcacgccactgcactccagcctggtgacagagcaagactccgtctaaaaaaaaaatggcagcttccagggccccacctccaggattccactgaagcaaggctgtcaaaaactcaggaatcttcctctaacatgcctccatggctgtgatgcaggtggtctgtggacctcacatgtatcaatactttggggtgggtgtgtgtttttagagctgggagagacagtatgcttcttaggtgaccaagtccattatctgaagttgatgtaccgtgattgaacaatgccgaaaagaggtgccaatctgtagcttcaggaatgggagcaagaatgcgtgaatcttggttaaagagcaagccgagcttgatcagaggaagcagcacacagaaaacgcactggaggacggcaccagcagagatgtcctgtatgggaggatgttattttcagggaggctgctcctcctgctaaagccctgcccccaccacctgccttcaggattgtaggagggaaaggcttggacaaactgtgtgaactggcaaagtgctctagaattggccaccttgcttccctaaaggatgtgtcaccaaatccctcaatgccgtgtcctccaagagaactggcagggctcaaactagggaactttggcttatgcccaagccctgtcacccaatatttctgtaactttggacatcactgtacctctcaaagcctctatttccaaactgataaaatggaaataagaaagccaactttactaccatcaccaatgcaaagatgaactgagatctgttaaatccctgcacatggaaaagaataaatatttattgagtgctggattgtgtggtttatatacatcgtgccaaatgctacacaaatgaaaggggctgttatttattttataaactttaggtttacccacttaaaaacccaatttcaaattagaaaatttggcttaaaatgacatcacttaagcactttctgattaaattgttttctttcttttcccccgtttgtaaccaaatctctccaatgaacctcctcctgcgcttttttttaaccatggtctctagcgagtcatgagctcagaggttgtaaccagtatcctgaactctgttcctccacttatgagcatataatacatttactaaagcaatatttccagcacctacacatacatctctgtgcttcattcatcctcacagaccccagaacactaattaggcacttgggccctgaagcttccttctgtgagtgtctcagagctaacttggcttagcagcaccccatccccatccccatccctactctcaccccaagacacagtcctggttcccaagctcgcaagttcccaagcttcttctccaccacgatagctcctccatctgcctactgttcccaagcctcctgaattctctaccctcactctgcctttagtgctcagccctgttatcctgacacctctccctgcaaactcactctcaggaacctctgcgattgacattcatccacatattaatggaactccagagagtggtggagccatattcccccagctttactcattcccaaacccctccagtcatcatctgcacaagaacactcttctgccctgcggagtcctggggctgttcattacactaatatgcatgattgttccctcaactccagcttctagtgttaccctgaggtcagactaacaacgtacatttgtttcaagctttacacttgacaaagtctttgcaagaccactatttgatatgactgtcacaataatctcgtggtaagtggctggtgttgtgattatcctccattttacagatgataaaacaaaggttatgggttttgtctgattcagtggttctcaaccagagatgatttttccctccaggagacatttagcaatgtctggaacatttttgattgtcacagtggtggaagagaagatgctactggcatctagtggatagaggccagggatgctgtccaacatcctataatacacagggcagccagcctccacaacaaaaaactatctgacccaaatcaaaaggtcattttgattacttgcagaaccagaactttaacttagatatttggattttaggagtctctgctcttctcacaaccatctgccactgctctgaggccctgctgtgaccatttggcacttggggtagtatagttactaacaaattcaagtcacctttctgtactagctgtgaaaattggggtgagctaccagtgatctctgaacctaattttcttagaactgctggaaggtcaattggtctatcatatgtaaagcacatagtacagtatttagcacacagtaggtgcaccttattctactcctcccaatcttctctatttcctcaacttggattgtcactctttctcctgctgcttccagtatgagcatttttaaccttattggtggccctcggggctaaccccaaatgatatgacagtgggttccacaaatgatcttaaaaagcaatgggtcatgcaagggtggcaagtttgctgaaggtgaggacagcctgggtgtactgaggctattgaatgcctctctcagctaaaccgtgaaactggcacagactcattttggaggaaagccacggatggctcagcatacacttgctgggaagtttgtgatagtactctggccacctagagctgcagccaagtcctgattatacacaggagttaaaagggaaaaaagacagcaggcaaaatggaatcctccaataactcacagtcaatattttgggttaagcatccattcatctggggctaccagcttcacccaggcactagcatgagccttgccttctcctgtctgagcagccctcctcggggccagctcgtcacatctggaattctccagtggatcaggtctgctccagggtgacctctgtaagtctacatcattccctcccaatatacaatagcagctaccccaatccagaaagtgtaaaagtaacttaggaatgagttgattctagggccattctaggtgctctcaattaaaatcgggcaaagtattatattcagaatctctcaaaaagggattatatgtttgagaaagctgccagacaggagtggatccaggtcgcaaaaagtgtcaccagagtggctatgagttcctacacctttcagaagaacccagacttaataagcgttggtgaggatgtggagaagaaattggagctctcatacgctgctggtaagaatgtaaaatggcacgattgctttggaaaacagtttggcaggtcattaaaagattaaacacaaaattaccgtataacccagcaattccactcctgagtatatacctgagagaaatgaaaacatatgtccacacatatacttctacatacatgtttgtagcaacactgttcataatagccaaaaagtggaaacaactcaaatgtccatcaacttgtaaatggataaataatatatggtagatgtatactgtagattattatctggcattataaagaaatgaactagtgatacatgctgcaaaatggatgaaccttatgaaccgctaacataaaacctatgctaaatgaaagaacctattcatgaaagaccacatattgaatgattctattcatacgaaatatccagaacagacaaatccatagagacacaaagtagattgattgttgcctagggctaaaggatgaagggaaatggagagcgactactgatgtgttcagggtttcttgggtggttaaaatattctaaaattgcttgcggtggtggttgcataaactctgtgaacatactaatttaagggatatattgaattatataccttaagtggtgaattgtatggtatgttaattatatctcaatacagccgaagaaggaggaggataaggagagagaaaagaagaataagaggtagaagaaaaagaagaatcatggagacttttgaatgctctttgtcagaatctccaaaatatctcaagtccattatctactaggaggtaagatagcccagtggtgaattgtgtgggcgccagaatcaaaattagtgaactgagttatctaggcttcagtatcactacataacttctcgagaagtgacacctggaatttgggtagagtgttctgcattatctgctatacggtaattctcactttagtgagtatcaagttacctaaagggcttgttcaaacacacattgccgggctctactcctacagtgtctgattcagtaggtctgagaggggccggaggatttgcatttctaacaagttcccaggtgacgctgatgctgttggttttagagcaacaccccaaaaactacttattgaacatttagttctttaaagtccccagggtctattgagtagacttttcaaataacagcagaaatgcgtagcgcaaattagttatatgtgtatgttaatatacatactttataagtgcattatttgacaattattcataaatgttataattagtaactgtaactttgatgaaatgatggaaggcattgcagaatgggaatcagaagacatggggtcatatccttccagttctagaaatttggcccaaaatgttctctcaccacagtttccccatctgtgagaaactaattccaataatgcctcactaacatataaagttatgaggaagataacatagtaacctagttgaaaacacatggtcaactgtaaatgcattaatcttatgttctcaatgtctgcgtatggaaatcattctctatgcggccaccagaatctctctcaaaggcatcagcagtttctggaatctcctgagacactggatgagttaggttgctttcagctttaagtaacagaaatctatattaaaactggaccatagcatgaagatatttatttttgcacattaaagggaatccagctgaggtagttctagctgtagttgaaagaaatctgcggagagtggagatcaggcagaggccctggaaattgttggaaaacaaatgtataataaagatgagtgtttatgataatctgctttgtctcttagagctctttaaggtttaaaatagctcatatcatgtccagaatgcaagatacaactcatgagcatcaggatgataaactgaaaaaattaaaaaaaaaaacaaaccctctagcatagaggttctcaaccctggcttccggtgagaagcctatagggaaggtttcaaaggacgtcattgtcaggaccctgctcagaagcttctgatctgatttgtccagaaattgcttagactctggaggtttccaaaagctttccaggtaatccttaaatgctgataaggtggagaatgattgcttcagcatatcatgaatcagagagatccttctaagctaggaagaattccgatgccagcactgggcagttacttacggatggaagtggtgggagaagatggtgctaaaaacaaaactaagcctcacatagctgttcagcccagatcctctccccctcgcttcagtaaccatgatcatcaaagaaaactgcatgcccaacacacacacaaacacacacacacacacacgagttacttgttgctttattctcatgtatgactgtctttccctttcaagactatcttggtgtttgatctagactgaataccgtctggtaaatgtgccacaggctaggcagatggtgggattaatagtgtgatttttctctggctccacattcctttaggaaggtgactcttagcaattgatgtgaataagaatcacctggaaaatttttcaaaatataaatacctgagcaccccttgtgaggttatgatttagcaggcctggagaagagccactgtctacattttagcaaacttcacagaggctgtagatagaattggtctatgatcacaattctaagaaactttaagaacaatactgatgagaaatgggaaatactatgtgcttaagagatgcccaaaggtttcaaaaaatttgaaaagccaaatcatcaacggatgcatggaatgggtaatgagcacatgaaaagatgctcaaaatcatggatcattagagaaatgaaaatcacaaccacactgaaatatcactacaaacctatttgaatagctaaaattttttaatggcaattttctggtagtggtgggcaatggtatcaccactttggaaatcagctaggtagtttcttgctttcttttttttttttttttgagacggagtctcgctctgtagcccaggctggagtgcagtggcacaatctcggctcactgcaagctccgcttctcgggttcacgccattctcctgtctcagcctcccgagtagctgggactacaggcgcccgccactaagcctggctaattttttgtatttttagtagaggcggggtttcaccatgttagccaggatggtctcgatctcctgacctcgtgatccgcccgcctcggcctcctaaagtgctgggattacaagcatgagccaccacacccggcctcagtagtttcttttaaagttaaacatacattaccttgtgaaccagcaatctcactcctaggtattgacccaaatgaaataaaaatttgttcacacaaaaacctatacatagatgtttatatcaactttataattacatttatgtaattcattatataaaatataatgaatataaaattcattacataaaaagtaatgaattttcaaaaactggaaacaacccaaatgtctttcaactagtaaatgtataaacaatctgtggtacatccatgctatggaatattactcaacaataacaagaaacaaaatactaacacatacaatgagatgttgaattttaaaatggatgaaccttaaaagcattatgctaagtgaaagatggacatgaaaggctacgtgtggtatgattccatttacttgacattctggaaaaggcaaaaccatagagacagaaagtaaatcagtggttaccaatggctgggtgtttgggaagatttgactgcaaagggatataaggggatgttttggattgatggaactgttctaagtcttgattagggtgctggctatgttactgtacattatgtattttaaaaggtgaattaattatatgtaaattataactcaatgaaaagaaaattcaatgtgagggcaaaaatactgaaggataaatagggggtttatttagattaaacccattacattttgagagcagagcacactttctagacttgactgggtccaatttcagcagcatggtagaatgcttaagtgtagaaatcatatccaacttatctccccatgggcccatagtacttccttatgcaacttatgagttctcagagtagccctgcaaactggtatacccgcgcttatactcaagggttaaaaagtgttggattgacaacttaaaaaaaaaaacaggcattcagccttacagaaatcctagatggctctgttacttcagtctatgatttcggtattttgaaatcactgtctgggtatttgtgtggcccggaaggctagtttggagaacaaatacaggggtttgctagtagcgggtagggtaggacagaaaggggtgaggtgctgaaaggtgagggacaaatatgctactaatcagtgtttttcaagtgaatatttctacagggtagagcagcagttggcttttataatctagatacaaagttgttctttctccagggagcttcttagacttacatgctgctggtatattcctagaattccaccttaaaacaagctgaatgtccttatggctgacatctcagcatggaaaagttttgcttaagcaatgacacactgcagttggatccttctcacccacatctggaagccacatgtcagcggcagctatataaaacggtcagaccagcaatcttagagtgacattgtttgccaaaatcccaggcagcatggacctcagtcttctctgggtacttctgcccctagtcaccatggcctggggccagtatggcgattatggatacccataccagcagtatcatgactacagcgatgatgggtgggtgaatttgaaccggcaaggcttcagctaccagtgtccccaggggcaggtgatagtggccgtgaggagcatcttcagcaagaaggaaggttctgacagacaatggaactacgcctgcatgcccacaccacagagcctcggggaacccacggagtgctggtgggaggagatcaacagggctggcatggaatggtaagggccagtccctgcactgcactggggctgggaacatctctgcatatccctcctcctgggggctgctagactctcaaggaatatcagtaaccaaagcctgggcaaatcccaccccaaacctcaccactgcatgctctgggtggagcagggctgctgctgagcagactacatgacaggacaaaaacctgggatggggagtgtctgtgggagacagactcctctgtggctctgttccttccagaagctgttctacctactctcagtttgggccaggggctggtgtaggtcggcgagaagcttgcttaccagactaccaaaagatatgtacagaaactgaaagtaataaactttatagaaattaaaactttctgtgccatcggaatggcatttttcttttttagaaatttatttttaccattttacaaaagtactggcccacagtagtttgggaacaagaaaaataaacaattgatctctcagcacggagggtttgagaactattgatttagagcaagtgaatggaaaagaggggacaaggacatttaggcaaaagaaagtggaattaaatagctgtctactgccttgattaaatgtgctctctcaattatgagtactgaggtccttctctctgcctgaatttaaagtgggttttattgctggaaaatagtttactaaagggttttggagagaggtgctgtcttcccctgactgcattctgccctaagcagtggcatggaattttttcgagcttgtacttttttgtggggtgtgattgtctcagctgggtctcagcccaggtgcttggtcaggagctcatcctagtaggcactgactgctaggctgattatttacaacagcctagatggagccagcactctaggaggcttggaggagagaacggaggaggcagtccagggaggaggaagcccacctggagggctgctgcatgtgctatctgtagagcaacccagatgtgtggcaacaagtacttagtgtagtggggattggaggggtcaagcacaaaatctggccaggtgtggtggctcacgcctgtaatcccaaacactttgggaggctggggagggaggatcacttgagatcaagagttcgagaccagcctagggaacacagccagaccctatctctacagaaaaaaaagaaattagcccggtgtagttgcatgcagcctgtggtcccagctactcaggaggctaaggtaggaggatcacttgagcccagggagtcgaggctgcagtgagccatgctcgcaccactgtattccctcctgggtggcagagcaagactctgcctcaaaaaaaaaaaaaaagaaaatagaaaaaagaaaaagcatagaaccctgggggacacaaccagtagagaggtgatgatgggaaatccaagaggaagaaacaccgatgggtgggggagccaggaaagagagcgggcctttaagtaatgacaacagctaccatttattgagtgcttaccctgagcaggctccatgctaagtgctttatgtggatcatctcgtgtaatgctcaaaacaagggtatatgccatttataggtagacaaactgcagtctagagatccagtatttcctcggctagaaagctggggtttggatccacagagtctttgcttcaaagagtttgtactttgccacagtgacgggctcctgagaggctgctgcctccacccagagtgggctcccacccgacagctgactctgtcagcagagccagtgccacaggaccagattcagggcagttcttcctcctggagagggtggggacctgcaagaccacagcagaagcccagccccagagggatgatccctacttggttaccaggactgtggaggggctcagccggactgtagaaggggtggggagaggactcacacaggcagcagcaggtgagggtgccggggctgtggaggctgcttggacagcctttgtgggccattctcatccacccccatggcctctggtgagcagatttagttattcaaaaccccttctgacagatgctgattcagagaccaggctcaccttgattgttgtctccatgactcctcacagccaggcccactgcctaatgtggagcatggcaatgacctaattacaactgtccctccagtcctcacctctcaggagcactatcgcatgggtgcgactcctttctaacagccgttttttgtgccacagtcaagcagcactcagccatggttccccaagccatagaggaagagccctaggctctgaatcaggaggcctgggtctggatcctggttctaatgacttgtggtgtgaccttggcccagacgctcagccctccagtctcccgcctcatttggaaagtgagcagtcaggctgcatgatctctgaaggctccacagagctgtggctcacccctgaaaacactcttggctttttcttgcattctgttgatctttgtgttcatccctgctagagagagaagccaaatgatgtttagttttaaacttgccaactgtgactggtttgtcatgaactcccaaactatttgaagaaaagcaaaagaggaagaaggtgaaataacatgattttatttggcccatgggagtcaagggaaaagctgataggcgagatacctcttccacctcctcttactcggcatttttgggtgtgcagtgtctagtaattttggtttcctttcctccttccaccctctgttgcctccttctccccgtctactaatcacagggttgaaaactcacaaacatgcaaaacaacttctttacaataagatccagctgccccaggactgacacgaattaccctggaagcacttttaaaaatgattatgcctttgagttcagcctccagtctcagtgaaaaatctgtaaggaaagaaattgcttatgggctggggagctattacatctgacgttggctacaggcttagtctgttctcagggaacagttgttgatggttttgtgcagttgggctgccttgtataaccaaattagctttcaggtttattttaaaagaggggaggagtctcgaatataggtttgacaatagcacataggatctgctaaaaagaaaatctttctaatcaaagtgccatctttaaaaggtgttgccatcatagctgagtggtctgtggtgctgccattgatcacagtttctctgttgaaaatcacctcttcaagtgccggcttctgaagtttggatgatggtctctggcactaacaactaccaggaggccttacctgggtccccatgagtggtatttcaccatcccagggcatgcctaggttgttctcagggaatctgctctaacttgggtcagcacaggctgtagggcactgggtcctgtgtggaataagatgaaggtgaaattttctagtgagattgagctactgtgtagcggaaggagccctgggcttggatgcaggaaacctggattcacagctcctgcttgtatctgtgacattcggtatctcattctggcaaaaaagaaagagaagaaagaaagaaagagagagagagaaggaagggagggagggaggaaggaaggattgaaggaaggaaggaaagaaggaaggaagaaaggaagggaaagagaaaggaaaggaaaggaaaggaaaggaaaggaaaggaaaggaaaggaatggaaaggaaagaaaagcaaaggaagaaaaaggaaggtgtgactcccacctcacaagctgctacttgtgttactgtgatacttgtaggataaagtataagaaaactctaaagcaaattgaagtctaaaacaaatgcctagcacatcatgggcaggtagtaaaagtttagtgaatctgaaattgatgtggctgatgttgggcaagccagctttccacggagtctgagttcagaggaaaagtgttccatttattggtatctactttttaccccgggcttcaaagaatctcaaggagaagttttggagtggcagtttgtgttagagctgagtttatgaattcaatgacaagccacagactggagaagaggagaaagaatctatgcaacagggctatggcagcatcgaggtgcatttgaaggtggagaggttgggtgggaactccgttttccatggtcggactatttccctaatctaagcaagaccaagcctcagtgtagttcagggcagtcgtcctgagtcatggttctgagtattgagtactcacagggcccacttcctcggggatgctttccaagaccacctcctctccccacacatctcgctgtctccactccctcagcctgctttgtttcctacaatgcccttgtcactacctgattggcatttgtttcttgttttgtctccctcactaaaatataagcttcatgaacacaggggctttgtctcattcaccactgtatccccagtgcctagacaagtgctggtacataacaggccctcaatacatatgcagtgaaagaccaaatcagcagtccaaaccccagccagtgtccccacggccctccgcaaggaggcctgcaggttttcccacaggggaaccattttgcttatgtctttgattcccaatattccagtgtctatagtaggggttccaactgtattgttcacatctcattttgatttattgcatttaccaacatgcaggatggtctttcaagatttcttaaggatcgctaaaacatgcacagaggatggctgacacactttgccgccgcagaatgaagtttttatcaggttttcattctctcaataatcttaaggtctcgatcaatttcaaaaattgaaagtaaactctttatttcaaaagccataagggctaaatgctgcacagtaacctatcctggtttgacatttgtggaagaactgatgaaatcagtttggtgttataccaaggttaatttcttagcatttcttagcattcctagacactctagagttatgaaaattaacattagaggaacctgggtgaagagtatacatgaattttgtgtgctgtctttacaagcattctgtaaatctgaaattacttcaaaataaaatttaaaaaaataaatataaggatgcagcacaaatatagtacaacagaatcgtggaattccagcactggagggggtcttgggcacaatctagagcaacctccttacctcacagaataggaataaaggccatgagactgaagcaattaaaaactgaataaaaacattgctgtcaggttaggaactgtcatcctctttttacaaaagtagatataaatatcagtagaaggggagagatgggtcatggagcaattctgtttggaattaggagagaaatccataactttacataagtataggttctatggccctaaccctgatctacgtggtgatttatgatttatagagtattcctcatttatatgttcatttgtttattcattcactaccaaatgcttattagcacaaactttcccaggccccaggaagatggagatgaataacatacagtctatgcccatgagttattcaaaagctaatattgtttgatcttcacaacagtattggaatccaggtgtttcacacatgaggaggttgcccttgcatggctagcagatggcagacggaggacctgagccagccagcctgattccacagtgctgtgggtgatatgaaatgctgatgttatttttgttcctggataaagccatagtgagtgctgacctaaaaaagatatcaaatccacctaaggatgacttctgagggcaagaaggctgagtgtgggagaatagggttatgacagatctaggattcttgccaactttccatctaggtcactctcctaagtgctaggaatcaattgtctgggggaacttgagctctgcaaaaatggttgttggctgctcttgtaaggatggcaaaagctccctcctcccaggaggggatttgcttctgtctgggaacctgcaggacacaatcttctcaatcaataagagatttctgcagagttaagatatcgtgtgtgtgtgtgtgtgtgtgtgtgtgtttctttgagggatcttgaagtattgaaaagttaatgaagtttagagtcagaacaattctcaaaatgcagccccactgaccccactactacctttactcaagtcgtctcaactccgaaatactcagctttcacaactaaaacacacctccctagaactgttgttgtgagaattaaataagataatatatgtacattaacttgtgtccttaggggaattacttaccttctctaaacctaagtttccttatacgtaaaatggtgatcgtggtgagaagctcattatttgaacccattttataggattgttttgataattaaaataattaatgcacgcatagtgctaagcacaatgcctgcacattgcaagtccttgataaaggttatttattattactttatcatgactactctgtgtaaactgagactcatggagacaagtatcacacagttggtaaattacaaagctggagttgaaaaccaaattgctagattacagagcctctgaaatatatcattttgcttttggaacatataatttaatcacaatctataaatattatgtgtacattataagtgtcttgaatatttattacattttaatagacacggagatagcattagatctcttgtttaaaaatattataattgatattcataaactcacgtcaaatttactgtgatgctaatgtagctcatgcaattcctgtgtgacctggaattgctctcaggacataaatgcatctcacaagataatctagatcttctcagaggccttaggggaagcctctcctgcctgtatttttccaaaaaaaactgaggaatttgtatttttggaggcattctcgctctgtcctgtgctaggtctttctatccagagatgctgttctgcaggtcatttctgcttcactgttaaaaccttgtagacagactagcagacttaaaacctggacatggagaagacagcagaattcttacccagatgcaggcaggaagagagcagaatgtgtgcaacttaacactatttaaagagactgttcatatccccaccatggtggcaggaggatgagcagtaaacggtgcagtgttcaaaaactttgcattgtagccccatgaggctactcagtgacagtatgtgttaggtgaaatgtgtaatggtgatatcaacatgtcacaaggaaggaaagttagtatgatttggaattgtcaagaaaggaaggatctttgaaggaggagaggcttggtattgccttttgtgctctgatatgtgctttctgaggctcctctcagtgtctaattggagaagttcaatcctgacaatttctaatgtaggctccaatatttactgaaagtgatgtttcgtgactaggatgtagcctgtctttctatcagattacaggtacttttatcatcatggtagtaataactatgacttcccctgcctttcaattatatacgttgtgccaggttctatgctacacttgatatatagcatctctttagtttttgtgtaatactgtcaggttaagaactgtcatcctagttttacagaagtaggtataaatatcagcagaaggggagagatgggtcatggaacaattctgtttggaattagcagagaaatccagaactttgaaggcttcttttactgggcaaacttgcccccaactgtgtttgtctctgtcccttgccacttcactgctccactgtccccaaccactctcctatttctctgctcctctgtctttggtaccagtctacttatttccagtatctgtattatcatagtgtctgcttatcagttacagtgtctggtaattctgcctgtccaatgtcatagtgtttacttatcagtaccagtcttctgaagagattccagaccaagtgcagcatcaggtatagagtaagttctagtgaatatttgtcaaaagacttaatgaacattctaaaattctgtgggcctttttataaatgcctgatagcaactcaaagaattattctggggaaaatagaattaacaaaaatcaaagctttactctaaaagaaagaaactcttttggtactatttaagacctcatccacctttggggcgggaaagaaatttgggagtgttaaggatgctgtgccacatggagtgagccacttgtctagatcatgggcaaaacttctcatagtccatctctgcagtggggttggaaactggctaacagcccttgaaacacctgtgtgtctgtgaagctgggaaaaaaaagaccagcacaaccagcccatctattatctatttaatgaaattttgagagttcttgaccaagatggtgctgcttccttttaccttgttcatcacttgactcaaccccacaccacaccacctaaagtccaaacttcttagcaagtccaacttctaaaattgtatagaggggttcaccaacaaaaccagacactcacacaccttgcaaatgctctgtaattctgcctgtccaatagctttggacttggtaaagaatgcagacaacaagaagaagtcctgtccagcataccaatcagagctgtgggaccatctcgaagagatttattatatttcttgagagctcatgaacatgagctttgacctcagatgaatctgagttgggtcctggctcttccagttactctcttggccgagagttttgtaggcattatcactgactccacacagtgccttaggtgaggctccacaaagcatgtaaaggtcagggctaggactagaactcatgtctgctgattcctcaacaagggctctttcccctgcaccccactgctgttatgttttactattgcagatacaggagaaagtcttccgttttagctttcagggtgatgaccctgagataaatcattttcagaaagtccactttctcagaataggttcacaaatgtgttttcagaggaggagtaattaccttgtgactttccttctagaaagcttccagtttcagatggagcagggctaacaatactccagtttctgaaactgaaattgaacctcagccttcaaagaggtggtaagaaaaaaaaaaagtatgtcttctcagatgggaaggagagtcttgtaagtaaggtaccagtgccctcctgctctaaggaaatagtcttatttccttagagctgcggtcatgttatacaattcaccaggatattagccatcgtattggtgactgttaggaactcctcactcacatccatgaaggggcctgaaactccctccaagtagtttccctccaagcggaatagagcattgagccactgccctgttctccaggccattcaggagcaacaaccaggtgctgtgaagtgagtcagagcattagtcatttgaccgctacccatctcttttgaaattgagtttgagtaactttagcaatgcaatccctgacagttcccccagtcctgttccatttagaagttgcctctcttctcacctagctctgtgtttgtaatcctgcagctatggccagtgtttaggtgagtcttgttaaataaggagctttgttaaaagtgaaaatgagaggaatggaggagaggaatgcccaaagctatatttattttgccccctcatcatggagctgcagggagagaacggaagcaagaaaagggattgctcacccaagatccatgtaaactacttggagggagtttcagggcccttaatggaattgagtgatgagctcttaaaagtcaattctgcctccaataatgggacatagtcgggtcactcattcggtccctcattcttctattaaacatttgctggacaacaatgtcagacactgcatggaatactacttcctgagagtggtaaggcatactaaagtacctgtgctccaaagtgggtggctaagacatccaacctcattgagctttgttttagggaaacagcagctcagggagggcctatgaatccaccagtgttttactgattagagacaggggagccaagggacagcttttacaaagtagactcataattactgtgtagactaaacataagtataatgacactaataagcaatttattaatcccaggaattttacatgcgttgtcttatttggtcttcacgataactttaatacatatgtgctattattatgcccattttacagatgaggaaactgaggctattagagggcacgaaacccgcccagatgatacagctaagaacagtggagccatccagcagcatagccaatgctcttggccactctactatctgctccccacagtgtgaaaaggtacccccacaaagatccggctctggaaggaatgctttcacataccaaactcctgaacaggctgactctaccaaaatgtgaaggcaatcaaaccaaagccggaggaggagggttatgtttggttatctaactttcactatatgttcttaggctctgagtctgtagggtccaaataatcttcacagggcagagttatctgaggtggtgtgtgagaaagtgacacacacttcccgtacaggcactggggccagcagcctggccaacagctggcggggaatttgtggaacttggattgccttcagaactggtactccatgaaacagttcggcttatcttcctacatttatttttacttaggggaacttacccccatgggagctctgtcccctataggggtctgagtacagaagacaagccaaaacaatggaacaacaactccgtggaaaccacagcccagctcagttctgaaagggctttgttttagaggaaggcagcattttagtgatggtaggagaacaggtcacagagagcactagcttatggcaaccttctctttttggacacatatgagttttgcttatgattcttagagcttcatattgaaattacctctcacctactttactaagaattaggatagaatagaacaccctggtagatcagcccctaaagctacctttccaccatatcatgagcctagtccattccactcatatagcttgctgaagtatgccaggcatttacaaagtgattagtatactcctgatgagatgcgagcaatggtagaatgaagaaggctacatcagtcatatgcagaaaactgaaactggaccccttccttacaccttatacaaaaattaactcaagattaattaaagacttaaaggtaaaaacccaaaaccataaaaaccccagaagaaaacctagacaacaccattcaggacacaggcatggacaaagacttcataataaaaaacaccaaaagcaattgcaacaaaagctaaaattgacaaatgggatctaattgaactaaagagcatgtgcataccaaaaggaactatcatcagagtgaacaggcaacctactgaatgggagaatatttttgcaaactacccatctgacaaaggtctaacatccagaatctacaaggaaattaaacaaatttacaagaaaagaagaaacaatcccatcaaaaagtggacaaagtatatgaccagacacttctcaaaagaagacatttatgtggccaacaaacatatgaaaaaaagctcaacctcactgatcattagagaaatgcaaatcaaaaccacaataagataccatctcatgccagtcaaaatggtgtttattaaaaagccaagaaccaacagatgctggcgaggctgtgaagaaataggaattcttttacactgttggtcggaatgtaaattagttcaaccattgtagaaggcaatgtggtgattcctcaaggatctagaacaagaaataccatttgacccaacaatcccattaatgggtatatacccaaaggactataaattattctactgtaaagacacatgcacaggtatgtttactgcagcactatttgcaataacaaagacatggaaccaacccaaatgcccatccgtgatagactggataaagcaaatgtggtacatatacaccatggaatactatgtagccataaaaatgaatgagatcatgtcctttgcagggacatggatgaagctagaagccatcatcctcagcaaactaacacaggaacagaaaaccaaacagtgaatgctctcactcataagtggaagttgaacaatgagaacacattgacacagggaggggaacaacacacactgggaccagtcgggggtagagtgtgaggagagggagagcattaggacaaatagctaatgcatgcgggccttaaaacctagatgacaggttgataggtgcagcaaaccacaatggcacacatatacctatgtaataaacctgtacattctgtacttgtatcccggaacttaaagtaaaataaaagaaaattgtaaaacctagatacatgtataataaactacacagttgcacataccaaaaaaaaaaagctagatcatcaaagagccataggtctcaatttacaccttaacctgcattactgagcccctatagctgagttttctagtctgccagaacttcttacaagtcctgggaacagggaattcaagctaatttacatggttgaccgaataccgagcccatctctcaattcttctcacaacataatagcaaagtgattgatacagaacagtagtagagtatgagatgtttaataaatgaatgaataaataaataaataaataaatgcatatttgaattatatacattaggtgaataaatgaataacaagtaataaataataaatttaaaaggacggatgatttctgatgacagacaagtaatatatttaatatctaattttgttagatctgcaagttcattttcagcaatggaaaagaataaatgaaatccacttgttgataatgttacaatttgtgtgtcaacaaggcctctctcaccagtcagcacacggtacttactttatgcattatattttctgaaaacttatcttcccatgaaatacaaggttgcattccagcagctgtctggccatgcacatagacaactgcctgctctggctctgcccactcataagaggggatagaccaatggctgggatggtgggaaatgcaaagaaggagaggtaactgaagaactattttggaagggtttgtgaaagagctcatgctataaggtggaaatccactggatttcatcaaagggccatggctcaccatacccatctgggctttgcatgctgtgtgggggcagaacaaatgatcatccttgtgctcaatttccagggctctgctgttaagcagaagaaatgtttatttgaaattcgtcaatacattgtgcttctctttgtcttctttttattttaaattccagtaaaatgaattataatatcttttattttaaatgacatgcataatacaatcttgaatttgtaaaattctagatgtaaaattctagatcctggataagtagcaagaacagtggaaatgccctgactgtgtagagcttatggtcttgtgggtggtggaaagattcctggataagtagcaagaacagtggaaatccactgtggtcaggtagaaaatagtgttatcatcacagcaaaaagtgggaagcctgaagacgccataggaattgggcccaggaatgggagaaaatcatactagagatggaacaaaggaagaaatgattgtactattctaagtcaatgtttagttcaaaaggtgctgtgaagaccagcagcagcacaggtagaatgaaagagcaaaaattatttcttgtctgtggactggagtggagcggttatatatttgaagaattaggactaagcagctaggacaggaaagggatctttagagggggtttgaggcattcagttggcctgttgcaactctgtaaggactgcctccacagccaggattcttggtggccaccaggaatagaattctgagaaaaacatgccatggctgtgtagagcttatggtcttgtgggtggtagaaagattcctggataagtaggaagaatctgggttgtggtcccagctttcctactgggctgccctgggcacattcaccatgcccatctgggctttgcatgctgtgcaggggcagaacgaatgatcatccttgtgctcaatttccagggctcttctcttaggcagaagaaatgtttatttgaaattcatcaatacgttgtgcttctctttgtcttctttttattttaaattccagtaaaatgaattataataccttttattttaaatggcatgaataatacaatctcgaatttgtaaaattctagatgtaaaattctagatccacccatttatgcaggcttccatctaacaatatatattgaaagaggtatgacaggggcagtgttccctaaattttgttcagttagaaaattctgagtcacttaaattttaatggaggggctatgttatttctacaaatataataaagactattatttgcataaaatggaataaattgttaagaatctaggtcagagaaagagtgtgtaactgtggcagtggggtcttgggaaggggtctgtgtatgtgtcactgttcttaggttcctggggttgtcttctcttcaggtaccagacgtgctccaacaatgggctggtggcaggattccagagccgctacttcgagtcagtgctggatcgggagtggcagttttactgttgtcgctacagcaagaggtgcccatattcctgctggtgagtctggcagccgaccaaaccctcatgactcctggggtgggagaggcacctaggaagtgctctagcttcaggtaagcttgagggtcacacacaagcctggaaggcagcgctggcatatagacaagaatgaatgaatgacttaggaggatgttcccgccaagagggatctttcaggttatccaaccccccacatccttcttttggcagaaaaggaaacagaaccatagagccggcactgactggcccaaagtcacccacctactctgtgggaatgccaagtcttaagcttaggcctaatgactcccatcccagtgctgttctccttctccccaacttctggtaacttctcatcatatccaaggctgcagggcctatttgggaacctagtttcctgtagtctttctctgggagaaaccaatcctctcatgggtcagagtctagtacatagttatagacagaaaaaataaaatattaaaaaattaaaaaattaaaaaaaaagattgtgctgttttctggatccatttggaattccagcctctgatgttttgtttctttccctatccctgggctcatgccgaatatctcctgacctagccttccaattgactaggagaatgtgtatattgtcatttgccctgatgacttacactgggtgttgataacacaaccggcccaggtttttttaatctgaaaatgagccaggcatttctgccttgggcaaggggatccagaagtgtcaacatgtgaaggttggctccctcaagtgattgatctctctacagtttgatgcttgcaaggacagcttcacaggtcatgcttattctctgcaatcagacagcttactccacagatgcccagtggcacacagtatctctagggatacaaagccccaaaagcttaacgtttttctttttaaagtaaggaccgatagtaaattcagagctcaaagtcacctgtcactgtatgatggagcagaaacctcctctagttcttcaaaatcgcttccataaagcagcttttactcctctacagtgggtgaacaggcctggcaaaggattacgatgccactgggataggtcctgaaccaaagacctaaagatctcttgcagtggaggaggtagaaggagcaccagtttgggcaaaaagaaacttgagtttcagtctctgtgttggcctttcctcacttccctcccttctttcccctttccccttctcccctccctctcataactctgcaggctcaagcacatcacctaaaatgatgaccaccttttttgagtctccaagatctttaagactctgatgaaaactatagaccttgtcttcaggggggaaaatgcacttagcatgttaatacaatagtttgcagagaatttcgggagtccttaaactccctgaaggccattcatgaacacactgccaagaacccctggatcataagttgaaattccaaggactagaagatctttcaggttgtgttgaaccctaaaaatgtcttaattccaaagacacttttggaaaagatgatccagatgccagaactgttttgagaggatgaaggaagttccaaagacgagtgcgccctaatgaaaggggagagtaggtaggagcttggcctccacaaatctctcattcctggtctattaacagaatggcacttcccacaaggaaaccagcctccctttgttgcaaagcattaaaagccagttaaaatgtatgtaaattacctgaaagagcaagcaaaacctaatactcagtcagtgaatttatttactacattagtataactttccctgaatcagactccaaaggaacacatcagggctggggtatgctgggtggccaggaggagtgggttcaggagcaggggaaagagtgaggaggtgaggaggtagccctgcacgggctgcagtggggaggaaggggaacatggacagcctaggggcagctggaggcctggatgttggtggctctgtctctctgcccttcgtagatgcctctgtcacagcactttatgcattttaccacctgtgtacagttgctcctctctacctggacttccagtgtctggaggatatggggccactcactgatctttgtattttcaatgcccagtatagtgcttggaacatagtgtcttcttaacaactgttgaacaaatatccacattaataattgtggagggtgtatataatgtgaagtggcccagaaaatataattctcttacataaaattttttgttctctcccccatccctccacttctgcccagaatataagctctacacaagcagagatctttgtgctgacatatgccaagccctataaataatgacaggcacataacatttgtttggatgaaggaatgacttcaggctactttttgttatgagcattaaataagataatatatttctggccttgccactgtctatgatcacacagagctgacctgtcttgaaacagagtccccttcaccctcccagatgcaggagagacccagcctcctcaccaactaacaggacattcaaaggcaaactctgcccaggaacaacctagcaggtgtcaggtcattgcaggaagcagaacttgagagcggggttggttatgcagaggaacaagacatgtgaccagttggacagtctgttgttagatgtactaactcattcttccccaggcagagaggagtaagctgaggcagcaacattcctcatcacagcaaggctcgaggtctctgcagagatgagtgggagagcctgctgtgtctgtggccatgccatcatggttggctggcccctgcccaaacagaacaacaacagatagtgggcttgggcctcaaggctttgggtgaccaggcaggcaaggagctaaggctcactggttttagaaaatttgtcaaggccgggcatggtggctcacacttgtaatcccagcactttgggaggccgaagtgggcagatcacaaggtcaggagatcgagaccatgctggctaacatgatgaaaccccgttctctactaaaaatacaaaaaaaaaaaaaattagccaggcttggtggcaggcacctgtagtccctgctactcaggaggctgaggcaggagaatggcatgaacccaggaggtggagctcgcagtgagccgagatcacgccactgcactccagcctgggcgacagagcaagactctgactcaaaaaaaaagaagaagaagaaaaaaaaaagcaaagttgtcaaacagaagaaatagggggtggatgaaggtaagtgtgagagaaagggataaacatctaaattttcctggaattcccatattccgtggatctgtgggatctgtgttaacactctgagcattgcttcttgaagcttatcctgtctgtttatttgaatgctgagacctgaaaaagacaggtctttgtgtttccagttccaccgttgttttaatgatgccccagatttccagtggtcacctggagactggttccaggatacttctgcttccccaagaatgctaggtatcgttcctctcacatactttagaaaggcttctcaagctcccttagatgcaattcaccagctaagatgctaaaaatgtaatgatcatatagacatatatgtaggaacaaagtctcaatgttaaagattgatagataaagatgagcaattttgagttgccagagatattcatgtctctgctcacaaagtttacccaaagccttgatctgcaatgactttgccactctgaacccaccccaacccccatacccttcacccttccttaccccatcctaccatccagacatgttgctgttggtctgtggagccaaaaggtggggaaagtacagagaattaatccaaaaggcatgacaagtcaactttgaaacaagtcccactaaggtgtggttccacctggctggttctatttctgaaggcatggtgttagagctgagagctatcacggtcaccaaataaaatggtattttttcaaagaaaacattggagaagcagcagaacaagattcaagtgtgcaccatggtacacagtgtatgactcactatcccgctggtgtgtctagacattttagtggcatctttaaattgcctgagtcatgatgttgtattatatgtctttctaaatgcctccagggcataaattaggtcttattttttcaacatctccaggatattacccagcacaaaatagactcttaataaatgtgtcagatgaataactgaatgttgcaagcccctaggaacagtaacaatggtgaaacctgacattgatgtgatgatgttttatagttgacaaagacttctttcatgtacattattttatttgatccttttaacagccttacagagtgaagtgagaactctttttcctgcaccttcccacagtgaaatgctgataaccctcttatctgaaaccttcccttacatgactttaattagcttgaattacctcccagggaactggacccatgtgggtgggaacgacatttttccccttccctctttgaaaggcattcttcagcacgcagcctgacactgtatgaactagctaagtgaatatctagcgcctgcgtttgtgagcacttagggattcagaaatatcatcactctgggctggaaaaaacaaatcatccaaccaactcccaaatgagtatgagatttatttgtttggtgggaaccaaggtgctgctctcgtttcagcttgtgcggtttctctttggatattacagcctcactggactctggcaagaaagcaaattcctgagagatgtggacatgccattaggaaatggtctccactggattggatgaatagtgaattttatagatatttatttagatatgaaaattctaattcttagtctagtggtctgcaaaccacaaacacatgtcactgaagttgccacaaccctttagacattgtttgtcataatctctcttctccaaacagctcagcagctgcaggctgcacaccagactgtctactgtccaggcggagactctgtgtcccaggatctgatggttgtgaatcattttcttttccaaatggctcttctccagacccatggcctttcattaggttcattggataatatcttttgactgtaaaataatgcatccatttaggtaacctttacttttctcttcaaccctgatattctgtctctcagactttgcattctccactgcctacttccccactctctgtgtgcaagtcataagccagagagtgctttttttaaattcctgtatagctctagttaacatcagttgattagaacattcttatctctcccaccccaaagcacccagtcaaagctaatctttaattcttagcctctttgttcagatgttaatacaagatagggagtgtttgcatgttcactcctgtaatgctgttttagggacatgaacaatctcacaggcctctgcattgctgtgcctgtcatatgccacctgtgcccagacagcctcctgcaattcagctcccagaggcctggtaagaagagcagcttccattaggtatatctcctaatgttagttaacaggtgcagcacaccaacctggcgcatgtatacatatgtaacaaactgcacattgtgcacatgtaccctagaacttaaagtaaaataaaaaaataaaaatgaagagcagcttccatactggtcctctgcgcaagctggaagctattactatagagatggacatacttaagttttgaggaaattggactagatgtctcaatttaaaggaacttatattgggtttagatgctctgcgccctactaaaaccattgccttccattgcatgatgtacatagcactcattgtgcagacagcagcctctctgaacttgagcaaaatctatcatccctttcatctgctggaatggtttccataattattgtgccatatttaaaatgtagacatgtacaattggcactccatatctggggttccctatccaagaattcaaccaactttgaatcaaaaatattcagaaaaaaacaataaaaataaaaataacaatacaacaataaaaaatgatacaaatacaaaaccatatagtataataactactcacatagcatttgcattatcttaggtattatacgtaatctagaggtgatttaaagtaaacaggaggatattcataggttatgtgcaaatgctacaccattttagatcaaggacttgagtttctgaaaattttggtatccatgggggtcctggaatcaatcccctgcagatgccactgatgactgttgtattagtccattctcacactgctaataaagacatacccgagactgggtaacttaacaaaggaaacagtttaattgactcacagttccacagggctggggaggcctcaggaaacttacaaccatggcagaaggagaagcaaacatgtccttcacatgatggcaggaaaaaatgccaagcaaaagggggaaaagccccttataaaaccatcagatctcgtgagaactcactcacgatcatgagaacagcatgagagtgaccgtcctcttgattaaattacttcccactgggtcccttccatgacatgtggggattatggaaaccacaattcaaggtgacatttggttggggacacagagccaaaccatatcgactgtatttggtgcctgcattataggtgatacctctctccttatgttcaaacttcaaaagcagaaatatcatagatgtgtctggctaagtattggttaacccaaggccagctacttagaacaaagtaaacctctcagttacaaaccaaatctgatgctttattctatctagtctgcttccctctactataatagattctagaggcaatcattcttacttctatttattaattcacttaagcagtcaatgaatgtgaatggatatgaaataataacaattcataggctttgggtgagaccctactaatgataatgatgataataataatatttatttattgacacttaccacgtgttcctgtgttactgcatttaatcctcacacacaaaaattatgatactatcatacagatgagggaactgagctatagaagttgtggctcccttcaaagttccaaacttgactcaaccagtctatctgcctccaaatcccatgctctttgcatagtactgagctgtctctagatgaggaataagacttctacaggtgaaatattacataatagcacagtaggcatctggtagaaaacagagaataaaactattttaattggaggggagctgttgaaggtcaagtagcccccactgacatgcagacccagggtgaccaccacataatgtggctaatgaaaatcaacacgagtcaaagtgaatgtgcttactgactagccctgggcttggacagtgagttagaaactcagttccaagagagcaatttggaaagtgttcagggactttcctctactcatttaagctacagatatccctggaactgttattccttcgtgttgtgatacatgtctgaaatgtttgaaatgtaaagtcccaaaatgccataaaaggacagacatggacatttgtttttatttcacacacctcagagcccctgggttcagattttctgtgcagagaagggcacttgggtgactaccagaggtcccgcttggccaatccccagctcttgtgggaagaagcctggggattgttctctgtggctgttttcctttacacataactccatttggggtttattttttctgtctttacaaaactaattcaaagggggtctgatgtagctcctaataaagacaaactaaattaatctgaaatatgttcattccttatagcttacttggaaaagcattatgcaagaggattgatcatgaacagactggctttatttaacaaacttctcaatgatttgactgtcagaaagggacatctttttagctgaatatataaaacgtaagccaacctcaacacaccaaatccgcaaatgttgagtttctcctccaaacccacctctgaaccagatcataaaagcatatttgattccatgcaccagtgatccctcaaagagctcactatattggccatcatgatgttatacagtattctattatcttgctaaatatatagtgctgatgtattagtccattttcatgttgctgataaagacatacccaagactgggcaatttacaaaagaaagaggtttaatggagaactcacagttccatggctgaggaagcctcacaatcatggtggaaggcaaggaggagcaagccacatcttatgtggatggcagcaggcagaaagagagcttgtgcagggaaactctcatttttaaaaccatcagctctcatgtgacttattcactagtatgagaacaacacaggaaagacctgcccaaaggttcaattacctcccactggatccctctcacaacatctgagaattcaaaatgagatttgggtgagacacagccaaactgtatcagctgacatgtcacaggacattagaatgggatatttaaagtaaggtgctaattgagtggtagagaaatagaagaaaaacagaattcaatattgaatgaccaacagaagcttctctaaaatgttgtttgagcataagctgggctataaaagatcatttggaagacattctaattttattcttattttttaaaaagctgaagtatggcttcctcaggtacccgttctgatctgttcatatgtaaatgctggggtttttttccagtttttatggtagggagtctgtggtgtgtgcttttctggtgtccccacaaagtgggccaaggttggggatatgatgtttcctgaccatgagatgaagctgtatctgttcatgtgcacatcaattggagggaaagtcctgaaagaggagcttccaggtgacaccgactaatccagttgccctaatttccccaagtgaaacagctgtaacaaacacatctcagtgctatgaagtttgactttcatagaagaaaagtgtctagctccgaataaggtctcgtagaggtgggttttcacaaaaccttacgctgagtcactttatgtcaaggaatagattgaaaatctttactttaactattaaaaacctaataagttctcaacccaacctctgacaatgaataaaattggccactgtatataactagattgtatctctatttccctttctaaaatggatgtgagagcgtatacctggactcagctctgcaatatgtctgttcttgtggcaacggagccgagacatctatcagcagcagctcagtctatgatattgtatcatagcaaacattcattgagtccagttggatctgttaataattttagagcttcaagaatcttagatgagaaaaatcctatatcaatcttaaaattgtcttcagttcgaactgatttccctcagctcataagtaagatattattaatttttttaccatcagcttcagctgacacaagagttgtgcaagtggctttatgttatcaagttttttcttagctttggaacaactctctgtctttcatcttgacagcagaaaaagtgctgtgaagtgagaaactgtaccacaagagtcattcatctgaaagtgcgcatgcacacacacacacacaccccacacacacaccagtagttttgctttttttgttgttgttgttgtttgagacggagtctcgctctgtcgcccgggctggagtgcagtggcgcgatctcagctcactgcaagctccgcctcccgggttcacgccattctcctgcacagcagtagtttttattaaaaattaagtaatagctaaaattgaataaatctattcaaacactttactttaggggaaaggagaaaataaggcttcccatagaaatgtttgaaaagtagactcatttcaataaaggcatcttcctgacctgcgctcttcttcatcttgccaagctgaaggtttgtttgattgttttaattggtctaggaatgtatggcaatgctcagtatgaagtgtgtttttccaaaaaactgcttaaagtgacctagtaattcacaaggaattcacaaggaagctgcaaccacaccgaactcttccccgacctacactcgcaaagcccagtgtcacagcttaggaaaccctgatcattctgcttccttgtagcctcttttaatttcctgaaaagtccctatgccctgtctcagtgtctagttctgaacgtttaaattcttttttctctctaaggagctattactgggctttcacttattaggacactttgtgcgcgtgtgtgtgtgtgcgcgtgcacatgcagtgtcatcaagcgctaaatgcagccacatatatctggtttgaaaatacagaacagagcatcctgggccacattgactcaatagttcttcctatggatggtgtttgggaggttcactttctaccagtgatttgggtcatttctcccttggtatttttatttcataaagtaggagagatttccatcgatatccaacctccttccctatcctcctttacccaggtttctctaggacagtctaaactcaatcccatggtgttataacaaaaacaagacaaaataacaacaaccaaaagtcacacaaaacaaaacctgtctgggaccaagaagaaaaagtaccaatggtcatgcacctcaccttctctaggacattctagaaattcactggacatcagtacctcatggagaggcttctcggacaaactgtccagttagacagggggcttatgtctggtcactaccaaaaatgaagcaacagagaatcctaattaaagaaagcattaaataacattttccttctttgaagcttaaaacttcttgatgtttttaaaggtaagcttttctttcccactttattccgtgatatttatccaagtatctgaagacagatcagagtggtcagtaaaaacttaaaaaataaaaatctagcttcataatttccaaatacttttggcaattggatttagcttaatgcagtgttgctgtatgtagattctgccttagcaaaaaaaagaaaaaacacacaacttggtaattaatttttacacattgtatccagagatgcttcaaaagttttagaaaatattttttgttccctgaagtaaggaaaacacacaccccctcccacccccatgcaacctcttattctaatttgcattattgatgttctcaacaaacctctctttccttgggttaactttaatacagtccttgttagaattctcatggatcataaatcagtgggatccaagtaaggccctattagttctacttataagacatttaccatgctgggcgcagtggctcatacatgtaatcccggcactttgggaggctgaggcgggtggatcacttaaggtcaggagttccagaccagcctggccaacatggtgaaaccccgtccctattaaaaatacaaaaattagctgggtgtggtggcacacacctgtaatcccagctacctgggacactgaggcaggagaatcacttgaacccaggaggcggaagttgcagtgagccgagattgcaccagtgtgcaacagcctgggtgacagagtgagacttggtctcaaaaaaaaaaaaaaaaaaagacatttacctgaaaggtaaagtcctgcttctggatctctttagaagcacaaaataagtttctggatttgcaggaccttatttcccttcatgaactcgttaagcaaaaacacaggtacctcactttgggttggacttggcatcctgatagagcataattacgtcttaggaaaagtcaaatcagagaacaagggttagtgaataatgggtaaaaggaatgattatgaaccaagagaatgagctaaccattgatctttctccatctgtgcactgagatcctcctaggagcccttacagtttataaatcaatcttttcatgatttaatgacaatcttggagaaagatcaccatcagtctgcagaggagaagatctttctagcattaataaacagtgatctggtaaacccaaatcagatgaaattattgacactcacaaactagttgttttccaagcgtccctggggtgtggataaagactttggaggagctatttcatggtaaaaggactgttttggtcctgaaggttccagtggcaaagcccttatgagaactgggggattctagactttattccaggatggactaccatggacctactcatatgaaggctcaggatttactcaatattggaagagaaggaaaggaaaggaggaagaggaagaagaaacaaaatagttcttagtgattcaacacctaccatgtactagtatagcacactcatcactcatttttattagttccaatgacaaacctataaggtagactttattcttctacagatcagaaaacagattcattgactttccccaggccatatatttattcagctaatatttattatgtatgtgttttaggtgctggatgaacaatggtggacaaggcaaaaactctacctttggggagcttacattttaattaaataatttttgaacactttgttgactataactcacaataagaaacattaaactatcgcaatatgtacatcttataaacaaacacacatatatatttgaaacaaaatgtttacatacatagactcgtccttactgcatgtgatgcatgcttttatattttcttttctattttatgtctcttttaaagccaattaaattgattttgttatcaactaatgaatcataatctaaaatttgaaaacattgtcttagttgacttgaatagaataggaatagtattgatattaatcaatatcaagaattccaaagttattttgataattccaaagcctggggaggtatcttcatctttttcagtgcacagtttaatggcctagaaaaggaagatgagaagtgggaggagagctgtctgtttcttcacagcctggagttgtttggtggatgtcatttaacttcagtctggatttgccaggatgctcaaactccatctcttcttcatagtgtgtcttctgtttgctcccagcaataataatgtgtttcattttcctctaacctttgttcttcctgcataggctaacaacagaatatccaggtcactatggtgaggaaatggacatgatttcctacaattatgattactatatccgaggagcaacaaccactttctctgcagtggaaaggtgagaaagacagccccttcccaatgggctagggttaaaggagttgggactaactccctgcaaggattttacctgcaggaatttataaacacaaacacacacacacacacacacacacacacacacgtagaatacaagtgaaaatttcttacatgcacatatatttctgcaggaactttgacctgaggttttacttatcttagtttcctacctggtcaaggattaactgcagttttggctggaaaatgggaggcagtgggaagtgagctgttctcatgagctcacctcatggagctgctcaccttgcaagtgagggtggattccagcctgctcaagagcagagagtcctaaactcggtatcccttgatggtctaagcttttcccctcactcaatttcaaagagcacttttcctcatgaaacaccaagaggagaaggcaaatatgcttagaggagtgcccattgtcaaaatggacccccttccaccccgtgcctctatatcatccccactttgggttttaggaaagaagagagaagagaaagaaaagggattggagataagaaacacacagaacctactgtcttagtctgggctgctataccacattaccttagactgggtaacttacgaacaatagaaatttattttcacagttctggaagctggaaagtccaagatcaaggtgccagcaggttcagtgtctggtgaggggttgctcgctgcttcagagatgttgctttattactgtgtcctcacgcatggtggaaagggcaagccagctcccttcaacttattttatatgggcactaatcccattcatgagagcagagccctcatggcttaatcacccccctaaaggctcctcctcctaatactatcacattgagtattaggttccaatatataaattttaaggggacaccaacattcagaccatagcatctaccaaccatatttagaaatgaaaggagttaacaatccctcagtaaacctgcaaaaattaatgaaagaagagaatttaaatggcctaaagataaaaacagcactaacacttttttcatcacctttctctcacaatcaactccttaatcctatctcaaatacatcaaaacggtaagaagaaaacaagaattgtactccctattaatatagagaaatgtgtgggtaaattcaggtgttaatgattggtttggcctacttttagtcagccgataatcactttacacagaaatgaattcctgaaaagttaccaataaatattttgcaaaccaaataacacttacattaactcattagatagtatgctatgatgaatttgagtgtgacacatctttggtgtgtgtctgtgttttcaaacagaattacatcttaaataaagtgaacttatttaatatgacctagaatttcttttttttttttaaaaaaaaaaaagacattaagtagctctggaaaggcacaatatatgttgcaggctgatcagcaaaaacctttatgtttacccataggcaaaccactcagtttgcacacattacttatttttactttagatacactttaaactagcttagttaccaattttctagaagcagcaaattagaaagggaaacgagtatatactacttagaatgaaactcattccaccaatgagaataaatagctggatgacatgataacaaatatgcttaagaaaaataaagaaaatgaaaggctcaagaactcaaagaacatgggttgtcatttagcagggccatgctccccaaagtgcaaaacgaaataacaggggtgctcaatgctccaaatgatgacttcagctcaacaagaaaattagttctatgttccctgtttaagaaagcaggaattaatacagtaaaggaagagtgccatccaagattagtatgaaataaatatatctgagtagttaaaatgctcaattcagttttcagtaaattcactttttagtaaatttttcggttatgtggattacccagaatcatgaaaaactgaaatattatgtcattgcattaatttaaaatgagtatcctccccccaaaataaaataaaataaatatactcatgcaactttgctactgtcatcaaaaataagtagcttaatgatccacaacttgggtttcttctcctctgctgaaagatgctgaggtccccagcttggagaactattgtcagggcaggactccttgtgcaagagctttccctccacatgcaaatcatagtggtttcctcttagaatgctgttgttccatctatgcgctattgacatctagggccagatatttctttgtttcagggtctgtcctttgcattctagatgtttagtctacccactagatgccattagcaccccaccctaaccaaaagaagttgcagacattgccaagtattcccttggggagcaaatttgcccccactgtcctggtgtgaaatcagagactgaacctggtggaatcatttggtcttcataagaccaagtctaagttttgctcagcatcaattaatagccttctaaaagagtagtttgaatgcctgatcataagatcttgtttatctgtgtttgttgctacacagataaataagacctggctgcagtaattacagacatttggtaaacccacaggccaccaattttctaatttccttctaaaacaatctatgacctcttttgacaattgcaggaatcaaaatatcacccaggccctggtatcacccagaccctcaagttgatcacccagatttgtgttgagggactctatacccaattgttctaaacaaacgacccggagcaacagactcagaattagaaagcctgccttaagctgtttgagcagagtgagccctgcttcctaggactaagagcaatcagccccacttttcagtttagaagctggatggaggccttgttagtcatagtgtttaggataaattgttgaaaagagggcttgcagattgaaaagggagatagataattctgagtttgtaaaggaccccaccaagctttggaatgatttgcataattaaatatggaaaaactcttcgtttttgccctttatcaggactgtgcaaagggcatggcagccacgtgttcttctgggcttaagattacctagttaggcagactgtgtggtttaagagaaagaccaagatttgagtacaataaactgcgaatctgaaattgtcacctattacttgtattaccttaaagcaagttaattatttctctgagcctggtttttcacctaaacaatgaatcgttgtgaggattaaaagagaaaacacgtaaagcatctggtgcaatgccagatatattagaggctacaattatcattatcactgttcaacagtattagaccacaggagtgtcatgcaatgtaggcactcaaaacatttctcttaaatggatgaataaagaacataaattcaccctgagcaaagaacattccttgaaatgtatccacaccacatttttcaaaatttagtaatgctatgtacactcttcccatccccaaccacttaaacacataggcaattcataacaattcttgtgatgccagaatggcagccattttcttttttaatttaagggactttttcattcctctgtagcagtgttttctgaagggaaacacatgtatagcacagagcccagtgcatggtgagcactcagcatatgttaagtgctcagaaagagtcagtgggaaaatggacggactttttaaaacaagatttttttcttttttttgagacagggtttcactctgtcacccaggctggagtgcagtggcaccatctcggttcactgcagcttcaacctcccggactccagcaatcctcccacctcagcctcccaagtagctgggactacaggcatgcaccaccacacccagctaattttttgtatttttttgtggagtcagggtttccacatattggccagactggtctcaaactcctagcctcaagcaatccacctgcctcagcctcccaaaatgctaggattgcaggtgtgagctaccaagcccagcctaaaacaagattctttacaatgaaatggagatgatgttaaataaatgcttttattccaagctgttaacccacaggtccttgaggtactttctggaggcagcaggggtgagctgaccaccagtgatgaacagaggcctccacacagccagtgacctaattagtcaccttcaagggtgacctgaactcacagatttgtcggttcttgggaaactgcataaagatgtcttctaagagcaaagtgaggttaagtgtcccttcagttcccagatcctccaaatgttctctgctgctgtttccccagcagcgattcttcctgccatgtcctttctcactgacattcattttctgactctccctcccacagggatcgccagtggaagttcataatgtgccggatgactgaatacgactgtgaatttgcaaatgtttagatttgccacataccaaatctgggtgaaaggaaaggggccaggggacaggagggtgtccacatatgttaacatcagttggatctcctatagaagtttctgctgctctctttccttctccctgagctggtaactgcaatgccaacttcctgggcctttctgactagtatcacacttctaataaaatccacaattaaaccatgtttctcacttttcacatgtttcatagcaactgctttatatgactgatgatggcttccttgcacaccacatatacagtgcgcatgcttacagccgggcttctggagcaccagctgcagcctggctactgctttttactgcagaatgaactgcaagttcagcatagtggaggggagaggcagaactggaggagaggtgcagtgaaggttctctacagctaagcctgtttgaatgatacgtaggttccccaccaaaagcaggctttctgccctgagggacatcttcccactcccctgctccacatgagccatgcatgcttagcaatccaagtgcagagctctttgctccaggagtgaggagactgggaggtgaaatggggaaatggaagggtttggaggcagagctgaaaacagggttggaaggatttcctgaattagaagacaaacgttagcatacccagtaaggaaaatgagtgcaggggccaggggaacccgtgaggatcactctcaaatgagattaaaaacaaggaagcagagaatggtcagagaatgggattcagattgggaacttgtggggatgagagtgaccaggttgaactgggaagtggaaaaaggagtttgagtcactggcacctagaagcctgcccacgattcctaggaaggctggcagacaccctggaaccctggggagctactggcaaactctcctggattgggcctgatttttttggtgggaaaggctgccctggggatcaactttccttctgtgtgtggccaggagttcttctgcagagatggcgctatctttcctcctcctgtgatgtcctgctcccaaccatttgtactcttcattacaaaagaaataaaaatattaacgttcactatgctgaaaatattcagggtcagtttttgctctctactctttcccttgctgattatttatccattcattctgaaaatcctggttagcattgtggtttgtgccaagcaccatgcagaccccaggaataaaatgatgacaatgacagagtgtggtgggggaatcagatatttaagacataaagtgctaaatgctttacttaagattaaacaaaggaaggaatcacatttcttggcctttgagttcagcctaatcttttttcagcatccttcaaccttcctcatcccaagatgtcacatgaatttttaaccacaggaagtccctcttttctttatccacagcagattgccttttttttttttttctgatccatgctgctcttccctcatcctctctcccagtggacccagaagaagagccagccaggcaaaaccacagggatcgcgtaccctgccatacaccccctctaggtggtcaagaaggtgactctcagccagtggtgatggtatttcccacggcaagatcccagcattgtgatggggaaggcagggctaaggatatcttctcctgccttaactcctaaaacactttttcatattagagctttgctttatttcctccatgtcattgtttctgactctctggcaattttaatttataataagatgcttcggtgttatttttcacaaagggagccattaatattttagcaatttcagcctggttcaggatggaaaccaggaaatagccttagttgggtatgtggagcacagcaggaaaggagacaagcaatgctgattggctgacttggcatccatgaagaaagcaaatggctggtgagaggatggggagctgggagggtgcagggagcatggctgggggaggagaggctgcagctgggagtagccaggagactgcaagaggacataagtcaagaaaaaaaacttctttaaagcaattcaataaatagtgcctgtgccaagtggaataaaaggagtttctactaagaagaaaactattatttgcacgtagataggccaaggacaatgacagaaaagacattgtcaacttggtttgaatctgaataattatactttatgttataggtctttcaataagaactaagtgtcagagtgaatactaaatcccagatctggtaactgcaagttttgttctctgttttttcattactccaaactttctactaacttgctccacagtcttggataagtcacctctcctttctaggcctactgtttaaaatgaggacatttatctaggtaaccattgtggtttctcgcaattctaagaatctctgaactctatcacctcctgaattgtttataaagggattttctaaggcattttcttccaggaaaggagcctggaactaaagatgataacctagggcctaccgctggctctgacagagggtggctgtgtaagattagagaaatccccaagcccccttcccctcatctgcccagtacaggtaggaattcctttctaaacaactttacaagatgctggccacatacaatgagataatagaaagaggagatacatgattcctgcctcacaaggccttcagcctaatggtgagatgagaagatagatgatgacaataactgcaagaaagtttcctgaggaagccgagtctatgtttggccctgaaggacaagtaggacttctgaggtgagtagaaaagactgtaagctctggcgtcagacttcctggacacaaatcatggtcctgtcacttcccagctttatgaccttggccacgtcacctacctttcctgagactctatttccttacctgtagaaatatagtacttacaacacagggttactgtaagaattaaatgagatcacatagtgtcttgcatataataagtacccaataaatgtagtcagagaaggaaaacagtgtcagtatatattggaaataaaattccttaggtaagccggattttagtaaacgtcaataataggaaacatttatcaagcaaacttaagtcccacttacatttgctcagtaactgaatcaataaattatcaagtgtttattatataccaaccattttactaggcacagttcctgcattctggagaattataaactaaaggagttagtcaagcaaacaaaccgtgacagtacagtttgataagtcaagggcaggcggcatttcaatagaaggcggtgagaggtcaggataggaaaggggatggtagaatttaaggcaatggaaatgatattatggaaggcaaaaaataaggtatgcatttgagaaaggttctccaggaaatactggccttaccaagggggcctgggaggtccaacatacagtcatattgttctaaagagagattggtttctcacatcagtaccataaggcattccacaatttggtcatgttagtagtaacttattctatctatctggaactcagatggcctggagaagttctctctccatcctggcccttcatccatatatatgtcttcatgcttgattgctttaacccaaacatgaaactcaacacttttgtaagttccttcagaaaaattcattctcacaaaagcattagtgctcacaaatgcttaaacagatctgggatttagtccccacaaactcaaaaacaacaacaacaacagattctgcatatttctgtctttataaatgttcttgttcaccgggaaatcaaggatttccatctctctagctggtcccccagctagctccaagcctacttggttcttctcttattaatcagagaaaatgtttctcaatatagtccatgaccaaacagttgtgcacatcacggtggccaatagaacagagatcacatagtcaatagcatccactctccttttaaagtctcagtcagttttaattaaaccacttctgtttaatcgaaccacattattaagcagtgctatctgaacctggttaccatcctgagatccagaattggtgagactggataggcagaacccttgacaaaatgttgcctagacatacttgggcatagcatccctttcctactaacttgttgaatctctgttattaaatgcattcctttataaagcaagaattaaaaaacacacgtaccttaaaatttatggtaagaaataataacatattcatgcatatctcagattttcatatcccacccatatctcaatttttcatagaatgaaatatttctaaaaagtcaaaaccaaccaaaaatccctattaattttaaaacctattcattagatgccactgtgtcttgctaagcacttgaatctacctttgtgtgaccttcttcttcctctcacaccaatgcaggcctatttatccataagaagcccagttataaatgtgaatgaatgactgtatcagtgaaaaatgctcaatagaaatattgcaaaatgcaaattatgaatttgcattgtagcattttttattcctttgttcttctatatacttttctgccttccccaacttataaaaataattatcattgattgtatttataatcaaaaaagaaaagtaattttaatcttataaaacaaaaaaagtcaccggcttccaggcagttcagtcctaggacaatgtttcagctgaaaggtgaccatatggttacttcatggaaagaaagagattatgaagccaggccctttcatctaaccggccgcctaatgggttataatttaatatgcagaattacctgctctttccaaggtctctaaccatccccagagacaatggaacagatgtgcagcctgtcataaggccaatgtgaaactaacatttacagcagaagctggaaatcttctccccacgtcttccacgcatggaagtcctacttcagggccaagtataaattcagcttccccaggaaacttccctgagccttccaagactggggctcttcactccctcagcattctgtgtctttatcttcatgtccctgaggacaggagtctcatttccgtttgttcattggtaaatttcccatgcctagctaagtgtttcacacataatgggcatccaagacatgtatttttaaactaatctggatttctggttggtttcaatagatcgatcaacactctaagcaaccaaaaactgaaaaaacactttgaaaattatgaaattctattaacaggcaaggtattatgatggtactgtggttctgatggaggttaataccactcttactctctttattcatcattattgggtaatcattcatttaatccctttaagagctattcactaatgataagtgagttggaaagtataacatacgatcacaatgatcacttacacattcagaaagtgtattttaccatcctgggtaacataacaattttggtgtttttatgaactgtgaactgtatcaaaatcaacacgtgagcagctagcacagtactaggcacttggcagaaatgagggaaagtctcactgaataactccttgggagactgggggaccaagaggcaaaggggctcaggttggtaaaatagtgtaaacctgtgaaaatttggatgctgtttttaagtctcatataagcatatgagttctaggggtggggtgggcggggatttttgtctgatatatcccccgcacctagaatagggactgacccatggtaggaattcaacaaatatttaatgaaaaaataaaagtagagccctaagacagaccctaatgcagattatgacttcattaacatagaccttatagccttttctttttcttgttactcccactgaaagtgtacctgtgggatcacctcatgattagatggaccaatgcagtgaagctggtttttcagaattaggtagctttctttttatatggctgtctagcaggcattcgtagaccctgctggtgtctggaatctgtcttctctgtgtctggtagatttcagctgacctgggtgtctctgtgggcctcttttgttggcagactcaaaggtgaactcattagccattacccccttggaaatatgttctgggaaatcaaacatgctctgagtcacatctgtctgccgcctaccacaacagtgtagtatgcagactggttctgccaataggcttctgggaggaagaaatggaaaatctgtcatggtatgaactgcacagctcaacttggagaaggacttcagtccacagaaattcacagagtgaaggcaggctcttagttctcttcatgcataggtaagcctcgagaaaattcccaggtccctgcagaggaggagaaaaaatggaaagaggtggacaagtggattgtgttgggcagggcggcgacactcagtgctttccagaacggcactttggcttgttctaaatggataatgtcacatggctatgcttttgtacacataaggttgatcgctacttcaacaaggtgccattaatcagcttccttgctcctggtacaaactgaagaaagccaagaagcataaaacacatgcctttcctcagagagattttttattctagagagggagaaaagaacaaaaaactggaaaggttaatgaataaaagaaggctgctcacaatcccacacccagtgagtaatacacaaagaaaaccttatgctattgcagagagcaaaggatcactatgagctggagaaacagaaggcattaggacaggtagaagatgaagaagacttatgccagcagcagagactgcctgagcaaacctatggaagtgaggaggctcctcaagaagccaagaaaaaccttgggtctcctgaacccaattctcaggctggagcccagtgaggcaaatgaattgcccaaggacacctatgagtaaatgttggggacacttagaattcaagcctctgggatctgagcttggttatatcctctgtcaggtccctgtccagtgagtggtttagtgaggcgaagagagagggagagaacatgcattgcaggctcttgcactctatgctcaaacaggctttcccatttgctactcgcagataccctagactggcatagttactgccattttatagataggttcaaaggtccccaaaataataggtgacttgcccaaggtcacacagctagtggaaatggatgttgaactgaagtctagctgtttacaaagcccagtcatctcagctatgtcaacttggagtcaagggtttccactgggagtaaggagagataactgctttaaactctgctttttaaataatgttcaatttgaaatagttgaataatgtccaattttaaaaaatgattcaaagatttattccagtattttaaacattgcctctggagggagagatggcactgtaaggtggtcaggaggacgttgttggaagttagaacaccagatgagttgtctgaaaataataatgttgctactcgactgttttatattactgtaaacattacccactataataaaatcagacacaggttcaacatctcctgtagtaataataactcttgtctgccttctaaaatgactcctaaataacaaaccctccataaactcaatctaacccaaataaacagaattgctgtgacaaccgagatcataattgtctttgtttgatccttcagcctccacaattgtgcaggctctccacaccgagtcatggccttgtttatctttgctgtgtgtgctctgggaagctttctgcctagagaattagcacactcaataagcatcactgttctcttcagttgattaaactccagcatactcggtctgttagcaaaatgtgttgggctgatatcacagttctagctcacctcacctcatgttgctctttttcaattttatcttagactgtgcaggttttctgcatcataaaccaaattaatcactgagatctgatagttataacagattctagacacataaattatttttcattagctttaattgcctgtaaaggaatttggacacttaatctaaggaagtgaaataatgtggttcagctctattagacaatgtaaagctctcacttattaaaaaataaaaagtgtagaaaggtaagcaaatttccagtagctgcaaccttaaggtccttccacaggaagccaatctctatggccaccaacagagctgtctttgatgttacgtgcaacttcagtccacactggcttcagtgccttcagagcaggtctctatctcctgaagatccaggtctttgattctcctatggctctaaatatatataccaaataataatgatgactacaattaattatttttgtgcatactctgagccacgctctttacttaacctttatatgcacctcatatgaatactcaagtagatttccaaagtggctatcattatccttattttacaaaggataagactgacacagagggattgaattcctttctcagggacataacagtacacactgaagcagaactcagactcaggcctggatgagtccagagcctgtgcattccaggatattctgtgctctcctgagactccaatatagactgtgccatgctgcctcctataggagtaacagccgctcctggcgtgttttctctcaccacctagggctcagccagcatgaacaccacgtcaacttaacatgaaagctaacttcaaacattgagtctagtaggtcctttcctggtacacatggttcatgactgtatccccagtacctcacagagtacctagtacattgttgatgctcagtcacaaatatatgtttgttataaataaataaacccaataaataataaataaataaaatataaatatatatacaacatatgaatggaataaactcactaagtgaacatttttggagtgaatgaatgacttagttgattattcttggtagatgctctaagtggcagtcccttcattcacctgttcttcccccagactcttcattcgtagtctttcaatccatattctttcactgttgctttcattcccatatccccaaacatttacactatctgtgaccttagaacttataccccatggctctaaaaaaatgaaaaagtatgaccacacatattccattttttcatagactcatgcctgacctcctcaccttaactgaaccctggctttccctgcagtcctcttgagtgagggtcatgcattcacataggctctgagtcctgtggaatctctagaataattttcacctcctaagtaattcttgaatttgagccctttcatctattctccaactgtctcctttattcagatccttatccttgctttcctgtctcctttggtctatgcttttctttaggaagtccatttaattgctggagggagatttttccaaaacataaatccaataggttgtatccccacttaaaatttttcctaaacactttccaagcaaaccacatagtctttcagtggcatagcacccttcacacacaccgccaggttcctgtgctccagatatgcagaattagtcacgtttccctgaagagaccatgtgtccctatgcctctgtgcctgttcacatacaatttcccatgcttggatgcctctgtacctgtaccttctttccctggaggactttcagtggtgtgtttcctggtttccaaggtgagttaatagttcctcactggtgctgccatatacctgattatacctacgtcatagcacttgtcacatttctgcatttttttctattttcacagtaactaaatgttctcattgtctcttcatacccagtgcccagcatatggtaggtgttcattaactattaactatataaatatttaaagaatgaaaggagagtcttctgacactaggcagtctacagttccatggaaaataaccacaagtagaactcatcatctctattccagactactgcaatggctttctacctaatgtagctgtctttgttcttgctgtccccttcaaattccacttacacacaaatgccagagtgatctaacatggaaat

SEQ ID NO: 1424 - DNA, 717 bp, Homo sapiens
gggagcatggacctcagtcttctctgggtacttatgcccctagtcaccatggcctggggccagtatggcgattatggatacccataccagcagtatcatgactacagcgatgatgggtgggtgaatttgaatcggcaaggcttcagctaccagtgtccccaggggcaggtgatagtggccgtgaggagcatcttcagtaagaaggaaggttctgacagacaatggaactacgcctgcatgcccacgccacagagcctcggggaacccacggagtgctggtgggaggagatcaacagggctggcatggaatggtaccagacgtgctccaacaatgggctggtggcaggattccagagccgctacttcgagtcagtgctggatcgggagtggcagttttactgttgtcgctacagcaagaggtgcccatattcctgctggctaacaacagaatatccaggtcactatggtgaggaaatggacatgatttcctacaattatgattactatatccgaggagcaacaaccactttctctgcagtggaaagggatcgccagtggaagttcataatgtgccggatgactgaatacgactgtgaatttgcaaatgtttagatttgccacataccaaatctgggtgaaaggaaaggggccctccagctttccactgcagagaaagtggttgttgctcctcggtatatgtaatcataattgtagatc

SEQ ID NO: 1425 - DNA, 606 bp, Homo sapiens
atggacctcagtcttctctgggtacttatgcccctagtcaccatggcctggggccagtatggcgattatggatacccataccagcagtatcatgactacagcgatgatgggtgggtgaatttgaatcggcaaggcttcagctaccagtgtccccaggggcaggtgatagtggccgtgaggagcatcttcagtaagaaggaaggttctgacagacaatggaactacgcctgcatgcccacgccacagagcctcggggaacccacggagtgctggtgggaggagatcaacagggctggcatggaatggtaccagacgtgctccaacaatgggctggtggcaggattccagagccgctacttcgagtcagtgctggatcgggagtggcagttttactgttgtcgctacagcaagaggtgcccatattcctgctggctaacaacagaatatccaggtcactatggtgaggaaatggacatgatttcctacaattatgattactatatccgaggagcaacaaccactttctctgcagtggaaagggatcgccagtggaagttcataatgtgccggatgactgaatacgactgtgaatttgcaaatgtttag

SEQ ID NO: 1426 - DNA, 22055 bp, Mus musculus
  misc_feature (12157)..(12460): n = a, g, c, or t.
gtagcaaagagaggggaagccataatcagaatatatcttatgaaaaagggtatcctcaataaaacaaaaatagaaaacaaatctattttcagtaaaaattatggactcctattgtgttatttcttattcttttttttttctctttattttcctcgaatgcatatgaagatacaagctgggcttagtgacacaggcttatgactcctgctattgagcccacaaaggcaggaggatcacagacttttattcagcctgagaactgagtgaaactcttcttcaaaggtaaatagtaaaatgaagaccctgctatttacctgagtatgtcagtgcttgcctggcatgtgtgagtccctgtccaactcatgaaggatgacaatattcaatcacctataacttaaattgttcattgtaaaataatttataataaaaagaaaagaagtatggtcaaagaagccatttatggttttttttcattttttttatttgatattttctgtatatacatttcaaatttcaaatgctatcctgaaagttccctataccctcccccagccctgctcccctatccacccactccagcttcttggccctggcattcccctgtactggggcagagaggtagatcaatagaatataattgaagacccagaaatgaattcacacacctatggtcacttgatctttgacaagagagctaaaaccatccagtggaaaaaagacagcattttcaacaaatggtgctggcacaactggtggctatcatgtagaagaatgcaaatttatccattcttatctccttgtacaaagctcaagtctaagtggatcaaagacctccacataaaaccagggacactgaaattaattgaggagaaagtggggaaaagcctcgaagatatggtcacagaggaataattcctaaacagctatgtatgtttttttatctcctaccaaaaggtacattttcaaaagtacagagttaagctgacgtgaggaagctgtttgagtaaacatgaagattctgagactgaaacataacctttggttttcctgagttatcggcatttaatattatatagggcttcccctaaaataaaaattaacaatgtgcaacaccattataaaatatgtaattgtagttgttttcctagcattacagctaacatgatacaatatggaaccggtccaggttcaatgtgtgagttagaaatcaattggagttggcacaattttctgataaggactttattggctccaataatggcacaggtcatgagaaaggcacaaagactgcctgtgactgccccaattccagcaatcaatgtcaacatcccagttctttactaactttgcttattggtctcagagatttaaagtctatcacttaatttattttacatggagcatatagcctgattaccttacaatgatatgagaagtctaaagtaacaccctggacataaggttactgtgtatcaaagcagggtgattttactggccaaggttcaataaaaaccagctcaaggctatttttgacgtgaggccttatacaacatcttccagtaactctccagatatgccatgcttggaacaagaatactgggctcttgataaagggaccatttcccactcatattttaaatgtaacaacatgaagctatccacatattatttgacacaggagaaaagacagataaaatgtacaaaagggataatttaacttttgacagaggagacattaaaacctagtttttggttataacaagaacaaagattcctttcttgccaagaaatgaactgtaaatatcccaaggccaattcagtaagcatagaaattgaacaacttttcatgtttagctagtcagcagtgaaaccaaggtgctacactgcagttagagacattataccccaaagttttattacaagtattgtattacttcaattaaagacaaaatttaatggaggttttctttaattgtggttatatttttgagattaattatcactaggattaatgagctctcacagaggggcatgaacataaatgtcaggagaagagtcaactgtgcattttgatttatgtatatttatacatgtttttcatatatttaaattattaaatgattcaatatgttaaatgttactcatgtaattttttaattatcatcgtgataaatatgatatttatcataggaaagctctatttgttatgattgagtaggagcttgtagagtaaattagaatgttttcttaggaacattttaaacatatagtaaagtagaaaacaagtataaatgctgtcatgcctactttttggattatcaatttttaaaatttaggctatttgttttgtttctctattctcagcccaactctgtctcttttgtcttgaactatttgaaatccaaatatatcctttttaccctaagtctcttaagtgcaatatatttgaaaataagtattaaatagtattttaatcataaacatccatagtacaaaaaattttctctatatatatccatatatccttatatatctcatatattcaaatatatatttgagatccttctcatttttagacttcacacaacctctctctctctctctctcacacacacacacacacacacacacaactaaaaataagcaaaaattaagaaattctttcacataggattcttcagctagttatatattaaaataattgttttggaacaaataaatattagcaatatacatacatatatatatataaaataaggagatgaaaagattgtgtgtgtgtgtgtgtatgtgtgtgtctaagttggaggacaatgttgtatagggtggtcagttattaagatgcaattcatgtcaataggcaaactagccagtgcttttatacactgagcagttttgcacaattgcacaccttacatatccataaattaatcacaatagagaaaattgaaaaaatttcatagctaaatgttggcacatattcatagttgctcagtttatttccagaagacatcttattagatgaagctcagtaagtttccttattagatgttttcatattctttcaagtccttctggttattggttcatgtatatgtctgtgtagctttgtgtgtacctgtatgcacatggatgcagtggccattgaatagtctttggggtttttttcttaagtgtaactccatcatcaaccttgtttttctgacagggattggatagggactcacacatgctaggctagccctgaaggactcagaaaaacattcagtttccattgtactgtttacaaggtatgctgtctgaatacagaatctcagagatccaatcagactctgcctcctccttcccatcacagggcttaaaagagaacatcctcagtctagcttttgtttttaaatgtgggttctggtgatggactcaggtcttcatgactataaggcaagcaccttgttaggcaagctctcactatctagtcaggttcttttaaaattttttgttgttgttgttgttttgagacaaggtttctctatgtagccctgtctttcctggaactcactctgtagaccaggctggccttgaactcagaaatccacctgcctctgcctcctgagtactgggatcaaaggcgtgcaccaccatgcccggctggttcttttaatcttaaattttgtctttcctcagtgaacatttttagtttgtgatatattacattcgtgattcatttgctaatatatatttattcaaaaaacaattattttaatatataattatctgaagaatcctatgtgaaaaaatttcttaatttttttcttatttttagttttgtgtgtgtgtgtgtgtgtgtgtgtgtgtgtgtgtgtgtgtgtgtgtgtgtgtgtgagagtgagagtgagagagagagagagagagagagagagagagaggttgtgtgaagtctaaaaatgagaaggatctcttggagtgcttgttactgtcaattttgagctgtctaacttggatgctgggaaatgaactctgaacctttacaagatctgcttatgctcttaacttctgcacccacactctaacctgtaattatttttattctctgagaatttaatgcatatctacaatcaaatgatcacatctaccaccatttctgaactctctgtagattatctcccaaagtttatcttctactattttaaattttaaaatttctctactaagttcctgcaaagttcctgactgtattggctgtttatttatatagttctgcatttttttaaaatcaactatccagatccctccctccctccttctacctcctgtgattattttgttaccccttctatgtaggattgaagcattcacactttgtttttttctttttctttaggtttatatgatttgtgatttataccgtgagtgttttgagtgattaggctaatatccacttatcagttagtacaaaccttgtgtcttcttttgtgtctgggttaccttacataggatattttctagttccatccatttccctgtgaatttcatgaagtaggggaacggaaatacaggagggcatgatcaggtatggaaagaatcagaagagaagtacagagggtcatgaaatttaacagaaatatgtggcagtgggacatagggaactggagtagccactagtaagtcctagatcccagataaggaagtctcccaggacccaattattatgatataagctgaaatatgcaagaaaggggagagagaacctgtaaagaccacctccagtagataggcatgcctcctggttgagaaatggggccacccacccatctcaaaaattttaaaaaagaaatgttcctatacaaaagaaagacaggaacaaaaaatgaccagagactgaacgaaaggccatccagagatccagcccatccatagacactgacactattgctaatgccaagaagcacttgctgaaaggagccttgtctgactgtcccctgagaggttctgccagcatctgaatattacagatgcagtcacagtcaaccattggactgagcctgaggaccccaatggaagagctagtggaagggctcaagaagctgagggcaattgtaaccccataggaagaacagtatcatctaactggaccacccagagctcccagggactaaagcaccaaccaaatagaatacatggagggatccatggctccaactacatatgtagcaaaggatggccttatctggcatcagtgggacaggaggcccttgatcttgtgtaggcttggtctctagtgtaggggaatgctagactggtgaggcaggagtgggtaagtgggtggaggagcaacctcatagaggcaatggggagatgaaatgggatgggagtgttgtagagggaaaactgggaagggggatataatttgaaatgtaaatgaataaaatgatgaataagaatgaatttatctttttaggaaaagaatatgatgcctatacttatgattaaatgacttgaagaagttccatggacttttcagacgagtctgtaaattatgaacttaaatctcaatatcacaacagatgtctacctttattcacaaattgcattagcaataacagtatgaggatcaaattttatagacatcccagtataaccaaaccaaaccaaaataaaccaagttaaacacatgaccctcctcatttaagcacatctatatattcctatgttaccaatgaaaatgaggtggtaatttaaatcctagacaaatgaccactttgcaagagagctttttaaggaatgaaaccttttgttagatttctttggtctctattcattactctctccatctacatcatttcatttatcccccttaagtgttaagttctctggctgcctcttttctggccattttgccattattccattattcaacagagacagcatacttgactcagaaagcatgcttggctcatcaggcctgctcaaaaccttagtttcttatataaccttaaatgttggtactaattctaatttatttgcccaactatacttatgacacagaattctacataaaaatattacagggctataatcatattaaattaaatatgctcctgagataatctagaagcaatttatttttatatgagttttgaatatctagtgtaagaattgatgtcctggatagataaacaataaggaaggtgctaaggaaaaatattcttcctgaacttggaaaagctgacatgctcactggaaagaggaagcattcttaacaagccaaacccaagggtcatataaattttctggaagcaatgacaaaccctacccatgaccttatcgtatgcatccctgtcatgcacataagtgccctttccttaatactcttatgaaatcacaatatctattttctgacactaccaatagttacaatggacagattcaagggagatgaggaaatttgaaagtcctagaagagggtctagcatctgtggtagaggattcaagtggtgtctttatcagagaacaggaatagtctccattagttctccaactactactttctatctcgaacataatagttctgtaacaacaattgctaatataggatttctcagtggaagcagagaatgtaaatactctaggaatacaagggaaattaaaatgagctggagagtaagaagaagtagattaaacacaggcagtaggcaagaggtagtgggaagtttgaatatcttctttatgattatattccttttagtgtcttcgattgcttccttacagctatgatactgaatcctatgcatcccagcatgtttttcaatgctgcttttctgaattatacttctatgtcaggggcaaaattaggtttctccgttggcatcactgatctccataagaatgctcagagtaggggaacattcttaagatgctcatatggtaatgataagaaatgttccatgcaggaaatctccctgcaagtctatcatccagccttcttctaggtccactatcaatgtgaactagcatagtggcccatcaccagaaacttctcatgtaatccgtagatagtttgaagtgacccagtgtgaaaaggtgaaacagaaatgccagtgtagcaacatttatctctagaatgaggtagaagagggaaatgtaaaataaaaagactttcttatgaagtaagcctatttaatgaataagaatacctgagagagaaataataagatatggtcaagatttgagacacaatcccaaaatacaaaacccataaatgttttctaaacttacattttcaacaaatgtccactttcctttagaccattcctattcttttctcccatcaccctaggtgaactctaagaaggaactgtcttcttcatacatcagctgcaccagtgatccccaggcctacggctaacaccattatgctttgtttagggagctctgtgggtactggttagttcatattgttgttcctcctatggggctgcaaaacccttcagctccttgggtactttctctaactccttcattggggaccctgtgcttcatccaatggatcatttatttttatttttgtgctaaactttcactcaaatctgtgttttgaagttgttaaataaatatcttatgaacttcatataaagttagaatcatttgtttcattttgatttcaatatttatgggtagctttaaaatctccaaaatttggttttgtatatttaaaataacaaatgaaatatccatgtatgtatatacatattcatatggttatcttttttcatctacccagtatcttttctatttgactgtactggatacatatatatatccattgtttgccataaatctttttaaattatactttggaataattttaaattataaaatttgtgagaatttcaggttatttgtggagagagtccctttcatggttttacagtcactgttacattgtacagctagggtcaattctggaccttctagtacaccttcacaacatactatgttcattttagtttaattaacaatttctttagtcaatttatgtcttgacaacagccctccccttctcctagtcctacccttactaatacattacctcatgagtccttcacttctcttcagaaaccaggaacaccttgagcatcaatttgtcctaggatggaaatttcccatggaataagttcctttgggccagttattggttgggcgtttcctcaagctctgctccatgtttatccctgcacatatggaaggcaggacaagttttgaattgaacattttgtggatggtttaatgttccctccctccacttgcagtcccccctggctataggaggaggccacttcagtttccatacacccaactattatgtttctcagtgagggttaaccccatatactcctaggaatctccttatcttcccgggtctcgagatagttccagagatgcccctgccccaatttgtattctttctcccagccctctctgctccccctctccaaacctaatcccaatccccgttcaccttcttacctcaactcccaactagatccttccctccaacaacctccaatgactattttgtttcctgttctgagcgacattcaagcatcttctcttgggccctccttattactcaatttctttgagtctgtggattgtagcatgattatcctgaactttatgtctaatgtccacaaataagtgtgtacacactatacatgtctttctggtctgcgttacctcactcaggttgataatctcaacttccatccacgtgcctacaaattttatgatgtctttctttttgatagctgaatagtattccattttgtaaaagtgtgtagaaaatataccacattttctttatacattcttttgtgagggacattgaggttgtttccagtttctggttattacaattaaagttgctatgaatgtagttgagcatgtgtccttgtggtatggtgaggtatctttgaggtctatgcccaggagtggcatagatggatagaactattcttaatgttttgccaaattgatttccaaagtgattatacaaatttgcacccttaccagcaaaccagtagtcttccccttttctacatttttgccagcacgtgctgtcacttgaggttttgatcttctacagacactaagagaacacaaatgccagcccaggatactatatccagccaaactttcaattaccataaatggagaaaccaaagtattccatgacaaaaccaaattcacacattatctttccatgaatccagcccttcaaaggataataacagaaaaaaaagaaaaacaatacaaggacaaaaaccaaaccctagaaaaagcaagaaagtaatccctcaacaaaccaaaaagaagacagccacaaaaacagaatgccaactctaaaaacaaaaataatacgaagcaacaattacttttccttaatatctcttaatatcaatggactcaattccccaataaaaagaatttatcacttttaatcaattaacttacacctacaatttttaatctgctcagttcttactaatttttagacttccagatgaatattaagaaatctctatacaagtgaggtttttccaaattgattctaagtacactcatatttatttttcttaactaaatagttttatcttccttaactgatgggtaataatactttacaaactatgtcatagcataatttgtgccccaatgttgccattgtttgcttatgcttcccagaacagagtgtctggaagagggtgtggatggttcaaacttcactcacacctgaggtaaagcaggtcggctaacgggaaagaggtaatgtttatgagaattcttagttcttatcagaagagtagcctgttctttcttggaaactctttgagtctgtgccaaatgctgcccaccatccttaactggatcaatgttccagttatttactacgatgtccctccctcaaattctgttataaaaacacagtcatctctgtcctgacacaccatccagatctctggaagacaggtaagggtgaactgaaagatgctgaaaggtaggcatgggttcttctctcacacacaggacaggtgtctgtgtcctcagacaacacagagttttgtaacttgaggtatttaggaagttctcagggagaggaaaaaacatcaatttccacttaattcctgtatcacaggagaaagacaggatgatataattttcccttgagagttaatcaaagaaggggagggacggttctctctgaatgtcctcactaaccacacaacctagagttattctggctattcctccctcacagacaagatgctgcctccaacagcctgctccgtcatgtcctggatgctgctctcctgcctgatgctcttatctcaggttcaaggtaagacctctctgcatgtagcaatgatcccttgaaagtgtttcaagataggaaagtttcatgttgtaattaggaggaaaaattcacacaagtaaactgcctgcaactttccagcctttcttcaggtcattagttatagaagatatcagacgggtcatctctgtggaaagacaagatttctcatgttgtcagaattttgtaatttattcttccaagattaaaggggaaaatatgatggttaatatgaactgtatagaagaggaaagatggacaggtgtatttaagcctctctgcccagtgttggtagagtcatgaactaatgtgtagaaaagaagagaaaaatgatgctatcccatttactatgtctgttcatcataattttttccaaagactattagaaagcttgatattgattttcttccaaaagataatctacaaaaatattcctactttaacctttcatctaaatctcactactcatctcaccccatcgctctatttatctcactccaccccaggtgaagactccctgaagaatataccctccgcacgcattagttgccccaagggctcccaggcttatggctcctactgctatgccttgtttcagataccacagacctggtttgatgcagaagtaagtgctgggaaggagaaggtacacaaggaacacacggaaatgttaggttctatcctccctaattccttccatctgagaatagctgactttaaaaataacctctcctcttgcttacctatgtcttccagtgaagtctaaatctccttttcattttgattctcacatagctggcctgccaaaagaggcctggaggacacctcgtatctgtgctcaatagcgctgaggcttcattcttgtcctccatggtgaagagaacaggaaacagctaccaatacacttggattgggctccatgaccccactctggtatggtaacctcttctctgtttcctctcaatgatcgtatcatgggggaatacattatctatgcgtccccagagtgaacctggaaagacagagatcagaccccgcatgatattgggaccagggaaaccatcaggagcagttgtcaagctgagctctatgaatgtcttagacttcagatgaagtttatgtgttaattattgacttttacagaggtctatgtgaggatttggaattattctcatttagtttcagggagcaaacacacaaccagtcaagaggcacagaaataaagaggcaatttacattttctcttaatagaataaccaccttccttccattttaaaggaaattgctgatttagcactatttatattttgaatacatttcaggggatattaattccatcagtagtttctgtgtttataaatagacatgaagacaagaataatttctattggtgtgctcttgaaagctgcatatgatcacccaagttctgggaggctgggagggaatgaagggtttcattcacagttgcacacatgcagagctttggacccttcctttcatctgcatacttcctcactagggtgcagaacccaatggaggtggatgggaatggagtaacaatgacgtgatgaattactttaactgggagaggaacccatctactgccttagaccgtgctttctgtggcagcttgtcaagagcttctggtaagaaggagaagatctgtgtagcctaaatgcatgcccctcttctcacatccctgggtgcctctgacctaggaaattgaatgtgttcttgctttctctcatnnnnnnnnnnnnnnnnnnnnnnnnnnnnnnnnnnnnnnnnnnnnnnnnnnnnnnnnnnnnnnnnnnnnnnnnnnnnnnnnnnnnnnnnnnnnnnnnnnnnnnnnnnnnnnnnnnnnnnnnnnnnnnnnnnnnnnnnnnnnnnnnnnnnnnnnnnnnnnnnnnnnnnnnnnnnnnnnnnnnnnnnnnnnnnnnnnnnnnnnnnnnnnnnnnnnnnnnnnnnnnnnnnnnnnnnnnnnnnnnnnnnnnnnnnnnnnnnnnnnnnnnnnnnnnnnnnnnnnnnnnnnnnnnnnnnnnnnnnnnnnnnatctgctctttccatatctgtctttagtccttttggtataagtttgggctcaattctaaaataaaaataagctttctgtcacactttgagtttttgcattctattaatattattgtctgtgaatgcatgtgagcatgtatgaatgtaacagaattcttatggagatcagaggataacttattggaatcagttgttgctatctatctattgagaaagggactctcatatttttgctacaaagtaaattaagaagaatttgttgatggcataatccacctagcatccacctaattttaagtaagttccctgagagcaaatcaactctatttctggcttaagaaacaaatttttgatccatcaatccaatgtgctagcactgtgcataatttttaattgaattctttttcatgcaaagtattttgattatagttttccagagtattcttacaagtgtagaaacacaagctgttgaactccatagtggttcaaatacagttagaataatggaaataagcacaactattaaagaaacatctttattttcaacaaatttcaaataatgttttatgtacaaccatcagaacatattataaattgcttttgatagctcatgtaaatatcatgatcataagatcaaactcagatgtgttgtggaccacagtataatgtaagatctttaaatatgattgtgctgagaagtgtatacaagaaggctaactagaggtatccagtacttgcctgcttgtctacaaggcagaatcaagatgagtcctgattgttgaaactgaaatttaccagtagacagaatgacagttagaaaaacagagacttcatcccagtgaatctgaggaggaaatagtgtccaaagaactgagtaagtagcatcaaggaagaatgaaatgagggactgggtcttcctttaatggttagttatattgttaatgtgccgcagtgtggaatcaagtatgaggagagtctctatgaggaataagttacctcaggctggtctgtgggagtatctgtgggagattgtcttgatagttaattgatatattaagacccatcccatttcatttggcatcattctttaagtaagtacacctaaacgttttagctgagcacaaggtagcaggcacactttcatttctttctgctcttgaccatatggtgcaactatctgtctggagctattgctactaggtctaaatcccaatgatgaactctggctaggagcagaagctgaaataagtctcttctcaccatgctgcatttttttccaggatgttttatcacaggaataggaatgtaactagaactctggctaaagatgagacaggacagtcactgtgagccagagcttcccaggaaaaagcaaattcagaaatcgtataagtggactatggaggtgatctggcattagacaacatctttggtcccacctataaatccataggatgccgaactgggggacaacttaaggggggggtgaacttacttgagttcagagcttctgagttgaatggtatgatcagatctgatcagatcagatcactgcactgacatagagggtggctccttcagagtcattttgaccagggaaagatagacacaaatcaaccaggaattatacgttggaagaatgcaaactcccattagcaagaaaatggaacatctgctagtctaattttcttggtctaaagtactgattagtgttacttaactttgcattggagccaaatgtaagaatatcagggttatgagggaaagattgataagaacctgatccttgtcctgtcgcttcatgaatctctgaccttggaacactcaacaaagctgtcttttatgatacctgccctgggagtgtgaaacaaaacgtgaagagaatctatagggaatttcatatttatagtagctccttgatgtgtagaattccttgtgtgactgcgagctctgctcgcccagtcagtgtaggatgaactcattctcacacttagtatctttttttcttcacttctttacctttctcatgacaccatttttcccatttaaattgagattttctggttttaagaaagttcaaagctgtttatctgtacccttttggtagttacatggaagtaattatttaaacaataatttaaaaaaggttgattgttcaagtagattgcattttgctaaaaataatacttcaaagatgatatttgcagagaatggcttaagtaacatcagactctatgtgtcccaacatgaatgacatatataaacaatcagtgtgaagcgagggcaatgccttcatttgttcacattatcttccaaaagccctgtccacaagttcatcatagtatgccagtagattagccgttagacactgtttcatagaacaatggttagaactggaatctcccttagcacttccttgcggttcctttggtaactactctgcatgacttcatgtcttattgtaaaaatggagcacaatatcacaaagtattgactaaattttattattgttctccgaatccttaggccagagtccccagagaatacacttatggaagaacagcagagatgagatgaggaattcggtgtcggggtgtgagaaggactttcttggtgagccatcatgcttgctcctttgtctatgtgatcttcaggatactttcaggcagttgaaatcagaactggcctaacccttgaatttgcagacatagggaaatattgtgtcacaataataatctctccacttctgataacctgcagagagacaagaggtaaagggaatgggtctggtaaatttgtggttgtaaagaaagaacaactcaatcctctgctctggacttagacttctgcatgctcttcatttttgcatctttaagggaagaagacacagaaggaaccataagaaatgactgatcactattctacagtgcatttgccagcttatggctgtaccttggaggtcaacatagatgtggtaaatgggtttagttagagaaggcttttctctctcttacctgaggcctgagacaaagctgcacagtagccgtggtgtgcagacatggagggtggtatctcccagttatagaaggtcagagggtcagagctgctccacttccatccattttcattgggcaaactcccctgaatgtgggaagcagtgtgcagcaaaggttcattaacactgcatgaaaacgtcactgaaatacctgatttcctgcttattgtccttaaacattttatgatcatacacagttgctttggggggtagattaatatttgggaatttcttaatcctatttacaaactccattaattataggatgaaattagggttactgaaatgtatctcatctttgtaagttcaaccagtgttacatttgagagttcttcagacacgtgtggacaaaatctattctataaagaaattacagatgtaattctgacagcatttcctgacaattttatgtgcagactttctgaggctgaagaaaaattcatccaaggtctcaataataacagtaaaagtcaacaacagtgatatgaactttgtgtgaaatctcagacatctacaaagctcagctcttcagctgtagttccccttgttctaatgctacacagcactgaagatctaacacccatttggttcttcatggggagttcgaggtactcttccacagggacaaaaggcactaaggggaacaatcaaggcaaagataggaacccacaagtgacagatcatggagtccaatccagatgtatgggaatgtggtcaaactgtttttcaccagagaggacacaaagataatttcaccataagtgagcagaaatgccaggtgtcctgagaaatgcttctggcagtggatctgtgtgaagaacagaatgagagagagagactgaaaccttactagaaaatggcaaataatatgtgatggattgtatacctctcactcagctataccatagagattgaaacccagcactccttgacccacaagtattttgtcctattgctcccaactctgcctgtcttcacttacctctgcattagcccaggtctgtggttccagaatcagtaaatagcagtaggagccataagcttgggcttcttggggacagctgatgcgtggagaagacagttttttctgggattgttcacctggtttaaagggtgatatagtcagtgatggagtgaatgtgagagtggagtggagagaaggaggtcaacataaaaatgactcctcaaccttatttgagattatgactgtaatactgagtgcttcctcttagtattttcctagttgttgattttgactatgtctgcatgtgtatggggtgagcatatatgtgctgggctatacatgaggatatggacatgatgccagaggtcatttcttggtctgtatttatattggacttttaaaagggggtttcttgctggctttgtccagtttataattttgctagattggccatccagtgatacccatacaaattcctctcttgtcctcctcagaatttggattatggccacctaccaccttgtcaagtttaatttacatgggttctaggcattcaacttggcttctcatgcttgcttaacaagcacttcactagctgagatatcgtatacccaacattaggttcttaatttaacaagacattttaatgtggagaagcgtgcctttttaattttaccctgtcttcatactcatttattctcccttctctgggataacagatggagggctttatattctgtcctctgtgtccttccttagagttcattactgacctgtaagctttcttttttcaaccttccaagatagttagagtttgctgatgacacgggggaaactttcattctataacagtgaaacactgtggtatatctcccctcttccaatgatccagaggaaggaaggatgtggaagatttttctgtgtggattctcctcatacttaacacacgagactctccagattccttctctctccttggttctcaatattcatggggaacccagtgctagacacacaacaactttaccttgtacccaagaaagggacatcaggcaacacagtagcatccaggacatgctatgaagggtcttgtgagacaccatggtatatctgtgaggtaaaaggagtaagcccctgaagagagtgtggttagaagtgacataaaaggagaccacaatcactttcattattatttatatagctctgcaaggaaaaaaaatctaatttcagtctgatccccctgttttctctggttccggagaaaaatggaagggacatgctcatctttcagttcctagtttttctgagttttagagatttgccttgtgaggtcagagaaagttctccatctactactgcagtgtgggagacaaatacctgccagccttgcattgtctattagctccacttacctgtctatacagaggtctgcaatgctttgacagcacagaggtgatttcacttttaaaacgacatctgaagtagggccatgcaagtgaagaagtgccagctcctgctgctctctgtagtgggtagtgcttggcacaggttacagaagatttcccataagaatacaggactactcagggcagagagtgagaactgccacacatgttcctttcctgttaatctagctctgacctcaggtgctgattaggtttgaaaatggctaccctctaccaggtgtcagattctgggaaacttaagtaatcacaggcagtctcctgctaccgaatatgcagttttataaaaataattacaatttataaaacttacagtctttatttttaaaagaattgtctctatttgtgtaaaaccaagaatgcgtctttagttgtactgaagaacttacttctgtagatacatgaacatcatctcataagattttaggtatatcaaaagtgctgagttttgtgtgttaaaatttgattttttgagtggtgtagaacaagtgtacaatacaaagtaaaattacctgttcaatggctacttcaacattttgatagcagtacataaagtgtaaagcaaccagtgagacaacattttagccaggattttaaggaactgaatagatttgcttcttagctaactccatgtataaacagagagagagagagagagagagagagagagagggagagagagagagagagagagagagagagagagagagagagagagagagagagagagagagagtttgctggtacttattcagctctcagttatatttcagaatagcatacttagctagtccgaggagcctgaggctcagaacaaagtcacacaggagcagaggtctgtggcaatagaggggttactcttccatcggagcttctccagttccacagtccacttcttatggtcacatattcataaggattccaagagtcttctttcagaaatgattcaagcttttttcttttataatttcttttataatctgttctttaaatatgcccatgcatgtgtctatgtgtaggtttatgtgagtatgtgtatcattgtgagagaacatacatgttcctataggtgctcaagaagactaaaacagggaatcataccacctggagatggttatgaattgcctgatttgtgtggtaggtaccaaagcagtacctgttaacccatgtctccagcctcctaagttctatatgttaaatggtattagctgttctcattgtgcttacatttgtacccatagaggcaaagaaagatggctaaaaaaatgtaattctttaatgttaaatgggtcagtatcatcagcatgtgtcaattacatatttgcatttgcatttggcagaatactctatttttctaaatggccttgcacttggtgattcgatggaataaataattgaagtaaagacttgcctttaagcacatcttatcacagtctgtatggctgtgtgcgaagtttaaatttgaaactcagtggtcacaatatctaagactaaatgctgctcagttgtgttgtaagtcacaattttcatgcatttaaaaaattgagaagacaaagaaacttcagtggttcatctataggaaatatggtcatatattccaaagaaataatgcctgtgaaggagaaaatattttaaatgttgccattttactatcaacattgcagaatttcaaacatcactggcacctgaacacagaacatgtttgctaataggaaatagccccaatgtgtgttagtttctgtctttgccaggaagtgtcctgcaagttttgctgggaagttttctgaatgtatgccaagcactagctatcacccagacttaaataagcattcacttaatcactttgatgcccttccttcaaatcctatcataaagcagtcacctttgtcctgacaaaccatctcagatctctacaagagaggtaagtgggagctgaatgatggtgagagccttgtgtctcttactatagagcgaagatacagaagaatctctgtcttcacattaattagggctcttagaaatagcaaagtcttccccagtcattttctgggcaaggaaaaacattggattcttcatttcattccagaccaatccaaagctgtgatggagctgagactactgtagccctttagatctaggcaaaagtgaagggagggatggccatctttgcttgttctgtctactacactctctctggtgccctgtttgttgttctctcaaagacaagatgctgcctcacctggtcctcaacagtatttcctggatgctgctctcctgcctgttgtttgtatttcaggtacaaggtaagtcttctctgacctagtctgtaattgtccatgagcgataagtgatgagaagcaaagaagtgttcttagaattcctgtgtggtaattgtgagggatatccacacaggaaagtcacctacacttcatccatcctcttgccttcttctatgttgctggtgggaaaaaagtatcatggtattccatcattccctgagtgagagggtttctatttgccaggaggctctcaattatgatagtaagcatgtaggagaggagaagaaatatgtgagtcactaatgaagcatgcaagtagaccttggggagaatggagtatcacagacagtgaaatgtgtagaaagagtaaaatgaaaggaagctctttcacactatatatatatatttaaatgtggcacctagctaagtatagtacctagctaaatacataacttgaaaaccagcattcagggaggagtttcaggaggatacctctgagttcaaggccaacttcatctgcacagtaaattccaggacattcaggcctgcagagaaactttgtcacaaaggaagcagaagcaaacattcaagcaacaggatcacaagatggaaagcttagtgaggctgtcaccaccttaattgtagccacccactctacaaaaaatgtcctttataaacattcccttgagtgttcctccccattcaattcccattctcggtgtcatgacatccctctcattatctctctccaccccaggtgaagacttccagaaggaagtgccctctccacgtaccagctgccccatgggttacaaggcttatcgctcccactgctatgccttagttatgacacctaaatcctggtttcaagcagatgtgagtggtaaagggtggggttgaagataccagcacaaagtgcaagtaggtaacaggagagtagggctcatgtttccatggttccatggggggggagcgagtgggtcacaatattggttcttcctttttttttctgtaatctttttgctcatggacatctggagtatcagtctttctcgccttctgtccctcatgtagctggtctgccagaagagaccctcaggacatctcgtgtctattcttagtggaggtgaggcttcctttgtgtcctccttggtgaacggcagagtggacaactaccaagacatctggattgggctccatgatccaacaatggtgagattctatttttctctgtttgttctctaggagctaatgtctcccaaacacaattttctgtgtgttctctctgtgtataatgtaaggtggatctagcactcaagctgggtgacattagagtaaggaatatcctcaacactggggtgaaaggctgaattatatagaggttcctcatattcagcttaatttgtttgcctattgtcagcttttacatttttcttttatttaagaaagtccacgagtgacttctttcttttgtcttcaaggaaccttcacaaaaagtactgagagcattgtaaattaagatttacatttattcattgaaaaaatagatatattcattttatttgtatgttttctctaaatgtatgtgtgtgcatgatgtgcttgcctgatacttgaagcagtcagaaatgagcttcagatcccttaggactagagccatagattgttatgatcctctatgtgggtgctggaagccaatccttaggagcaggccatattcttacctgctgagctatctctctgccgtctacttttgttgtttattgagacgatactgtgagatcaagaggctattctgcaatgtatcattcattactcattgtgtagcaaggac

SEQ ID NO: 1427 - DNA, 759 bp, Mus musculus
acaccatccagatctctggaagacagacaagatgctgcctccaacagcctgctccgtcatgtcctggatgctgctctcctgcctgatgctcttatctcaggttcaaggtgaagactccctgaagaatataccctccgcacgcattagttgccccaagggctcccaggcttatggctcctactgctatgccttgtttcagataccacagacctggtttgatgcagaactggcctgccaaaagaggcctggaggacacctcgtatctgtgctcaatagcgctgaggcttcattcttgtcctccatggtgaagagaacaggaaacagctaccaatacacttggattgggctccatgaccccactctgggtgcagaacccaatggaggtggatgggaatggagtaacaatgacgtgatgaattactttaactgggagaggaacccatctactgccttagaccgtgctttctgtggcagcttgtcaagagcttctggatttctaaaatggagagatatgacatgtgaggtgaagttgccctatgtctgcaaatttactggttaaacttatcagacagcaaacatcccgaatttgtcttgaagagcatcatggacaagggacaaaatgtgaagactcacctagaaaaagcattttctatctacagtccacattagagccttaatctgctctttccatatctgtctttagtccttttggtataagtttgggctcaattctaaaataaaaataagctttctgtcaca

SEQ ID NO: 1428 - DNA, 528 bp, Mus musculus
atgctgcctccaacagcctgctccgtcatgtcctggatgctgctctcctgcctgatgctcttatctcaggttcaaggtgaagactccctgaagaatataccctccgcacgcattagttgccccaagggctcccaggcttatggctcctactgctatgccttgtttcagataccacagacctggtttgatgcagaactggcctgccaaaagaggcctggaggacacctcgtatctgtgctcaatagcgctgaggcttcattcttgtcctccatggtgaagagaacaggaaacagctaccaatacacttggattgggctccatgaccccactctgggtgcagaacccaatggaggtggatgggaatggagtaacaatgacgtgatgaattactttaactgggagaggaacccatctactgccttagaccgtgctttctgtggcagcttgtcaagagcttctggatttctaaaatggagagatatgacatgtgaggtgaagttgccctatgtctgcaaatttactggttaa

SEQ ID NO: 1429 - DNA, 22436 bp, Homo sapiens
ttccttctgacccatatctcctgggtcctgaccatgactttcttgaaagtgtagccccaaaattcttacctctgaatgtacttcctctgatccccgcctcctaggtactaatggttcagactttaatttcctcgcaagttgtgtctccaaagggatctagggaagctctatgctgcatccttaggcatctaggctataaatgcagggagtcttgtgtccctcgtgtccctcccaatttaggcataccgctctcgacacgggcagttatgtgggacctgttccccaccactcttgccaggaccccaagtttgtaaatggctaaaagagacagagagagagagagagagagagagaggcagagaggtgaaagaggcagagaggagaaagaggcagagaggagaaagaggaagagagacaaagagggactcaaagagagaaagaaagagagatagaaatagtaaaaaaaaaaaaaaaaaaaaaaaaaaaaaaaaaaaagtgggccctattcctttaaaagccagggtaaatttaaaacctataattgataattgaaggtcttcttcatgaccctataacactccaatactacccttgttgtcagtgtaaacaaaggcatagcctgaaaacactgagaccactgacaaccatagccttcctatcaaaaatccttaacccggtaacccgtggatgacccaaatgcattcaatctgtagcggcaactgctttgctaacagaagaaagtagaaaagtaacttagaggaaacctcactgtgagcacacctcaccagttcagaattattctaagtcaaaaaagcaaaaaggtagcttactaactcaaaaatcgtaaagtatggggctattctgttagaaaaaggtaatttaacactaaccactggtaagtcccttaacccaacagatttccttacaggagatttaaatcttaattactatacaaaggtccgaccagaccgaggaggaactcccttcaggacaggacgatagatgtttcctcccaggtgactgaggaaaaaaccacaatgggtattcagtaattgatagggagactcttgtggaagcagagttagaaaaactgcctaataattggtctgctcaaacgtgcgagctgtttgcactcagctaagccttaaactacttacagaatcacaaaagactatctcaatcctgactcaaaaagttcgctacaccctttctgaaatgaatttgcataagaactgttgtttatgggaatgcatcttgatggggcagctgggttgttatgaaatactcaggaacccagcccagctctaggactcacccctgagcacaaaggcaatgttaggcatgctggtaaaggaccactagaatccagcagcccgaacccctttctttgtggtcaagaaaggcggtaaaaggggtgtaggaccactacatcggtgagcgtaactagtctgataagcagaggtccatgggtggttacgtgccctggaaaggaataagcattaggaccacagaggacgctctaggactaatgttcttcagaaaatgactaggggtgctggcatccctatgttcttttttcaggtagcaaacattcccctcaaggcaaaaacaccccgaagatgtattctggagaatcgggaccaatttgaccctcagacgctgagaaagaaatgacttatattcttctgcagtattgcctggccacaatatcctcttcatgggggagaaacgtggcctcctgagggaagtataaattatgacaccatcttacagctagacctcttttgtagaaaagaaggcaaatggagtgaagcgccatatgtacaaattttcttttcattaagagacaactcgctattatgtaaaaagtgtgatttatcccctacaagaagccctcagagtgtaccttcctaccccagcatcccccctactccttccccaactaataaggaccccccttcaacccaaatagtccaaaaggagatagacaaaagggtaaacaatgaatcaaagagtgccaatattctccgattatgcccactccaaacagtgggaggaggagaattcggcccagccagagtgcatgtaccattttctctctcagtcttaaagcaaattgaaatagacctaggtaaattctcagctaaccctgatggctatattgatgttttacaagggttaggacaatcctttgatctgacatggagagatataatgttactgttaaatcagacactaaccccaaatgagagaagtgccgccataactgcagcccgagagtttggcgatctctggtatctcagtcaggtccatcataggatgaaaacagaggaaagagaacgattccccacaggccagcaggcagttcccagtgtagaccctcatagggacacagaatcagaacatggagaatggtgcagcagacatttgctaacttgcgtgctagaaggactaaggaaaactaggaagaagcctatgaattattcaatgatgtccagtataacaaagggaaaggaagaaaatcctactgcctttctggaaagactaagggaggcattgaggaggaaaacctgtctgtcacctgactcttttgaaggccaactaatcttaaaggaaaagtttatcactcagtcagctgcagacattagaaaaaaacttcaaaagtcagccttaggcctggagcaaaacttagaaaccctactgaacttggcaacctcggtttttttataatagagatcaggaggagcaggcggaatgggacaaacgggataaaaaaaaggccaccgctttagttatagccctcaggcaagtggactttggaggctctggaaaagggaaatgctgagcaaattgggtgcctaatagggcttgcttccagtgcagtctacaaggacattttaaaaaagattatccaagtacaaataagccaccccctcgtccatgcccgttatatcaagggaatcactggaaggcccagggccccgggggatgaaggtcctctgagtcagaagccactaaccagatgatccaacagcaggactgagggttcccggggcaagcaccagcccatgccatcaccctcatagagccctgggtatgcttgacctttgagggccaggaggttaactgtctcctggacactggcacggccttctcagtcttactgttctgtcctggacaactgtcctccagatctgtcactatccgaggggtcctaggacagccagtcactagatacttctcccaggcactaagttatgactggggaactttactcatttcacatgcttttctaattatgcctgaaagccccactcccttgttagtgagagaaattctagcaaaagcaggggccattacacacctgaacataggagaaggaacacccgtttgttgtcccctgcttgaggaaggaattaatcctgaagtctgggcaacagaaggacagtatggatgagcaaagaatgccatcctgttcaagttaaactaaaggattctgcctcctttccctaccaaaggcagtaccccttagacccaaggcccaacaaggactccaaaagattgttaaggaccgaaaagcccaaggcctagtaaaaccatgcaatagcccttgcaatattccaattttaggagtacagaaacccagtggacagtggaggttagtgcaagatctcaggattatcgattaggctgttgttcctctatatccagctgtacctaacccttataccctgctttcccaaataccagaggaagcagagtggtttacagtcctggaccttaaggatgtctttttctgcatccctgtacattctgactctcaatttttatttgcctttgaagatccttcgaacccaatgtctcaactcacctggactgttttaccccaggggttcagagatagcccccatctatttggccaggcattagcccaagacttgagccaattctcatacctggacactcttgtcctttggtacatggatgatttacttttagccacccattcagaagccttgtgccatcaagccacccaagcactcttaaatttcctcgctacctgtggctacaagattccaaaccaaaggctcagctctgctcacagaagtttaaatacttagggctaaaattatccaaaggtaccagggccctcagtggggaacatatgcagcctatactggcttgtcctcatcccaaaaccctaagcaactaagagggttccttggcataacaggtttctgccaaatatggattcccaggtatggcaaaatagccagatcattatatacactaattaaggaaactcagaaagccaatacccatttagtaaggtggacacctgaagcacaagcagctttccaggctctaaagaaggctctaacccaagttccagtgttacgcttgccaaaggggcaagatttttctttaaatgtcacagaaaaaaacagaaatagctctaggagtccttacacaggtccgagggatgaacttgccaactgtggcatacctgagtaaggaaattgatgcagtggcaaagggttggcctcattgtttatgggtagtggcagcggtagcagtcttagtatctgaagcagttaaaataatacatggaagagatcttactgtgtggacatctcatgatgtgaacggcatactcactgctaaaggagacttgtggctgtcagacgatcgtttacttaaacatcaggctctattacttgaagggcctgtgctgcaactgcgcgcctttgcaactcttaacccagccacatttcttccagacaatgaagaaaagatagaacataactgtcaacaagtaattgctcaaacctaccccgctcgaggggaccttttagaggttcccttgactgattccgaccttaacttgtatactgatggaagttcctttgtagaaaaaggaccttgaaaagtggtcagggataatggaatacttgaaaataatcccctcactccaggaactagtgctcagccggcataactaatagccctcactcgagcactagaattaggagaaggaaaaagggtaaatatacatatagactctaagtatgcttacctagtcctccatgcccatgcagcaatatggagagaaagggaattcctaacttctgagggaaaacctatcaaccatcaggaagccattaggagattattattggctgtacagaaacccaaagaggtggcagtcttacactgctagggtcatcagagaagaaaggaaagggaaatagaagggaaccaccaagcagatattgaagccaaaagagctgcaagacaggaccctccatcagaaatgcttatagagggacccctagtgtggggtaaccccctccaggaaaccaagccccagtactcagcaggatgaatagaatggggaacctcatgaggacatactttcctcccctgaggatggctagccaccaaagaaggaaaaatacttttgcctgcagctaaccaatggaaattacttaaaacccttcaccaaaactttcacttagacattgatagcacccatcagatggccaaattattatttactggaccaggccttttcaaaactatcaagcagatagtcagggcctgtgaagtgtgccaaagaaataacccctgcactgcaggccatacctttcaatccctgtacctttaacctccttgttaagtttgtctcttccagaatcgaagctgtaaaactacaaatggttcttcaaatggagccccagatgcagtccatgactaagatctactgcagacccctggactggcctgctagcctcatgctccaatgttaatgacattgaaggcaactctcccgaggaaatctcaactgcacaacccctactacaccccagttcagcaggaagcagttagagcaatcattggccaacctccccaacagcacttgggttttcctgttgagaggggggactgagagcaggactagctggatttcctaggctgactaagaatccctaagcctagctgggaaggtgactgcacccacctttaaacacggggcttgcaacttagttcacacctgaccaatcaagtagtaaagagagctcactaaaatgctaattaggcaaaaacaggaggtaaagaaatagccaatcatctatcacctgagagcacagcgtgggggacaatgatcaggatataaacccaggcatttgagccagcaatggctaccctctttgggtcccctccctttgtatgggagctctgtttacactctattaaaccttgcaactgcaaaatatatatatatatatgaaaaataattataaaattggtaatggagaagcatggaaataagtgggactgaggaataacataaatggactactatttatttatcattttattaatattattttttaaaataatattaattattattatttataattttattatatttatcattttattaatgatattatttattatatcatttattatttatcattttattaatcattaatattaatgtattatttatcattttattaatattaatttgattgtattacttctttttgcttcatttctctaaaaaataaagctaaaaaagatggcaagatattatcgctgtagattctagatggtcaacctatacttgtttgttaaatgttttctgtatgataaagataatttattacaaaaagaaaagcaacatgactatggaattatttcttatttttatttttatttgctaccacaagaaatgtgaactctgatacattgtgaacagttcagatctgcaaaattatcacccacaagctgtttgagtatgatttatggtaattaattgaaaacattatcttaattttttcccaaatgaacattttgtattataactagcttattctaaaagaaaaatcaataaaaagcaatagcctttttaaaatacccaaatagataacgttagaagagcaaacatgatatgaacagggaactcttccaagatcaatgtgaaaatttgaaaccaaataaatattaacacagttttctgataaaaattattgcctccaataactgcacaggtcatatgatagttactgttcatggcttacgtataattgaccaaatttcagtagctatgttatcagctttccagttctttgatgttaataacttccctcattggcctcaggggctttgaagttttgtccctttttcctgttttatagttgctcagcacctaatcttatccctttcccaattcttctgacagtgttaggataagatgaaaggaccaaagtggcattctggacatctggttaatatatctcaaaggggtgcactttagtgataaatctccagtgagatacagttcaaggctatttttgacatggaccctgctgagccatcttccaggaaacctctacattttaccatccttgaaacaaatatattaggctcctgcaaagagatcagttttcacttttataattctaagaatgactactaagtcttatctgcaaatatctgattcagaagataatagggataaaagtacaaattggacatcttttggcaaaggaagctccttaaaactcagccttggttacatcaagaataagaattcctgtgtcatccctaagaagtagatttttatataactcaaaaccagctcaagaaatataatatttaaacaaacttctcagtgcttggttaataagcattgttatgaagaaacaatgaaaaataaaacaaaaacaactcaactttagtgagtttagtgagtgtcattgcaaagaaaatttcacattgcacttagggattttataaccttaaggcttattacaaaggtcacactatttcaattaagaacaaaagtgagttttaataataaactgtcagcatttcaaatcttctctcctaggtatcttgaaatatacaacatattgttgttaactatagtcaccctatgtgctatcaaaagctagaacatattcctcctatctagctgtatgtttgtacgatgaactaaactcttttcatctcccctcacccgtctcagcctctggtaactattctaccctctggttaccttctaccccgtacctccatgtgtttacatattgttgtataaattttgtggaaaaaaatcctttttaacaaaataatctgctggctatatttcttctcatattatttgaggaattgcattgaattttgggtactgaattttgaggacgtgaattaaggatgagctacatctcatgacctcgtcacagacccctactataaacatctgcatacaagttggcatattacaacaatagcatgagagtcagggtctgtagaaattcccagcctaactttttcctggactggccaaactgaacctgaaccagtgtatgggcaatgtagtatgcttgtcagaggcaccaaactgctaactcaaaaataaacatgactaaaagaacttctcccagtatacccatatgaagctgaccatttgcccagtaagaatgcaatgaaaagggcttttaatgtacagccaaatggcagtccagcaaggaagctcatgagcaacctacaagtagtgagcattttgatgtaatagagacttacatgcaattcagaattatgtttacaacatcacaaaacaaaaatttagagataggctctcactctgttgcctaagctggagtgcagtgggatgatcataacttactgcagccttgaactcctgggttcaactgaaggtcctcctacctcagcctgctgagtagctaggaccacaagcacacaccaccgcaactggcttaaattaaaatataaattgtagagatagggtcttaatgtgttgcccaggctgctcttgaactccttgcttcaggtgatcctcccacctcagcctctcaaagtgctgggattatagacctgagccacagcacctggccaactgacctatgattttacacaatggctgctcttcccttctttaactattattcattcttctttgatcctcattatttgactgtagtccttcttatgtcttgttttccttcattacctcttattctatcacattgccattgtcattctccactggggaagctctttcttgctgaagactggaaagacaagtccattcacctgattttctgtaagattgtggctcatgtattgacttgtcagacaattctgaagtttcatcaaaattagctatcatgcttgcataatggccctgaaccctcactcctactcttagcttcagtaccatctatgtcctcaactgtccatgatacttataattcccgtaaatcttcacttaacacctaacatttatttaatcttactaggcaaggtaataagaaatacataggtttgcctccagaagtgggttcttaagaaacccaccagaggaactcctctttcagatgtccacattagaagatttcatatcacatttggtgccacaggcctttgacaaggaggatgcagaggaaaaagcaaacttcacctcttcctagggaaagtgttggcctgccaacaggaaagaggcaacatctgggaaaatccccagtctttgccaggaagagtccatgccaaccccaccccatgacccctgtcctgcctactcattgtcactcttcactccaatgtccctcccccagatcctcttataaaatcccactctttcctgaccagacaaaccataccatatcccaccagagaggtaagtgggagctgagagaagatgagacccagggaggagctactgcacatgacacaggagaatacatgggagggtcccttcctcagggagcacaggaactctgagactcagcaagggtgtcctgggagggctcggggatgggagagtacacagattcacaactcattcagaactgtagaagatgatggatgtgaccaagatcactttagtcctaggggactagagaaggaaaatgacatgaggcagtggggtatctgtgtgttctcccactgaccacgctttctttagtgactcctgattgcctcctcaagtcgcagacactatgctgcctcccatggccctgcccagtgtatcttggatgctgctttcctgcctcatgctgctgtctcaggttcaaggtgagattgctttgcctctagcactgggttccctatgaatcctcagagctaacaagaggaggaaggctcctgtgtgtcatgtgaggtaatgacgtggtgtctaatgaacctgcctgcagttcttgcatcatctctccttccttcaggttaacttgcagtgggaggctccatggtggtccactaacagtggaatgagatggcttccatttagtcagtggactctaatatacactggtgggaaagtggactctaatatacactggagggtcagtaatgagatgtggggagggacaatgattggaggacccaatgtagagacagcccagagtgaggagagtattgaatggttgaataaggggaaagggtaataagagactggatggtgctccatttactacggctattttgagataaagaatttctgaaaacataagggaagatgaaggggtgtcaggaatgtggtcttcctccccaaggacattcctaggtattccccaaggtcatctcccaccccaagccccactcttcattttaccctcccccctcttcttccacctcaggtgaagaaccccagagggaactgccctctgcacggatccgctgtcccaaaggctccaaggcctatggctcccactgctatgccttgtttttgtcaccaaaatcctggacagatgcagatgtgagtggttagatgtggtgttggaggtgaccggtctcagggggaggagggtctccattcaggagagttccttgggaatgaggatgaacacgtttatctttcacacagtcctcctcccacctacctttgccctgccctccctcagcaggtctcaggctccctctcattctctttgttgccctcaaagctggcctgccagaagcggccctctggaaacctggtgtctgtgctcagtggggctgagggatccttcgtgtcctccctggtgaagagcattggtaacagctactcatacgtctggattgggctccatgaccccacacaggtgccagtatatcctcccctctctgttacctctcaaggtgctattgttgcccaggcccactccctgtcccctgtgcctgcccaggaagtacttcagggagcactggagctcagattctggggaatatttggggggaaagggaaggccatgaagcatctgaagatctgagttctgtggaggtctctatctttcagataaaatcaatctgccttcctcaggcgtattacataattctcatatgaggctgggttaacaattctctgagcttcatggagtctttgcctactattctgaaggaactcttaatgaagataggatcaatttttgtccccatacagaactgacattacttttgaggttcacaagctaatcacaaatgctacatcaattattgttctgcaaataatatattaccttgagttgttccaaaggtcttatgtttattggctggaattttccaatagcaatgaggagtcaaggaagagtttcctactcaccggcagcatctggaatagcagaccaactttcctcatgctggggagcaaatcaggtgttgcagctaaggggccatgcaagaagagctgcaatggccattcccttcacctggctacctcctctactctacagggcaccgagcccaatggagaaggttgggagtggagtagcagtgatgtgatgaattactttgcatgggagagaaatccctccaccatctcaagccccggccactgtgcgagcctgtcgagaagcacaggtaagaaacagaggagctgcctcttcccagtgttttccatctcatcccccattcctgggtctgaccttcaggaaatcttcctgagctagaaaatacaatgttagtgtgtcttctcttatctcctctcttctccactttctttgaatctctctcctggattgggacactggtgaaggtgagggagaggctttaacttctaggctaaaacctgggatgccccttcattggattcacaagcttcctcagccccattccatttatgtcttctgtctctccagcatttctgaggtggaaagattataactgtaatgtgaggttaccctatgtctgcaagttcactgactagtgcaggagggaagtcagcagcctgtgtttggtgtgcaactcatcatgggcatgagaccagtgtgaggactcaccctggaagagaatattcgcttaattcccccaacctgaccacctcattcttatctttcttctgtttcttcctccccgctgtcatttcagtctcttcattttgtcatacggcctaaggctttaaagagcaataaaatttttagtctgcacttgtttgtcttgtatatgccagtgtcatagccatactctgagaaggacaaagtgtttgagtggaggaaactttatgggtcttgcttcttccctattcacccaggcctctagggaaaatgatgaagtgtgcatccctaccagtgtgttatgatgagggtgtgggtcctgctcatgtaggatttgtgttgtggagagatgaggacatttctctcccgcgtacttactgccctcccattcccgtagcccaaacctgacagtgtgacatgaacagatttaggaggctctgatggtgcttagaatagtacttctcagagaatggcatcagcaggatggtagataggactttccagctcttgaaccttcacagaaacattcatttgaactactacccattaaaatggaaataccttcacaagagctaacaatcccaagtgagtgattaaagcatctgaatgttgcaaaaaataagaaaggatgcatcgaagagggtagaaagaagacttttacattatttatatcacccctccatcaatctcagtaagcacagcatggagagacattccctaaacttggggaaagagagtgaaataagcacttgagttttccatggaccctaacactaggtttgcctcagtaagacccagtggcctctgactccaggcagacacccttggacttagactccaggctgccttgatgccaggccaggctctgtggccccaggctctgtgaccccaggctccaggtcagcccccatgactgcagcctccagtcttgccccagaagatgcaggctctagacacacacagcatcatgcttttccccatagctccagaccacaggccagcacccactgacaaagactctaagcccacctcaaggacaagctagcacttgcagccacagactccagggtgacccctgaaatcctagacatcaggcctgcccatgtggacctgcccttcagacccaccacagctccaggatagctcccacagctacaacttcaggccagcacttgcagaccccagctccagactgacactcacagtcgcaggatacggtcctgtcaaatcccaaaccctccccaagcctttaggtccatctgagcacaaagccctgatgctaggccagcctctgtggcctctgtcactaggccagcccccacagacacaagttctggattttcccagttccaggcgaggctctgtggactcggtactagtctggcctcatactccagcagacccaggatcaagcttcattacagtagaccttagcaccaggccagcccccccgactcaggctccagccttagccccatgaatccagtctccagacttaccccagaggcaagttgacattcatggtcccaggctacaggccacccccactaaccctggctccataccagcccctgtagtttcaggtaccagcccagtatgcacagactcaaactccagacctgtcctagagactcagatactacatctgtcctagtgcctggctaacccctgaagacatgggttcaaggcctgctttagagccagattggtctccaggaagtaggatttagtctggctcctgtgattagaggcttcgggcctgccctcatgaagtgactgcctaccctggtataccaagtcaataggtccacttgaggatgccagcagcaagcctgcccaaagaccaagccagatggcctgcccagaatctctggatgactgactggtgaagggctttgtctgctaaagccagtctgtaaaaactggaataagtgactacttgttcaaaaagtcaaacaccaaagacacatgaccacaagtatcataaacaatcaaggaaatatgatattaccaacagaacaaaataaaggactagtaactgaccttaaggggaaagaattttacaaactgctcaacaaataatttaaagcaattgtctaaaagaaactcagtgagctacaagagaatacagatagacaactaaatgaaatcagaaaaacaatatgtgaacaaaatcagaaggtcaagaaagagatttgttttaaagttaaaaaaaaacacatagtggctgaactgaagaaatgcatggagaatttcaacagcagacttgatcaagcagcagaaaaagtcagtgagtttgagacaagtcatttgaaattatccagtcagagaaacaaaaagaaaaaagaaacaaaaagagaaaataaagcttaaggaaactatggtacatgatcaactgagccaatatatatattatgggttttctagaaggagcagaggcagaaaatgggcagaaaacatatataaaaaataatgggtcatggggtttggcatccccatgcctgtcagtgcctcaccccagccaacgagcatgcacccagccatgctgccactgccgtggcatgagcacagatcccactgctatcaccctgacagagtactgtggtcactgccacttactggagtgttgtggccagcaatccaggaacacctttggacccccagcacagcaggttcctaacttcgaggggtgagagaacaaagctaggggcctgataatagcattccagaattggggaatgctgagctgaaccttggcccactgacatcttccagaaatgaagtgagtcaactgagcccaccttataccacaatcaaacccccaagggcatcaaaaaggataaacacacacacacacacacacacacacacacacacacaatccatccaaaaaacagcaacttcaaagattaaaggaacgccagcccacacagatgagaaagaaccagtgcaagaactctggcaactccaaaagccagcgtctatttttacctccaaacaattacactagttatccagcaatggttcctaaccagtctgaaatatctgaaatgacagaaatagatcttggaatatggataggaaccaagattattgagcttcaggcaaaagtgaaaatccatttccaggattctatacaataaaacgatacagaaaatgaaagatgaaatggtcattttaagaaagaaccaaactgatctgatagaggtgaaaaactcatttcaaaaatttcagaatacaatcacaagtattaacagcagaattgatcaagctgaggaaagaatctcagatctcaaagacagttctctgaaataacttagacacatattagaaattaaaaaaagattgaagaaaattaaacaaaacctctgaaaattatggtattatgtaaagagaccaaatttatgactcattgaaagcaagcaatttggaaaacatatttcaaaatatcatccatgaaaacttccccaacctccttggagagggcaaactttaaattcaggaaatgcagagaacccctgtgagactacacaagataaccatccccaagccacacagtcatcagactctccaaggctgaaatgaaagaaaaaaatgttaaaggtagctagagagaaggggtagatcacttacaaagggaacctcatcaggctaacagcagtgttgtcagcagaaatcctacaagccagaagagattggggccctatattcagcattcttaaggcaaagaaatcctaaacaagaatttcatatccaggaaaactaagcttcataagctaaggagaaataagatccttttcagataatcaaatgctaaaggaatttattacctccagacctgccttacaaaataacctaaaaagagtgctaaatacagaaaggagtgaccattactggctactacaaaaacatacttaagtacatagaccagtgacactataaagcaaccacacaaacaagtcttcataataactagctaacaacatgatgacaggatcaaatctgcatacatcaatactaaccttgaatgtaaatgggctaaatgccccaattaaaaggtacagagtggcaagttggaaaacaagcatgacataatggtatgcccctctcatatgcaatgacccatctcacatgcaatgacactactagactcaaagtaaagggatggagaaaaatctaccatgcaaacaaaaaacagaaaaaaaaagccaggtttgctataccaatttcagacaaaacagactgtaaaccaagagatttttgaaagacaagggcattatgcagtggtaaagggctccattcaaatgaagacctaactatcctaaatatatacatacccaatacaggagcacccagatttataaagcaagttcttagagacctacaaagagaattagataaccacacaatcagagtagagacttcaatactccactggcagtattagacagatcatcgaagcagaaaactaacgatgatattcaggacctgaactcaacacttgaccatatctagtagacatctacagaactcctcactctcaaacaatagaatacacatttttctcattggcacatagcacattctctaaaattgaccacacaattgagcataaaacaatcctcagcaagctcaaaaaaacaacaacataaaaacaaaaacagaaatcataccaaccacactctttgatcgaccacagtgcaataacaatagaaatccctactaaaaaatcacctgaaaccatacaattacatggaaattaaacagcctgctcctgaatgactttgaggtaaataatgaaattaaggtaggcataaagaaattctttgaaatgaatgagaacaaagatgcaacatatcagaacctcccacacacagctaaagcagtgttaagagggaagtttatagcactaaacacccacatcaagaagttagacagatctcaagttaacaatctaacatcacacttagaggaattagacaagtgagaacaaaccaactccaaagctagcagatacaagaaataaccaaaatccgacctgagctgaaggaaactgagatgtgaaaatcatacagaagatcaacaaatccatgaatatgtcatttaaaagaataaatatgactgatacaacactggctagactgacacagaaaaaagataagatccaaataaacacaatcagaaatgacaaaggggacattaccactgacaccacaggaaaaacaagcaaacaagcaaacaaacaaacaaaaaccctcgacgactactttgaacaccactgtgcatacaagttgaaagacctagaagaaacggtttaattcttggaagcatataacctcccaagattgaaccaggaagaaattgaatccctgaacagaccaataatgagttctgaaattaaatcattaataaaatacctaccaaccagagaaagcccagggcaggatagattttctgccaaattctgtgagatgtataaagaagagcagaagacaccattcttactaaaactattccaaaaaattgaggaggggagactccttcctaactcattctatgaggccaacattgtcctgatatgaaaatctgacaaagacacaacaacaacaaaaaatccaacttcaggccaatatccttgatgaacattgatgcaaaaatccttaacaaaatactagccaactaaatccagcaacacaccaaaaagccacaatcaactaggctttagaatgtgaggttggttcaacatatctaaatcaataaattgatttatcacataaacagaaccaaaaacaaaaaacacatcatcatatctatatatgcaggaaaggctttagacaaaattaaacatctctttgtgtttaaaccctaaacaaagtaggcattgaaggaatatcctttagaaccttaagcgccatctatgacaaacccatagaaaacatcgtactgaatggacaaaaactggatgcattccccttgaaaactgaaataagacaagaaagtcctctctccccatttctattctacatattactgaaagtcctggccaaaacaatcaggcaatagaaggaaataaatggcatccagatagggtgagagaaagtcaaactatccctgtttgcatatgatactattctatatctagaaaaccccattatctcagcccaaaagctccttcagctgatgaacaacttcagcaaagtttcaggatacaaaatcaatgaaagaaaatcactaggattcctatataacaacaatatcccagcagagagacaaatcaagaacacaatcccattcacaatagttataagaagaataaaatgcctaagaatacagataagcagggcgacaaaagaactctacaaggagaattatcaaacactgctcaaaaaaatcagagatgacacaaacaaatgaaaaaacattccaggctcattgataggaaaaatcaatattgttaaaatggccatactgcccaaggcaatttatagatttaatgttattcataagaaactaccggaaactttcttcacagaattagaaaaactattttaaactttatatggaacaaaaaagcccgaatagtcaaggcattcctaagcaaaaaggacaaagctgaaggcatcacattgcccaacttcaaattatactagaaggctacagtaacccaaactgcatggtactagtacaaaaagagacagatagaccaaaggaacagaatagaaatcccagaaataatgctacatacctacaaacatctgatcttcaacaaagttgacaaaaataagcagtgggaaaaggacttcctattcaataaatggtgctgggataactggatagtcatatgtagatgattgaaactggaccccttctttatactattttaaaaggtaaactcaagatggattaaagagtcaaatgtaaaactataaaatcctggaagataacctaggaaatgcccttctggacataggatcttgcaaagatttcatgatgaagatgccaaaagcaattgcaacaaaaacaaaaattgacaaatgggatctaattaaagaaaagagcttctaaacaacaaaagaaattatcaaaagagtaaacagacaacctacagaatgggagaaaacatttgcaaactatgcatctgacatagtttggtctaatatccagaatctacaaaaatcttaaattagcaagcaaaaactgaacaactgcattaaaacgtgtgcaaaggacatgaacagacacttttcgaaagaagatatacacacagccaagaagcatataaatatgctcaaaatcactaatcatcagataaatgaaaattaataccacagtgagatgccatctcacaccagtcagcatggctgtttttaaaaagtcaaaaaataacagatgctagcaaggttgcagagaataggctatgtttatacacttctggtaggaatgtaaattagttcagccactgtggaaagcagtttggaaatttatcagataagttaaaacagaactactatttgacccagcaatgctattatggggcatataccaaaaggaatataaatcattctaacataaagatatatgcatatatatgttcattacactgttattcacatagcaaagacatggaatcaacctaaatgcccatcaacagtaggctaaataaagcgaatgtggtacatatacacagtggaatactacatagccataaaaaacaataaaatcatgtttgcagcaacatggatggagctggaggccatgatcctccaccaactaacacaggaacagaaaaccaaatactgtatgttatcacttataagtgagagctaaagtttgactacagatggccaccaagaagaagaaaacacacactggaacctacttgaggatgaggggtgaaatgagagcaaggactggaaaagcacctattggatattaagcttattacctggatgaaaaaataatctatacaccaaaccactgtgacatacaatttacctatataacagactggcacatgtactcttgaacctgaaataaaagattttaaaaaaagaaagaaaaaaatggttgtgaaaaacttcccataactggtgagaaaaaggaacatctacatccatgaagtacaaaaaactccacatacattaaatataaagacatcttcactgagacacattacaatcaaattccaaaaagtcagggatgaaaagaaaattttcaatgcagcgaaagaaaaataacatattatgtgcaagcgaatgtctataagattatcagttgatttttcagaaggtacctttcagggcaggagagagtgggataatatattcaacatactcaatgaaaaaacaaaacaaaacaaaaccctgcaaaccaagaacactatacctggcaatcctatccttcagaaacgatgaaaagagaggaagtttaccagaaaaacaaaagctgagagagttcattaacactagaccttctttatgtaaaagactaaaagaatttcttcaagatggaagataaaaatgctagctgataccataaaaacacaggaaagtataaagtataaattgactatgttaagtacatagtaaaatttgaaatactctaacattgtagtgatggttggtaaatcacttaaatctttagcataaaagacaaaactattaaaaacaacagtaactacaataattgttaaggaatatgcaataaagaaacatgtaaattgtgacaccaataacaagaatgtgcaaacaacagcaaaagtgtaaaatatttttatgtgatcaagttatctttttaaaatagtctattataaatatatttttgtaagctttatggtaaccacaaagcaaagacctataatagataaataataagaagcaagcaaccaaagtataccacaagagaaaattatctagtcaaaaagaagagagaaagagaggaagaaagaaacaaaggacctacaaaacaaccagggaacaatgaacaaaatggcagtagtaagtaattacttattaatgattattcaaaaagtaaatgagtaaaattctccagtcaaatggtatagagtgatcaaatgaatttaaaaaaataccaacacacaacttaatgttcctacaagaaacttactttagctttaagaacacacataggctgcatgtgaaagaattaagatatttcatgcaaatgataccaaaataaaacagtggtagctatagttatattacataaaatagactttaagttaaaaactttaaagagaggcaaaggtcattatataataataaagaagtcaattcagcaagaggatataataattttaaatatgtgtgtacacatcattggagcccataaatatataaagcaaatatcaatagatctgaagagagagaaaaattgtaatacaatatttgttggataattcagtacccactttcaacaatgggcaggtcattcagacagaaaaaaattcaataaacagcggacttgaactacacttcagacaaatggacctgacagacatacagaacatttcttccaacaagagcataataaacattcttctcaagtgcacatgggacatgcttctggagagatcatatatttggccataaacataggctcaacaaattttaaacgactgaaatcatatcaagtataattttcacccaaaatagtacaatactagaaatcaataaaaagagaaagattggaaaatattcaaatatgtagaaattaaatgacattatcctaagcaaccagtggaccagagaagaaattaaaagtgagattagtggtgggatccagcagtcccactactgggtatccagccacatacaaaaatgattatatatcaaaaaaacaccagcatgcatgtgtttattgtagcataattcacaattgcaaagatatgtgcccatcaaccaaagatggataaagaaaatgtagcatacatatatatacatatacatatacagacacacacagacatataccatatatatatacacacacacacatatataccatggaataatggtaattgactagccataaaaaagaacaaaataatgtattttgcagaaacttggttggaactggaggctgtcactctaggtgaagtaactcaggaatgaaaaaccaaatattgcatgt

SEQ ID NO: 1430 - DNA, 807 bp, Homo sapiens
aaaccataccatatcccaccagagagtgactcctgattgcctcctcaagtcgcagacactatgctgcctcccatggccctgcccagtgtatcttggatgctgctttcctgcctcatgctgctgtctcaggttcaaggtgaagaaccccagagggaactgccctctgcacggatccgctgtcccaaaggctccaaggcctatggctcccactgctatgccttgtttttgtcaccaaaatcctggacagatgcagatctggcctgccagaagcggccctctggaaacctggtgtctgtgctcagtggggctgagggatccttcgtgtcctccctggtgaagagcattggtaacagctactcatacgtctggattgggctccatgaccccacacagggcaccgagcccaatggagaaggttgggagtggagtagcagtgatgtgatgaattactttgcatgggagagaaatccctccaccatctcaagccccggccactgtgcgagcctgtcgagaagcacagcatttctgaggtggaaagattataactgtaatgtgaggttaccctatgtctgcaagttcactgactagtgcaggagggaagtcagcagcctgtgtttggtgtgcaactcatcatgggcatgagaccagtgtgaggactcaccctggaagagaatattcgcttaattcccccaacctgaccacctcattcttatctttcttctgtttcttcctccccgctgtcatttcagtctcttcattttgtcatacggcctaaggctttaaagagcaataaaatttttagtctgc

SEQ ID NO: 1431 - DNA, 528 bp, Homo sapiens
atgctgcctcccatggccctgcccagtgtatcttggatgctgctttcctgcctcatgctgctgtctcaggttcaaggtgaagaaccccagagggaactgccctctgcacggatccgctgtcccaaaggctccaaggcctatggctcccactgctatgccttgtttttgtcaccaaaatcctggacagatgcagatctggcctgccagaagcggccctctggaaacctggtgtctgtgctcagtggggctgagggatccttcgtgtcctccctggtgaagagcattggtaacagctactcatacgtctggattgggctccatgaccccacacagggcaccgagcccaatggagaaggttgggagtggagtagcagtgatgtgatgaattactttgcatgggagagaaatccctccaccatctcaagccccggccactgtgcgagcctgtcgagaagcacagcatttctgaggtggaaagattataactgtaatgtgaggttaccctatgtctgcaagttcactgactag

SEQ ID NO: 1432 - DNA, 96593 bp, Mus musculus
  misc_feature (1)..(312): n = a, g, c, or t.
  misc_feature (3386)..(4940): n = a, g, c, or t.
  misc_feature (12981)..(13197): n = a, g, c, or t.
  misc_feature (65121)..(65140): n = a, g, c, or t.
  misc_feature (82761)..(82780): n = a, g, c, or t.
  misc_feature (90594)..(90613): n = a, g, c, or t.
nnnnnnnnnnnnnnnnnnnnnnnnnnnnnnnnnnnnnnnnnnnnnnnnnnnnnnnnnnnnnnnnnnnnnnnnnnnnnnnnnnnnnnnnnnnnnnnnnnnnnnnnnnnnnnnnnnnnnnnnnnnnnnnnnnnnnnnnnnnnnnnnnnnnnnnnnnnnnnnnnnnnnnnnnnnnnnnnnnnnnnnnnnnnnnnnnnnnnnnnnnnnnnnnnnnnnnnnnnnnnnnnnnnnnnnnnnnnnnnnnnnnnnnnnnnnnnnnnnnnnnnnnnnnnnnnnnnnnnnnnnnnnnnnnnnnnnnnnnnnnnnnnnnnnnnnccttggctctgtctggacaggtccagacgactgacaccattaacactttgtcagcctcagtgactacagtcatagataaacaggcctcagctaatgtcaagatacagggtggtctcatgctggttagtcaactcatagatcttgtccagaaacaactagatgtactatggcaaatagctcagctgggatgtgaacaaaagtttccgggattgtgtgttacttccattcagtatgagaaatttactagggcagctaatttgtcaaaaagtctttttcagtatatgttacagaattggacggctgaatttgaacagatccttcgggaattgagacttcaggtcaactccacgcgcttggacctgtccctgaccaaaggattacccaattggatctcctcagcatttcccttctttaaagaatgggtgggattgatattatttggagatacactttgctgtggattagtgttgcttctttggttggtctgtaagcttaaggcccaaactaggagagacaaggtggttattgcccaggcacttgcagctctagaacatggtgcttcccctgatatatctatgcttaggcaataggtcgctggccactcagctcttgcatcccacgaggctagtctcattgcacgggatagagtgagtgtgcttcagcagcccgagagagttgcacggctaagcactgcagtagaagggctctgcggcatatatgagcctattctagggagacatgtcatctttcaagaaggttgagtgtccaagtgtccttctctccaggcaaaacgacacgggagcaggtcagggttgctctgggtaaaagcctgtgagcctaagagctaatcctgtacatggctcctttacctgcacactggggatttgacctctatctccactctcattaatatgggtggcctattgctcttattaaaaggaaagggggagatgttgggagccgcccccacattcgccgtcacaagatggcgctgacatcctgtgttctaagtggtaaacaaataatctgcgcatgtgccaagggtatttctctaccccatgtactctgccttccccgtggcaacaactcggccatgggctgcagccaatcagggagtgatacgtcctaggcgaaggagaattctccttaaaggggacggggtttccgccattctctctcttgcttgcgctcttgcgcttttgctctctggctctggctcttgctcgcttgctcctaaagatgtaaacaatagagctcttgctctgcgctctggcgctctggcgcgctggcgctctggctcctaaagatgtaagcggggggctttttcgtttttggggcttggggcttgcgctcctgctcctgaagatgtaagcaataaagttttgccgcagaagattctggtttgttgtgttcttcctggccggtcgtgagaacgcgtttaagacctgttcaaggaaatgataacaatgccgttgtttcagaaagtacgacacctcgttacccctgttatgaccccttattatgactgccttgcaatcacgtctttgtttcaggttgttatgacaggcatgtcatgcttgttccacttctggggctccgtctacttgcctgccaaatcccccatttggaaccccctattgctgaactatagagacccctatgtcatccaagttcagtgcttatctcttgaaccccacctttagagagatataatttgtgtacacaaataaaaaggttttctataattaatttcttgctttaattaacttggtgttgatgttttaggattgtggtctttctcctcacatctgtgggattaaccgctgtagctccagataccacatcaaggcctaacaatgattagcaaaagaggaaggcttttcctatctctttttgggaaccaggaaactttccttgggcatcttcctgtgagatgtctcttcatgtctcattggtctagcattgctccgatgcggcaatgctagaccaatcaccatcaaggaatgaacctgtctaatcaggactcgttgtgtgtgaaggcaggaggttataacattaaaaccaaacccacaagacagttgtgaggtttttagtgttttggaattagcagtagaaaggctgtgtctatttagagacctgtgtaaagacaatgtgaccagtggagattagtaaggtgaaagtcaacgacttggatagctgaccagaactgcctttgggtattttatacattttatttattatatttcctttcttgttttttctttcaatacaggtatctgtgtatgatcttgaacttcacatcctcctgcctcagtactgaaagctccaggattaggaagtgcactctctgccacacttggccttctttgtatttgagttctttagacaggactggacctgaggtacacaacctactctaaagagggtcagggagaaaagggaagcagctcccccagggtaggggtgcctgcacatcagatgccacgcagctaggagggcatcgctaagcaatagacagttgctccatcactctgggtttgcaggatcacagttaactctttttttctttttttaatggtggaagagagcaaagtacttactgtaatgcggtactactaggacttgtttaaagagggaaaaagccttttaggttttgagatcaaggtaattatttaatggtgttagcttgggttagctgcaatagcagttttgtattgaagcatattttactatttcctgccagcaaaggccagacatggacaagaaggtatgcattaatggaatgacatggagctcgggcctcttgagagcagccgcttctccagaacagagagtgtctctatttcaccaacacactgtgtacacccaatgagctagggacaagcataattgtaatctattttagcagcctcatggctcttaaggacacagaagaaagggagattaagaaatctcttttgaggcccattaatgaggaggaggccaacagaaggctgctaacatattagataagaacacagtttctaggaaatgttatctaaatcatttttaagaaatagagggtatgggagtcccagctgacttgcagattaaatatgcacatctgagctcatgtcttccaagtccctgatatgctataggtaagctatgttttaactacaacaaatccacaaggataagaagaatagaatggataacagcagcagtgtgtagctgctcaaaaacagaagagtgtagagattgtaagcagagtcaagatacgcatgacagatctggggccagccatgggcaggacaagagaactaggttatgcaattgctgggctggtaaattcaaactctgtaaggtggccttgtggtacagaagacgctggagaagaagtggtgggtgtgtgtgtgtgtgtgtgtgtgtgtgtgtgtgtccgtgtatctgtgtttatgtgagcatgtgctgtatgaatttatgccgcagtgtgtgggtgccccctgaagttagaaagaacgtcagatcccctggagctggaggaacacttggacatgagctgcattactgggtgctggggatcaaactggannnnnnnnnnnnnnnnnnnnnnnnnnnnnnnnnnnnnnnnnnnnnnnnnnnnnnnnnnnnnnnnnnnnnnnnnnnnnnnnnnnnnnnnnnnnnnnnnnnnnnnnnnnnnnnnnnnnnnnnnnnnnnnnnnnnnnnnnnnnnnnnnnnnnnnnnnnnnnnnnnnnnnnnnnnnnnnnnnnnnnnnnnnnnnnnnnnnnnnnnnnnnnnnnnnnnnnnnnnnnnnnnnnnnnnnnnnnnnnnnnnnnnnnnnnnnnnnnnnnnnnnnnnnnnnnnnnnnnnnnnnnnnnnnnnnnnnnnnnnnnnnnnnnnnnnnnnnnnnnnnnnnnnnnnnnnnnnnnnnnnnnnnnnnnnnnnnnnnnnnnnnnnnnnnnnnnnnnnnnnnnnnnnnnnnnnnnnnnnnnnnnnnnnnnnnnnnnnnnnnnnnnnnnnnnnnnnnnnnnnnnnnnnnnnnnnnnnnnnnnnnnnnnnnnnnnnnnnnnnnnnnnnnnnnnnnnnnnnnnnnnnnnnnnnnnnnnnnnnnnnnnnnnnnnnnnnnnnnnnnnnnnnnnnnnnnnnnnnnnnnnnnnnnnnnnnnnnnnnnnnnnnnnnnnnnnnnnnnnnnnnnnnnnnnnnnnnnnnnnnnnnnnnnnnnnnnnnnnnnnnnnnnnnnnnnnnnnnnnnnnnnnnnnnnnnnnnnnnnnnnnnnnnnnnnnnnnnnnnnnnnnnnnnnnnnnnnnnnnnnnnnnnnnnnnnnnnnnnnnnnnnnnnnnnnnnnnnnnnnnnnnnnnnnnnnnnnnnnnnnnnnnnnnnnnnnnnnnnnnnnnnnnnnnnnnnnnnnnnnnnnnnnnnnnnnnnnnnnnnnnnnnnnnnnnnnnnnnnnnnnnnnnnnnnnnnnnnnnnnnnnnnnnnnnnnnnnnnnnnnnnnnnnnnnnnnnnnnnnnnnnnnnnnnnnnnnnnnnnnnnnnnnnnnnnnnnnnnnnnnnnnnnnnnnnnnnnnnnnnnnnnnnnnnnnnnnnnnnnnnnnnnnnnnnnnnnnnnnnnnnnnnnnnnnnnnnnnnnnnnnnnnnnnnnnnnnncactttcatatttatgaggtgaaagttctttaccatcacctaaagattgtctcctccaaggtaaaaaagttttgttgtataccggcccgcggcctacttgaaccgggtacacctgggaggcaggctggggctgaaaaagacttaggtggcaagagagattaatggagaccaaggcacgattctgttcaaggccacagtttactaagagagtgtgcttataagggggaaggcccatcccccgccagtccattcttggtgtctggagccagcctgtaggcgacatgcaggataggatgtttctcaggaacatatcaggggtctctcaacaggtagcagtgtattggagagagcagtgtctggtgacagaacaaaagagccatctaggtccgaaggctccaccctaggtaatctccttctaatggcagcaaggtcaaagtctggatcagcctgcttcaggctgggggagcctacaaagttttgcctcgtggatgcacaaaatgtaaatgactctcacagccggctttacatacaccactcataatgcaaggtttgacaaacactccccattccctttggagttcctgacaacagtagcattaaccaagatatccattttattacagggctctagaccttagcacaactgactccatgatggaagtaccactcaggctgtaacactcagcgtgcagccagcaccacctgcccaaatgaaaacaaagacctaatctatcaagtcatatagttctgaggaagtctcaaaatggactcagcttgctttttggtttctgtagttctgcttctggctaactgtttttgttaactgaaatatgtcaacccaggacatggttttttgtgctaaaaagctcactctgagaaagacttggggctacattgggattctgaatacccagtgtggctgccaactggctaataaagactgtctattggcaaaagcctatgactgagcatccttctctggtggatgtcccacaacatttcctcttgttagaatatacaatatgggtgtgcccatccccaatataggggattttgagcactcagggcaaatattctacctttgaactacactcccagccccacagtaaaattgaaatcatctctaaattgcaatacctaacacaagatggatggatggttagaggcttttctttttactttttctttttctttttcttttttttttttttttttttggttttttgagacagggtttctctgtgtagccctggctgtcctggaactcactctgtagaccaggctggcctcgaactcagaaatctgcctgcctctgcctcctgagtgctgggattaaaggtgtgcgccactacgcccggctagaggcttttctgtcctcaatttgttttgagacatggcctccactctgcagtccaagctggtctcatactcatggcaattctacctcagagttctgggagtacaagtatgaccagacatatccagctgtaagtattgcttaaaaaacaacacaacaagacaacattaaaaagaaaattcagtctggttttggtggtgcatgccttctcttccagcacctacaagacaaaggcaggcatatctctgtgggtttgaggccagccaggactacatagacaaaaaaaaatgaaaaaaaaaaaaagttcaaggttggttgaaaccaaggactatgtggatgtagaaccccgcccccctctttctctttctctctctctgagacacatgctgttgccaggcaaacctctcatcacccactcttactctcacaaagtccccccagatgtgatcctgcatatgcagatgtggagggtctgctgataccgtgacctgagatagcatgttcgtggcttcgattgctaccgttttgtgtagagacagagtctggctctgtagctccatcttcttgaatttcatcaaagctgccttgtagtctttctatcttgctgagctctgaggaaggctgtgctgaaggtggaatccagagccttctctgtgctaagctaagctcctgctctaccattgagctgtaacccttccccaatttcctggccttaccgttaagtctgaaaagtgtgaggagagagacccaacctacaaccatctaactgcagcatcatttattttagaggtgcacccgagactgatcagctggctgtcccaccctaagttggaattttagagatcagccctggatatgaggaagacaggcttttatagctcagggtagggggtttccaaatgaggggtttggtgggcaaaatactcagggttacaggagcagaacatacacatagcaagctagttataatgacctgaaacgaagatgtgattgccattcctagaacaggctgtacagaaccatgtgtacttataggtgggacacaggcaaatccttgagaaacagaggctgaatcataaacagaagtgaacctagtttgtttttactatatgatgacttttaagccttacatggaagcgtgctggtctttcacttaccctcagatcagggcaccttctctgcagtcttttctggtcctccacatctgcatttgcatccctgttgtgatagcataacttgagctagcatgttcatgacattgattggtactgttttgttttgggacagggtctggctacgtacctcaggctgacctcaaattggagatcttcctgcatctgcctcccgagtgtttcaattataagcatgcaacaccacagctaacttgtattgctactatgaatattgacttatgtattgtccctctcgacagactgagcccagatgtattgtagttcttcagggcccatctagcacaatgacttgactagggacagagaagtgaagataaacgaaaaaggagaatgtgacatgcaggcacatttagctaagtgttccttcaggaagttgtgagcatcacacttactgcctgggtgcgaccacttgagtcccagtgttgttggttctactctttttggtagattgttcatatcttcttcttacctctattctgtatgcttttccatttgctatttaaaaactgcttaattattggggtctggtgctgcaggcatgctccttggaaggcaagggcattaaaatttcaatgcatagctgggtagttgtgttaaccacctttaatgccaacacttgggaggcagaggtaagtggatctcagagttcaaagcgaggctgatctacagagtgagtttcaggacagccaagactacacaaagaaaccctgtctcagaaagaaagaacaaacaaaagagagaaagaagaaatgaggaggaaaggaaggaaaaagaaaagggaaaaagagaaaaaaaaaaggaaggaaggaaggaaggaaggaaggaaggaagaaatttcaaggcatgcctgcacttcctagcactcagaaggcagaggcaggcagatgtctctaagtttgaggccagcttagtctacacaattaagtaacaggctagctagggctacatagatgcagctttaaaaacattgtatcagtttgtcagcaggatgcctaaagatgcagacacatatagatagtaagaaatttacaataatgaaacacatgagtctagtcatcatctgcagctatacttccttggtttttgtaactcataatagtttagcacaaatgcaatatatagaacttgcatattgtattttggatctctgggtattttcactatatgtgtcctctaacccacaactctccaccagttttctctagatatgaatatttaaattttataaagatcccacgtataagatcatgcaataataatttactgtgtctggcttatttcacttagcataatgtccctaaatggaaagatctggttctttttaccaggctaattactattctgatgtgcatttcccgtctttctcctgacagcttattttcatatcttggctattgtggattatgcagcaatgaacaagggaaagctgatagctttaggaagttatttattaattttctttgggtatatgtcagaggagatgtttctgggtcatgaggtaacttttagtatctttcaaatcctttgtactgttttccatattgttgtaacagtttgaatttactccttaaaagagggaaagggtccggcagtggtggcacacgcctttgatcccagcacttgggaggcagaggcaggtggatttctgagttggaggccagcctggtctacagagtgagttccaggacagccaaggctatacagagaaaccctgtctcaaaaaaccaaaataataaataaataaataaaataaaaagagggtaaggacagatgacagggttggaagagaaaaaaattaacaagagcccactttggtggaatatgtaatcctagtatttgggaagtgtaagtaggtggatcgggagttcaaggtcagcttctcctacacaatttggtggaggtttgaggccaacctgggctatgtaaggtccggtctcaaaaaaactaaaagttacaaaaatagaagatcaggcatcaccgggctgcattcatggtggaagctacccactagaactgaagcttcaccctcggcatctgcatgccagctgaagtatctgagcttgcgaccgattaatgacagtcagcagtggaagaaccgccgaagtttcacaagaatagagggtgagatccaaaagaagaggcccacagacgcttcgcctgatttaccggaactagcaagcctcggctgtcttcaaacatcacaaaatctctaccatgccacagactgggcttcaggcgcctttccctacactaggaaaacaaaaaacaaaaaacaaaacaaagccttactacgccggaagccaggtagtttgccataatcacctgaccggtcagctgcattcggattgggctttagtagtacgtgctcgggggataccgccccagcagctctaggggcggggccaggagccagaggccacggtattggttagatccttcagggattacccaatcagaatcatccttcttgccgcgcagagcgtgcggcgcggggcgcaggagggccgtgtcggcgcgcggagtttggatggtggttccgcccggcgcgacgtaagcctgagtgaggtgagttcggcgcgcgctgggttgcggtggctccgccgactaacagagcccgaggccttggccatttcaccagtcatccgtcccaggttctccgagcctcgcttgtggcgagaagcccagaccggagtagagacctggtgacccagaaaaggccatgtcaggcggccgaggctcgagtctcactgtccacactttccttaaggccttgattgtcatacgcgagaaattagctcatctgcttcccgtagtttgtgtagtgctgcaacgacccctcgtagcaatgcatgctttcgagacgccagaagaggtggaggtgccctgtttttaatcggagaagcaggagctcagacctcgtttgccgaaagggcgcgcgggcttggatgccagatgaggtttgaataggacctgcccagctctgaagcctatctcactgccccaggcttcctcccagtccctcttaactgtcataggttacccgggtgagggtgactgagatgaacctgccatcttccggtgtcgcctttaaatacacagctctcctacctcagcaaggggtaggggtgggaaagactgatcgagagatgacaagatggaggagaaggagagaggcagacgcctggggagtaatacatttaattgagcttggaaggaacttgtctcagccatccagtgctgagttgacgtcacaccgtctcagccatccagtgctgagttgacgtcacaccggcttgagtcaacattttgttagcctgactgctattctgtttggatgtcactttaactttgcttggatgaagtgggatttttaggttcccaagatagggatttagtaccagtttgtttgttttggatcttgtagtccagtttggcctcaaacttgtagagctgagggtgactttggactccatgatcttttcagcctcaacctctcaagtgcttgagttacagacccatgtcaccatccctgttatttaaagtgtatatactgtgaaatatgtacttctgcaaaagagactcacagatttctctgtgtagcccactgtagaccaggctggcctcgaaccctgattccactgcctttccctcctgagtgctggaattaaaggcaatggctgccactgctggacagaatgtagcatcttaaacttggttgagggacatgctctattttctatatttttaccttttgccgggaatggagatgggagtatgttcttgtccatgtttgtgctcatgtgtgtgtatgtgtgtgttaatgtgcaagaagaccagaggtaccttctgcagttgtcttccatcttagtgtttggggcagtctcactgaacctggaacttactgattaaactagcaagcctcccaggactggcattatagatgcacattaccgctcctgactttctaagtgggttctggagatctgaaatcaggtccctatgttcatactacaagcactttactgactgagccatcttcccaggccttttctgtcttaccaggttcaaagtaattgaaaaattatctgtataattttgtgcctaaaagcctttgagtatcttgctttcctgtagaataagatcagttgccactgggaatttcggtggttcacacctatgaccccaattggcactttgaatgagacaggagaatggaaagttaagagcagctttataaagactatcttagaagcaagctacctcccagagcaagcctataatccacacacacatagaaggtggagacagaaggatcagaagttgaaagttttcctcgggtgtatagtgaatttgagaccggtctagactatatgagaccctgtctccaaaacccaaaacaaacattaaaatgctcattacatttataatgtctttctgtcactctggctattattatttttgttattattattaatattattttgggggtggttttgagtcagggtttctcagtgtagctccggctgtcctggaatttactcagtagatcaggctggccttgaactcagagatttgcctgcctctgcttcctgagtgttgagattaaaggtgtgcaccactactgcctgactcataacaaaactttaacagtattttttatttgtgtgtgagcttgatgggatcagagaacaacttgcagttctctgccatcgtgtggggccaggggattcgaatcaggttctcaggcttggccagcagtcttactgcctaagccaaccgaatggtcctgtttttgttttttcacaagttcttaacacattttagttataaaataggctatatagatttttcttaggtaattgtttacaatgtactcatacttgagtggttcacattttttagtttagtattctgtgtagcatacaagcactctaactgtgaactataccatcagctcttggtttttgagacaagattttattatatagctcaagttggctgtgacctggctatccttgcttcagcctcttgagtgctgggattatagttttatgttaccacaccagctctttgtatgttatgttgtttttttttttttttcttttttgcttttgtggtactgggatttgaacctacagtctggtacatgccaggcaagtgtttttccactactgagttacaacctagtagttgataatgtttctaagtttcatttggggctaaagagatggttcagttgtaaagtactttacttcacaggcatgaagaccaaagtttcagaacccacaaagaaaagccagttaagtgccacaaacctgtaatctcattagagatgagccaggagcccgctggccagccagtctagccaaattggtgaactccaggttcagtgagaggaatcctaatgttggtttctggcctccacagtaactcaaatgtatgcacgtgcatgttccctctccctctccctctccctctccctctccctctnnnnnnnnnnnnnnnnnnnnnnnnnnnnnnnnnnnnnnnnnnnnnnnnnnnnnnnnnnnnnnnnnnnnnnnnnnnnnnnnnnnnnnnnnnnnnnnnnnnnnnnnnnnnnnnnnnnnnnnnnnnnnnnnnnnnnnnnnnnnnnnnnnnnnnnnnnnnnnnnnnnnnnnnnnnnnnnnnnnnnnnnnnnnnnnnnnnnnnnnnnnnnnnnnnnnnnnnntgtgtgtgtgtgtgtgtgtgtgtgtgtgtgtgtgtgtgtgtgtgtgtgtatgtgcaccacattcatgcgtggtgcccacagaggtcagaaaagggtattgaatcacctgggactggagttctgaatggttgtgaaccaccttgttggggctgggactcaaacctaggtcctccaccaggtcaataagttctctttgcctctgaaccagctctctactcccctttatgtaattttctaaacaatgtattttacatttatgggcaatttgttagcatgtatgtctgtgtacctagagtgcgcctggtgtctttgggggtcagaacagggcgtcagattccctggaactagtgttacaaatggtagtgagctgtaatgttggtgctggggatcaaacctgtgtccactagaagaatagaaagtgctcttagccaccgtgttatctctttagctttgattttctaccttaaaaataaattttataataaattaaaatattgtgttatgtgaccatacccgtttttattttgttgtgataagcacacctgacatcttctctctgaatggactggttgtctatgtgctttgagacaggatctaactgcatagcccaggctggtcttgacctctgcatgctctccgatttctctggtgaataatatagtatagggggagtgctgcactgcagatctcagcctctcatcctccacacagaaagctaatcagataggatctgctcatttccttacacatggcagctgtactgctgtactgtggctgggcttatgtagtactgtccttcagtaagtggctattttacttagcagaatgtcttcagggttcgcctgtgttgcttgccgtaggactgccgtccttttaaaggctaatgtgccgtttcgtgtatgtaccactgtacagtacaggagctctcatttcttgcccccccccccacccatatcacacttcatttctgccttactattaggtcaggctgccctcatactctcagtgatcctactgcctcagcttctggagcactgggattacaggcatgcaccaccatgcctggccccacatcttcctttcctctgcttcagactctaaccacaaatagggaactccaatattcctcgcaactatcaaacccggctgcaaaccagatttgcatgatagggctttcttttgttttgttttttgagtagttcagtaatttgctaaggtaactcatagacctcagggaaaaccagacatctgctttctaggttctagtttgtttttaaaagggtacctttcaggaaagtggaagaactaacatagtgcaagggatgtgggaagaggtggagccttcataccccaactcgggaattcttcaagcctgtccttttcagggtttgtgcaggctttattgcttaagtgtggttgagtatatcattgtcactggtgactaagtcactcttcaccagtctccccccttggtagcaagagtgtactgatgtacaagtggttgaagtcaagagtatacatactttattttactgtagaatgctaatgttaaatggctactcttccatcactgtactgatctcttgctgcttcacatccttgctaatttatatacacatatctgtatattatatatacaaatattttaaaaatttttttggaggtgggggtctcatatagccagaggcagccttgactcttgcaagtacaggaggtatggacatgcaccactatgcccaactccttcattgttgtttgcatttcactgtgagggtacaatggtcaaggggaaaaaaacaaacaaacaaacaaacagagaaaattacgcccatctctttgttttttgttttgtttttttgtgacagggtttctctgtatagccttggctgtcctggacctcattttgtagaccaggctggcctcgaactcagaaatccacctgcctctgcctccggagtgctgggattaaaggtgtgcgccaccacacccggcccttctttgtttttgtttgtttgtttgtttgtttgtttgtttgtttttaagattgattgattgattgattgattatatgtaagtacactgtagctgtcttcagatgcaccagaagagggcatcagatctcattacagatggttgtgagccaccatgtggtggctgggatttgaacttcagaccttcggaagagcattcgggtgctcttacccactgagccatctcaccagcccccttctttgtttttttgatagaaggtcttactctatagcccaggctggcttgtcactcattatgggccaacaatcttcctaccttagcctcctaagtgctggggttacaggaatgtgccactatgcccagcttagaaggtgccattgttaattttgtttaagaaatctcttgaaggttttaaagttatttctgtaattatatcctagagactttattatttgtctttcatacttaggtgtttggttttttctttcatttagatgagttttacaaatttttagattttaattagtgtgtgtgtgtgaactcgcacatgcactgcaaatagggtattctatgtcctaggctttcctcaaattcgccagatagtcaagaataactgaactttttatcttcctgccttactttccaagtcctgaggtaggtgtgcactccattcaatagtggttgaacactgggctttgtgcatgctaggcaagcattctaccagcagagctacacccccagtgtcggtataaatagctcctgcctgaggaagctccaggtctaacaccaggaatcagaatgactgttctcacctagtgctcaacagtatcatcactatagatcatggatgggtttatgcttgtttgagccagagttttattgtgtagctattgtttttatgtctttctgtatcttgcagagcaaatctcacctagtattgtttttcatgactctgttggctgttttgctattttatatctattataattttacatccagggtgttgatgcaagtgcttgtcattcctaagcctgacatcctgagtttgggttcccagacccacaaaaccagatgcagtggtgcaagtgtcccacttcccagtgcaatcccgagaagtgggaggtggaaacaggagagtctctagaagcttgtaagccaactagccaacactgtggtggagaaaacctgtctcaagcaaggtggaaaggccaggtgccagtaactggggattgttctctacctccacacacatcccacattgatgcagcccagtgtgcacacagatccactatcaagttcccccagaaaaagaaaacagaattttgattggaattttattgtcatagatcagtttgcgatcttggcatcttgagaatattgcttccctatcacaaatgtggctcatttgtcccttatttaattttgtaaaaattacttaatagtttcttgaatatatgtggccatagtttgtcagatatttttggagggtacttaaatgttgataccactgaaatcgagtttttgttctttattttctagttgtccatcagtgacacataaaaaggatgttttgtgctgatgtcttttctagcagtctttcataaaactgctgtaccaaattactacaacttggttgcttaaatgacagctttgtcttacagttcagtacttcagaagtctggatgggcttacctggaataaggactaagttcagtacttcagaagtctggatgggcttacctggaataaggactaagttcagtacttcagaagtctggatgggcttacctggaataaggactaagttcagtacttcagaagtctggatgggcttacctggaataaggactaagttcagtactttagaagtctggatgggcttacctggaataaggactaagggcttttcagagcttcgtttgttcataccggctctagggaaaacatgctcattgcccttgtcagctgcttacaggtgaccatatccctgacttgagatttctttcattatcaaagccaacaatcttgggtagaatccttaaggtgtcagctatctggtctgccaccagatttttctctcccacttaaaaaagacacttgtggttacattggccccacttgtacagaccaggaaagtagttttgttttgttttgctttttcttctcactttaatttttcaccctaaagaccctatttaaaaagcattttaatacttcagatatgtttggaaaacttctttttgtttgtttatttggttggtttttcgagacagggtttctctgtgtagccctggctgactggcaaacttcttaaaataagatttcaaaattaagtcttgagtttggaaatgattttgggaccagatatggtcgggcacacctttagtcctacttcctgggacgcaggggcaggaaagtgtcagtgagtttgccatcagcctggttgacatgaagagttctagaccagccacggctatgtagtgagaccccacagcttccgacaccgatcactccagttcccggggctctgatgtcctcttctgacctccatgggcatccttcacgttgtgatgtgggcaaacactcatacacataaaacaagcaaatatttttttttaaaaagaaacaagttaaaacaaaaaaagagaaacttgtgagtttataaaaccactaaccaaaatcagaacaaaaattcactaacataaatgttgttttagtcattctgtttttttgttgttgttgttgtttgtttttatttctgggtttttttggttttttttttttttttttttggtttttcgagacagggtttctctgtatagtcttggctgtcctggaactcactttgtagaccaggctggccttggactcagaaatccgcctgcctctgcctcccaagtgctgggattaaaggcgtgcgccaccacctcccggctttatttctgttttgtttttgtttttgagacaagagtttctctgtgtagccctggctgtgctagaactcactctgtagagcaggctggtctcaaactcagattcacctgcctccactcctaagtactgaggttaaaggcgagttgctaccagccagtggctattctgttttaggatgatccaccagcagtagttctccattaccacacggccagacagtcacagcttgaaaagattaaggtgtagacctctgtggctaagtagagtatggggcattattctgggttaagcgttttcacagtttaacctgaagattgttttaggtgctgcacacacaaccatacaatttgcaaatgtctatggctttgcttctctctccccaggtacctttcatttgtctgcttctccaattggctcaagttgtaaagcatgtcctctgaaagcagagcgtgggggtggggccgcaactgttgtactgagaacaaacctttctaagcgcattgtagacctgtttgttttaattacatcccttctgtcaggacagggatttccttccattcattgttttttgaccattcattgtggatggatttttatatgtttattctgtggatcttgaggaagtgaccatagtgtttgttggtttgtttgttggtttggttttgtttgctatgatctagtgtgatgagttatcttagttgattgtctaatggtgaactagccttgcagtcctaaaacagcagatctggttttatatgtagctaaacttccttcacacctacatctatgaatgagaattagcctgtgtgtttacggttgcactggattgcagtgttcactgttgggatgaaggtgttgagcaggagaagctgatctgtactttggggttgtctgtatgaaactggagtgctttattgttataaatgctcagaacactctctttttcttccctctcttctttccttccttttttttttttttttttttttaaaaagacaggggcttacgtgataattcagactgcctagaactcactgtagccaaagtggaccttaaactgagcagcagccctcattcagctgccaaggcattggccacagtgcccagcacttttagtttttgtgagacaagatctcatagacccaggttgaccctgaattctttatatagctgaggcttgccatgagttcctgctctccctacctcagtcccccaccaactctacttatttaatcttttattgaagacttgagacagtgaaatcaggtaagagaaattattcacaaggcttggaaaatagaaaaagtactactgccctcaccttcagatgatatggaatttgtctagaacacataaaaataacctaaatagctaaaacgaaaaataatttagcccagcccaatgttacatgcctatagtctgagcactcagaggtgactgcctgagaactagattcaaggtcatctgtagtgacaattttggagttttggcttctttaaaaaacacagaaatataagaatatgtttttggttttgtcccagatgtaggaaggtggggctgcttcagattgtccacatcagctgagcctgattttccttacactgtgtcgggacatgattttgccagctgcaaatagtttctgtggttgtgtgatgtttggaattctggagacatttagagggtatataaatgttagggccctgagaggtgggatgggttgttggttgttagttacagtttattaagtggtcatctacaaagaagaaacaataagaagaaattagatataaggagagtgaagctcaaacttgcctcaagtaacttgatgccccaatcagcaggaagtagcctaatgataaagttgccccccttcctgacctctgactttgtttggggatctctttcctgtcctatcttttttttttttttttcttatctagtgttagggggttgaaagggtgggaaaaagaagaacccacaaagtagcaaacacccggctgcatcattctcagctacatggtgagttggaggccaatctggactgcctgagactgtctccacagcagcacatgcagaggaagagtttagtaagacaacagtatacatttaccacacaaaccaggtgtttaacaaataagactatataaggaaggggatggtctcatagtaaaaacaaaagggttaaaatgtttaggaattctaaaacataaatgaagaaatctttaaaactcagggctaaatgttacaaaagttgcaaggtacctttcccaggatagagtaacctaacacccagagagcatagggtttacagaacttaacacacactcagtatagtttcagtaaagatagctgcaagattttctttctgatgctagaaacgatgattctaaagttcacgtagaacaaacaaaaaacaaacccatgaaaccaggtctggtgtcatatacctgtcgttccagcacctgaatctataactggtagaaagaagtaagtaatagatcacatcagagaccaatgaaatataggaaataaagcagttaagaaatagacaagaccaagagtcgtttctttgaaaagatgtgaaggtcagaggacaacttgaagttcaaggctgctgcctcttgttgatggagtatgcagcctgtatgtgctgtcctaagggaccatggagacagtgtggctgtaaatgtatctgatctaattctgtcactgacataggcttcagacatgtttgcagaccgcccttgggcacagtgaccaggttttcaagtcaatcataaccaaggtgcaggcagaataagcacatttgattaagaacacatttgattgtatgaagttcaaacttcctggctgccaaaagatccacatctcataagtttaatacagattaatttgaggatatggtaactgaaattgcttatctttagtgactttggggtcaaaatgtcaccagtggtggtgccctagacaagtggtagaccctgtactcctaagggcctccactgtgttgagtccacaccctatgttttaattagtgttttcctgctgtgcacagacaccatgaccaaagcaactcttataagaacagtgtacagggtcagaggttctgtccgttatcatctaggcaggagcatgggagagcccaggcaggcatggtgcagaaggaaacaagagttcaacatcttgttccaaaggcaaacagaaagctggcttccaggcagctgggaggagggtctcaaaacccacgcccacagtgacacacttcctccaacaaggccacacctcctcatagtgccatttcctgggccatccatattcaaaccaccataccctaccaaatcatgttcactaataaatctcacatccagttaaaaaattaatactaaaatcatcttcaagctgtaccacaaatcatatatatgttaagaggtcaacatagaatatataaagaactatagcttagcaaattagaaatatccagtttgagccgggcagtggtggtgcacacctttaatcccagcaattgggaggcagagacaggaggatttctgagttcgaggccagcctgctctacagagtgagttccaggacgccagggctgcacagagaaaccctgtcttgagaaaacaaaaacgagagagagagagagagagagagagagagagagagagagagagatcaatcgatcgatcgatccagtttgaaagggcataggtgggttgagaatttcacttagtggttacactttgaaaggcccgaggtttccttctagtaccaaaacaaagcatagcaaaggatttgaatagacattttcccagagagaatacacagtagtcagtaaacacatgaaaaagtgatcatttttgtaaatcattagagaaaagcaagtaaaaaccaggtgagataacttcatatccattagaatggctatcatattacaagaggaggaagaggaagagagagaaaaagctaaaaagtagcaagggttgctaaggatgctgaaaacttggaagccttgttaattattggtagcagagtaaaactggcattccagaggacaggagacagtagtatgacagtatgatagttgctcaaatgataaagagagatttgccatatgctccagtaaatccatttctgggatgtatccaagacagttgaaatcaagacttcaaatgtaatggttaattaatttatttaaaaacctaatttatttattttctgtgtatgattgttttgtttgaatctatgtatgtgcaccatgtacatgcctggtgccaaagtatcagatcccttgagcctgtgttatgaatggttgtgagtcaccacatgggtcttaagaatcaaagtcaagtcctctgcagagctaccagtgctcttaccagctgagccatctctttagccctgtgatagttagttgttagtcacattggattggagagagccttggatactagtaaactctgagcatgtctgtaacagtgtttcctgagatcctaagggatttggcctagaatagattaaccaggctgacctcagactcacagagatccaccagcctctgcctcctgaggggtgtgattaaaggtgtgtgctacagtgcctggcccaggaagttttttcttaattaccgtatcacttgcagtgggaagacccacttttaatctcggtttttgaggtgggaagttaaaatttaaatctgggtcacaccttttgcaagcagcctatatatataaaggacagagaaggaggaagcttctgctctttacctgcttgcttgctggcaaggtcatcccccactggcgttagagcttgcttctcaggattctggtgtgcactgaagactagctgagacatccagccttgtggactgaacaactgctgttttttttggatcttctggtggtgggtaagagccatggttggattagcctttaaatcattacataaatcccttttatatgtacatatagaccatcacatacactcccattttttatacacatatacacatatcattacagatatgtatatcattacataaacattacatacatgtatgcatatatgtgtgtacatgtatataatgtatattatataactattatatataatgtatatacatatatgttacagatatacataagtcattacataaaccctctttatatatacatatagattcattttataaattctgttcctctagagaatcctaatacagtagccaaaaagtagaagcaatccaaatgtccatcaagagataaacataagcaaaatgtaatgtgtgtgtatatgtatatgtgtgtgtgtgtacattgctcagctttaaaggagaaggaaattcttacttatgttactgagtgaaccttgaagatgttatgttcagtaaaataacagcgacaaaaaatttcacttagatgaagaatctaaaagtcagactgtagacagtacttgatgttatctaaaaggaaggcgaaattagaaggcaatgttaattaatggataagtgcctgtgttatacaattaaaacctttctgtgtttgatggtgcaacagtgcaactctcttgaacactaaacatttcatttgtttgtttatttttggtgcatggtgcacatgtgaaggccagagaaccactgttggaagttggctttctcctgccttaggtttcagaggtttagttccagttatcaggctggattagcaagtgcttttacctgctggcctatcttgcctgccccacagagcattctataatgatagtgatagcttgaagcagtaccaatcccattggccaaatgtcaaataatttgcaggtcaaaatactgttatcccttgatatgtatgagagattggttttgagacactctggatatactttaaggattatgtaaaggccatatgtaaaatggcctcatttgctggtgacaagttactgaattttgatcatattaaaatgtacatatatatatatagccttaaatatactaaacacacacacacacacacacacacacacacacacagccttatttgctggattttctgtctcctgcgtgttcagattataggtgtacgccactgtgcctagtcttgtcttgtcttgtcttgtcttgtcttctcttctcttctcttctcttctcttctcttctcttctcttctcttctcttcgtgtgtgtgtgtgtgtgtgtgtgtgtgtgtgagagagagagagagagagagagagagagagagagacagagacagagacagagagacagagagagaaactgaacccaggatccttgtacatgtttggtaactcttgcctgtaacacattattgaaacataacctatttgtaaaaggctgagaattacttgactacatttttactgtagattttttttttaatgagacaaccctatttaaaaaaaaaaaaaaacaaaaaccagtaaatgagaagagtcttgtaaaaaatgggctaagactctgataagcataactaattcaggaatacattggacagctgttttgctactttaagttacagaatgttgcaagtcttgtcctagtttcttttgctgttgctatgctgaaattccttgacaaatgtaccttcagagagaagggcgcacagtccatcatttcagggaaatcaaggcagccacagtgagaaagcagagggatgagtgtgtgcagcttcccagctctctctccactctgggtctccagcccagggaatgtcccacacagagtcaagatgtatcttcccgtttcagttgctgtaatcaatgttttctcacagacacatctacaggctcatttcccaactgatactagattctgtcaagttgataattaactctcacatcactttttctagaagataaactacacacacacacacatgcacatacatacatatgcatttaaaagaacatataataagagtcctatctaaagactctgttcagaaatcgtttgcttagtgtttggtgtcaagagagcccttgtttctagggtctcagataagctttatgggtaatgttcatgtgtgaggctcactacttttgtcccagggaaggtcacctggtaagaggctcacagagcttggctgtgttttcaggaacaacttcctaaaacctctacttttagcagaaaactagagtagacatctgactgttacttggcaccaagtatcttagaatagtcattttggcagtccacctcttgatattctgaaatagctgtcttgttacaacaaaaagaatgaaaggaacatttgacctagaaagaggaggtagtcctaattttgatagatctaaaaattatttcatttatttgaaagaaaaggatcctctactccaccccaaacagcctagtctctctatgccatgtctctgtgttaataaaaggtatatttatttatcttttatttactgacttgatttgactttaagacaatctatgtaacctagcctggaactcactgtgtaggctgtccttaaagccacagagatctacctgtctctgttcccaagttctgttgtgccaccatgcttgacttatttattttgttgttttgttttatcaagacagggtttctctgtgtggttctggctgtcctggaactccctgtgtagaccaggctggcctcaaattcagagacccacctgcctctgcctcctgagtgctgagactaaaggcatgcaccaccactacctggccatacttattaaaatatggtgtacatgtatagtgtatggtcatatgtgtgcttagtgggtaaaagtgcctgctgccaaaattgacaacttgaatttgattcccagaacacatgtggaaagagagaactgatttttacaggtgtctttggagtgccacacagaacaactaaacaaataaatactaaaaagtcaaagggatatacgatagctcagactcagcattggggggtgggggagcagaggtaagccaatctctgtgagttcaaagacatagagaccttgtctcaaaaaaaaaaaaaaataataataagggtgaaaggggagacttaaaaagtatttccctttttatcaaatgtgagtgaaagttggtctgttgtttttcctaatattcctaaaaatgttcttttctatagttctcaaaaaaattggtattcttgtttgttgctttcatttcattgaccttctttcttctttcctccttcctttctttcttcctccttcttttctttcttccttccttccttccttccttccttccttcttttctttctttcttatccactcgaagaatttagactttctttttcaattggcctaattttataagattacctcttaggactctgactgaggaggccaaggctgcagaatcttgatattaaggtcaatttgaaaaatttagtgtgcccctgtctcaaaatcaaagttttaaaagggataagaatgtagcttagtgacagagcacttacctagagtatgtgaagccctacaaaattcagtgttacaggatatttgatcactctgtgaaccccaagattgtgttgtttactggaaaaaacctgtctctagtagtggtgtggctcagccttagcacacactttaatcacaaacaatgaaggtaacatatgctagtttgtaaaaggaagcaccatatttgaaagtgatgtctgagtggcagacaaagtgatgaaacagagaaagatttgacagaataagatatgctcaactctcatgaggacagagagaaaagagaggctacttaagagagcaacacagagagaaaggaggaaggaggcagttttacccggagagttttcagaggcaggtagaagagagaacaagcaaaacatagaccatagacgaagacagaatgcaccaaagaatgagaagtagccagaagattagaacagattgctagagttagtttgaggccgagcagagcaattcagtcagaggcagagaaaggtcagattaaatcagtcagtttagctgggcgcggtggcgcacgcctttaatcccagcactcggggaggcagaggcaggcagatttctgagttcgaggccagcctggtctacagagtgagttccaggaacagccagggctacacagcaaaccctgtctcggaaaaaaaaaaatcagtcagcttggagaggattttgagtcaagtcagctgatttgaaccagacatacagagttcagaaagaacaagaaagggtgagcttattcaacagtaagtctctcaaagaatgaaaacctggctagaagtttccaggactaggcctaggttagcagaaggagacagttcttggagtcaacaattaattcaggcaaataaaagataaatttacacctcagtaccatcaaaagtaaaaaactaccccagaatatcatgacctgataggctccctctgtttctgatttcaaaatctcagtgtcaagacatagttcaaataagatgcctttaatcatttattcttttctttttggagatagggtttccctgtgtagactatgctgattttgagctcactatatagctcaggctggcctcagacatcagtgatctccctgcctcagcctccccaagtgctggaattgcaagtgtgagctgccatgcctggcttgtacttgttcagtaaagttggatgaacaagtaatggattttcttgtaaatttggacagatattatactttagtgtaatctcatattctctgtaaaactgtatagttaaatgaccactctctacctgtctctgttcccaagttttccaatttgtttgattcactacttttactttttttctttttgagactgtgcctcattcggtagcataattttcttcacacatgagctgggttccacataccctgtgtttcattactttacatatgtgtgcatatatgctctgcactcaacttagcgtttgcttactcatgttcttttaaaatatcataacttttatttttccatataaaagatatttttaaccactccccaaattgtgcttgtgattgatacctcatttgtctgaaacaaattccattggccaagcatgaaacattcataagggttctgaaatgccatactgtcatggactgaaacatactgactgtgctttattttttggcttcatactagtacttggaaaaaagaggtcactcttagagataatgaatgattcattctttagactctccgtgtgcgtgtgtgtgtatacacgtatgtaccaccctgcacatgtgacagagaacagccttgggtgtgagtctttgctccttccttgtttgagacagagtctcttcattgttgtccgctctctatcctaggcttgctgactcgcaagcttccagagattctcctatctgcttactatagaagcaccaagattacagatacacactatacatgtattttagtttcagactcaggtcctcacactgagtttacctactgagctatctccccagacctgatttattattttgaaactaataagaaaattccagttactgaattaaaaaattatgactcaatttaaatatcaccgttttcagaaatggacttctagaacagtgtagtgtgacccatctaatattattaatccttcctccaaatatgtatatggtataaaacaaaagtgtattataaaagtaaagtgataaactgggtatggtagcgtttgcctgtaatcccagcactggacacaggaagttcatgagtctgaggtcagccaaggttatatagtgagaccttgtgtattagtcaggatttatgtgtatatatgtatatatgtctctgtgtgtgtgtgtgtgtgtgtgtgtgtgtgtgtgtgtgtatggatttattagaatgacttactgactgtggtccagctaatccaacaatggctctctaaccaacagaagctccaggaaacccagtagttctcagtccataaggctggctatctcagttgatctttttagtgcacactgaaatcctgaagacatacactctaatgccagtaaaggaactgactagccagtgagagcaagtaaggaaagaataagcttcccttttcatgtcctttatataggctgccagcagaagggttagctcagattcaaggtgtattttccaacctcaaagatccagattaaaagtagcttttcccatttcaaattacttaataaaagaatctcttacaggtgtgcccagccatttgagtttcagtgaattccagatgtagccatcacaagtccatcccttacccacttgacataattatatctccttgtgtcctgcttaatttccaaatgaaaacaacaaccagatcataattacacctaacacgatataatgatcctacacacaatcacaaaattcattatatatttaaccaagttataattacacctaaaatgataaaactacttcacatacaaccacaaacacttcttactcattcttctattgccatgaagagacaccagggaggcttgcttacagtctcagaggcttagtccactatcattatagtagggaacatagcagcgcacaggcagacatggtcctggagaaggagccaagagctctacattggatcctcaggcagcaggaacctgtatcctctaacaaggcctcaccccctaatccttctaattctatcagagtcccctccctggtgatatatatgagcctgtgggagccattcttagttaaaccaccacacctcgtatcaggagaaaacaggggcccataaagtggttgagtagaagggcttcctctacaagccaaggaccaggaaagatggacacagagttgccctatgacctccatatctgtgagtgacaggtgtactactccccagtgcacacacgcacatgcacactaatagtaaattttgttttaaatccaagttgagtgggaaagaggatttataattcatctgaaataactttttaaaaactctttatagatcacagctgtctgtctttagctcagtggtttcaaggtggcttgagctgcgctttatctgggtgaaagtgaaccagtgcagcaagtgttacacagggatataaatgtgtgtggcagactgccgtggactgggggcgactggagcatggctctggctggtcagcctttgcactcgcctgtgggaggcctgtctttactggacctttagttttgcacagagaattcacgtcctggctgtcccccgggttcctagtttgctttgatcattactccctctcattccctatgtgccctccaagcctaggccaggctgtgctgattttagcatctgttgaagaaaagaggaaaacaggccattttgctattcaagtaaatctctagttaaaaaatgtgtgttttaaatgccaccagatgtaaatgttaaagcaatctgttgacaggaggaggaggaggaaggggggcagcaaaagtgtgttactctgggcacatctggaatgatgtggcggtttaagtcttttacctcctcagtaaatatgctgaatgatactaaatgcctaactccattaatggttgccctcttcctttttaggatcatggctgctgttcctctgaacaatctacaagaacaactacagcgacactcagccagaaaacttaataatcaacccagcctttcaaaaccaaaatctttgtaagtatgttcattctcatgtagaagacagctcaggtgtcatacaatggagctctcgcctttcacctctgtggagtctgggatagggtcccatgcatagcccctgctgactttgatctcactccagtccacacttgcctcacacttgccacagtcctccctcagccgtgtctgtgctcagatcaccaccacaccaggcttcctccagctctctcatttcacagaggaaatgaggagcccagtggttttccccgttgcaagttaatagtagagcctgtgctagcagagctgagtgtgattgttctagctttacacaggtcctggcacgtacttgttcagtaaagttggatggacaagtaatggattttcttgtcaatttggacagatattatgctttagtgtaacctcatattctctgtaaaactgtatagttaaatgaccactctctagttctgtgtctcctgcaagctaagccccaagttgctaagatatctaataatacactgtacttaggttgtgccctcaccagatagcaagcactgctccatgcctgcagatttaaagttacttcaacttcagtcactaatgtcagcagacagcctctgcctcatgtgtccttcagatcttagcagcttttctaaaactcctttctcccttaaacattttttttgtcacagtagcaaattccactctgagtctgtctgtctgtctctcaacacatcctgtcttttgcttctgaagggactattaaggacctccagcctgagaaataaagtgtaggagtggcctgggaactctcagtgcccagtaactagcctctgaatggaaaggattagagcgaccaaatgtttttaagtacctggtgaattttcaaaaccacagagtgagacagattcaatgctcaatacaattaacgtgacttgcacttgaaatgttttataggagaatgaatttgttaaaatggaaatgagtccatcagggcctgggattataagttatgataaaatgcttgcttagcataaatgaggccctgggttcagtcctcagcatcagaaacaaatgaattcactaactgagtttttccattatttttcagaggttttacttttaaaaagaaaacatcagagggtgatgtgtctgtcactagtgtgtccgtagtaaaaacacctgcgttaagtgataaagatgtgaacgtgtctgaggccttttcattcactgagtctccactccacaaaccaaagcagcaggcaaagattgaaggcttctttaaacatttccctggaaggcagcaaagcaaggggacctgctctgagccgtcactgccggccacggtacagactgctcaggacactttgtgcactacccccaaaacccccactgcgaagaaaccgcccgtggctgttttcaagaaattagaatttagttcttctgcagactccctcagtgactgggctgatatggatgactttgatatgtcagcatcagatgcgtttgcttcactggctaaaaatcctgccacaagagtaagcaccgctcagaaaatgaaaaagactaagagaaacttctttaaaccaccacctcgtaaagccaatgcagtaaagactgacttgactcctccctcccccgaatgcctgcaagtggatttaacgaaggaatcggaggaggaggaggaggaggaggaggaggaggcggagggggcagactgcctgagcagggatgtgatctgcattgacaatgattctgcttctgaagagctcacggagaaagacacgcaggaaagccagtctttgaaagctcacttgggagctgaaagaggtagccatcatctcatcttcgtttcagtgctttctaatctaaagctgagcactgggagcagcggtacacaggacagttgtgtccttgagggtcttactctctgctctgctgggcttagttctgtgactttagacatgaagaaggtcggtccgcagaggttgaggtggaaagggagacaagccttcccatgtgtaatgtcttagtggcttgccaccacagtgcacatgcagtcctgacggtaacacccggtcatcctgttgactgcagtcgtgtgtcacttaataacaaggatgtgttctgagaacactacatcctgaggccctgtcaggcagacatagtgcacttgcttaaccagatggcagagctgaccacacacctcggctagatggcttgcctcctgcctggaggctccaaaccacacatctgcgagtactgtagttgtctgcagtacaatgaaatacatttgtgtccacatagctctagatatataaaaggtacagtaaatataaataatgattttttttttcaaaaattttgtgtactgactgaccaaagtacacgaatggagctggcacacctagaagcttctctgagtgagtgggaagtgacgggaggctcggggtgctgctagccatttcagtatggtatccatactgcgcttagcccagagcagtctcataataaggttaccttcctcaggaattacttttagttcattgtaatttttaatcctttaattcttttaacaacacttagcttaagccatagaaagcattggttgtacagtcatgtaaaatgttttatgttatactggttagttttatgtcaacttacacaaggtaaagttatttgtgaaaagggattctcaattgaaaaaattcccccaccagactggcttgtggtacgttttcttgattgttggctgacttaagagggcccagctcactaagcagtgccacacctgggctgatggtgctgggtgctataagaaaagaagatgagcaagctaataaacagtgctcagtggcctctgcaacaattcttgcctccaggttccttccctgagtctctgttctgacttacccggagggtgaactgcgagttagacgatgagaaaccttttctcactacgttgcttttgatcatagtgttccatcaaagtagtaaaatccctaagatgcatgtacatgatacatgtgcatatatgcacacacccccaccctaccccatgtgtgtgctttatgccttcaaaggccagaagtcatcagagtccttggaattggagttacagatagttgtaagccatcgtgttgttgctgggaattcagtccaggacctctacatgagtaacaggggatcttaaagtgctaagccatctgtctagccctggtcttaaattcttgattctcctgccttagtctcctgagtgcaaaaattaaggttataagctaccacacccagttcacccttttcttttcctttgtcccttccccttcttttcttccctcacccattcccttccctcctttcttttatctttcctttcttgttttttgtttttgtttttcgagacagggtttctctgtgtagccctggctgtcctagaactaactcactttgtagatcaggctggcctcgaactcagaaatccgcctgcctctgccttccgagtgctgggattaaaggcgtgcgccaccacgcccggctttcctttttttattaatgttctttaaaaatgaacattagcttaacacacagtcaagattttgagcatcactgtcttctataatcgcgtctcttcccccaagtaggcctttggggacaagagctgaaaataattcttcatcgtctgtgcattccttttgtttgattatttgtttcctttattttactttatacgcagtggtgctctgcctgtatgtatgtctgtgtgagggtgtcagaagctctgaaattagagttacagataggtgtgagctgccatatgggctcagggaattgaacctgggacatctggaagaacaaccacttaaccactgagccatctttccagcccattgtttgttttcttttttctttttgttttttcgagatagggtttctctgtgaaattctggctgtcctggaactcactctgtagatcaggctggccttaaactcagagatctgcctgcttctgctgagacttaaaggtgtggccctctactgctggctttaaaattttttttttaatttgttcagtggccctgatctggactcaaagccttaccccctctttccttgttttttagggattgaaccgtaggccatgcacattagacaaacactatcattgaattatagtttcagccttttagttattgtttattttgtgacaggatcttaccaaattgtccacatatactttaagcttgcagtttccctaccttagtcttctgggtagctgcttcagcctccttagttgctcagagtacagatacataccacatccagagtctataaagtttttgaacatccaggtctactaaaattgctacacaatgagagatgactgaaaaaaaaatgatgaaaagtgataacaataataataacaaaaacaataataacaaccagcaaataataaaccagcaaactgttgtttaatctattatgttgctgtttctcaagagaatagtaggcagatggtaaaaagtaaaaccagagagcaccaggagatatggtggtacagctaggacagttgtgtgatagaggagattgttggtctgtatagtagcagtgtgtatgccggctgtgtgacacatctgtgatcctggcatcaagaggcggaggcaggaagatagagttaaaagtctgtctcaaaccaaacagaaagaaaacagacccaccatgtttgtgctattaggcttccctgctgcatattactcttatttaaatgtgagtagaaaacaaaagaaccgaaacaggagtttcataatttaactacagctaggttgaattccctaagcaaatccttggctctagtccagcttcagctttctaacagttgtctcacttctttgtgaagaaatcagccaacactaacctgcacaagattcccataggaagtgttctgatggtttatggcttgcccacaaaccactcactcatagggactcatgcccattctgtctcattgattattaaaataatctgtgtttatcaactgtttttctgtaggtgacagtgaaaagaagagccatgaagacgaagctgtgttccattcagttcagaacactgaatactttgaacacaatgacaatgattatgatatagattttgttccaccttctccagaagaaatcatctccactgcttcttcctcgttgaaatgttccaggtaaaaataatcaataatcaatattcttgtttgtttctaaggtgctttatgtaatgtagcttagctagagaatatcatttctatataagtattctttgtggttctgtaatttgttttgtattcaaatgaaagcatcccccccaaaaaattgttacttatttatttggttgtttaagaactattcttagttgggtttggtggctcatgcctcgagttccagcaccggggaggcagatcagacagatctgaggccagcatggtcttccaagtgacaatatgtctttcaaaaacaaaaaacaaaaaactcttactatgtacctgaagctggccttcaattcaggatcctcctgccttagtctcccaagtgccaggattacttttgggaactaccacacttgggggaggggttactacttaagttttagtaatattttaaagcctattctagagacttcaggcagatccaaatctcagcccagttatgtggagagatcactactatatcgtttagccactaacttgagagaaacatccccatagtgtatcgtctggattaggaaaaagaaggaggggttttatatgcaacctgtgcagtccttgtgctttgtgccttaacatttttattattggatttattcatttatgatgtgttttgcctgtatttatgtatgtgaaccattattatatatgcttggtgcccaagaatgtcagaatgaggtatcagatcttctggaactggatttaggagaggttgtgcaccgtcatgtgggtgctgggaatgaatcgaggtcctctgcagggacaaggtacttaacctctgcgccatctctcccgccctggtttgtgctttaacagctgtattgtgctgtttggagaagtggtgggggtcgaagtgtgattcctgttttgataaatttatggaaggtaatatgtggctaagatccatgtggtgttctttccttagcctgatgttttcatgttgactacctagctttattctttttttttttagttttgtaatagatttatttttaaagggtaaaacactcagacaatttaaatacaagttgaacagagccgctgtcaggccacgataccatcatgtgtcctctggagtcctcacagtgaggaagaaggctctgatactttattcatacacatccttcttatctgcaatgtaatctacaatttcttgtggacacattaacttctctgcatctatatcaggaatttcaaacccaaattcgtcttccatggccataataatttccacttggtccaaactgtctaagcccaggtccttcataaaataagaatttacggagagcttttctggatcaatcttatcatagagtttcaagacatacagaactcggtccttgattccgtctaacgtcagtgggggccaaggcggactgcagagccccgggtctcctccggattccctcagggcatagggtggtgctgagcggccacgccaaggccaacgtgggaagccggggcagcggcgcgaaggccgcgggcaggcggcggacacaggcgcagaggacagagacgccatggctacgcccgcctagctttattctttattaaatatgtttgctgcacaaatgatgttgtagccaccttaactagaattttaaataagagggaagaagtatttttagttccaagattctaacaaactgttttcttgtccttgtttggtttccgtcttcctctccatctgcttgatctgactgttgtaattgatacagctgtaatttcagattctttctctaacattattctccatagtgttacatttaaaaattaataattttgccaggcagtgatggacaatacacatctttagtcccaatagttaggaggcagaggcaggcagatctctgtgaatttgaggccagcctggtctacagagtaagttccagggcagccagggctatatacagagagaccctgtgtcaacaaacaaacaaaacaacaacaaaattataatttcataactttttgaattcttataccatgagtaagttcacttagtatattacttttctcattgatgtggcaaacaacttgtgggagtaaggatatattttggctcacagtttcagaggctgctggccatgctgataggagtggcatgtggggtaggagcttaggactgttactgtcacaggttggtgggtcaggaaggtcaagctaaactctcaaggtccatgcctggtggcctctatatgccatctaggccctgtgtcccaaagatttctacaacccatcaaaacagcatcaccaggtgtccaaacatattaatctttcagatccaatgcataatatttagatttttcccaattagaaatgattatttacaaggttgatactttactttccagtacagcctaatgtgactgattgtacagattgtgtgctagttagtgttctgttgctgtgaagagatactgtgaccttataaaggaaaagcatttcattcggttcagatgtttagtccattattgtcatggcaggaagcattgtggtgcacaggctgagatggtgctagagtaactgagagttctacatcctgatcagtaggcagcagagagggcacactgggtctggcttgaacatttaaaaccttaaagcccaccacccagtgaattacttccctcaacaaggccacagctactcaaagaaggtcatgcctcctaatagttccactccttatgagcctatgggagccgttttcattcaaacactacatactgtaaagttgaagtttcttgaattcattatgtaatatatgcttaagttttatgcatattttattcattattatggctcttatttgttatattttattatttatttttgagacaggatctttgaccagtttggctaggctttctatccagcaaccccttatagacccacctgtctctgtctcttgggtttgtgaagtggatataaactcagctgcttatgtttgcagtgcaaggagctaagcagtcctgccagccctgtgtttgttttttagaagagatctcaacttcaactcctttcatagccaagaatgacaagagttgacagggtctcttgggaccagaagacggaaggcttcagggtcagttaaaaagagatacaaaaatgtttcccagctagatgtggacgagaatgtaatctcagcgcttgggaggggagacaggaagagccagtctaagtaagccttggccatatagcaagttccaggccatcctgtgctacttgatccagtctcaaacaacaacaacaataaaaaacaactgtcctttatctgttacatatctatagaaaaatagtgggaggccaagtttgcatttctgttgtccagagtatgactgtggtaactgttttctcttgcagtatgttaaaggatcttgatgactctgacaaagaaaagggcattcttagcacctcagaagagcttctgtcaaaaccagaggaaatgaccacacacaagtctgatgcaggaaccagtaaagactgtgatggtatgaaaacatacttcagttacttcaagttcacacacacacacacacacacacacacacacacacacacgcatctttcaagtcttctttacaattacagtgacgtttagatcattcaactccttcgttgtatatgtcctgatttgtgggggggggctggatggccattgcctgttaaatcactccttttcgtatctttaatgctgggattaaacccagggcctctgtgctctacagcttatctgtctacccagtcgtgcctcagttctttctgattcattcatattcattctctctcttttttcctcctttccaagtatctagtataaataagccaacttttatttattcagctcctggaaacacaggagctcttttctgttctctgagtatttctgtaggttgtgagactcttgacatactcttgagacactcataaaacacatccacactctcctgcagcgcgtgtgcctgtgtgtggatagtgtcatactctcctgcagcgcgtgtgcctgtgtgtggatagtgtcatactctcctgccgcgcgtttgcctgtgtgttctctgctgtttgttctccccaagtttattttttcattttgatctctgcttttcttactggaaatgtccctgaaaatcttcctcactcttctaagagccctacagtgcaaactgttgaatcctcttttcatccccttaaggtagttgctgttatctctcattggagataaagaaaaaagggaactaaggtacaggagaattaaataattaagtagctgcagaagtaaggctgcagcagagctgggatttgaaccagcagcctggaggctcttaaatttcattctggtaaccatggtactagcctgtttctccatctctaagtttccctattacattggctccaaggataaggatgtggtcagaggccttttgtgtcatgagagacttccctcttagctgacatcatataattatgaacctttcttcaagatatttctcttcttctctatggaattacaaaagaccaggacacaggactctagaaacagcaggtctgaggcaggaaaagtgaagggatgctgtgtcagctggtagtgcagccctgcagcagaagcctgactcctgctcccacgagtgggactgcactttaactgaccctccttggaccttactgagttttgggttttttagaataggggtctcacactgttgctgaagccgcttccaccttgtgagagctgggatcataggcaggcaatactgcacctctctcaggtgttcttgtagaaaacaaagaatacctgccttgctggatagttgttagatttcaagtgtactgtaggccttcagtaaacggcagctattattatatgccagtcaagtaatctttccaagaaggagcattaagatggctattgtgtttttatgaactctccctaattccataattgtttcctcttcttagagctacaaagcagcgttttgataacatgttctagaattttgccttgagtccacacgaagattactagtttgtagcttttggcaaccaccctttcttttcccttgaaaatcagaataatggttgtctgtcgtgtctttctcttaaggccttggtcaagggttttcctgttcgtctgagtgagatgtggcccgtcagcagggaaacttgagctccttgccattgtaggcactggtgtctttctgagcctgccttggctttatgtttcttcagacgactgtgcaccctccttcccagtctgagctccttacataggaaagcaacgtgccataggaactcagctgctcacagccatgccctccacacagctctcagcagacggtcgtacttcctggctctcctgcagaccgttgtcctcacagtttttgtatgcctgttttttcctcatgtcttcctcctgccccttaaacccatcagctgtttttctttttttcttttttgagacagggtttctttatgtagccctggctgtcttggagctccgtctgaagaccagactggcctagaactcagggatcacctgtctctgcctcccaggaactaagattaaaggcgtgtgccatgcccagcccccgatggctaattccatctgtagccatgtgctctcatttttcttctctgagcacttctgtcctttcttatttccttgcctccagagaatgctgtctccctggagcccatgtaaattgacttattttccctttgtattgtaaacccttgacgctgagtgggcactttcttggcttatgttgcttccagacctcatttgtttcctatccttcatctgaaacatcaactcctttgaaattacatctcttagttgtatgggttaataaagagaggggtggagaggccagtgaggtagcacactggtagagtgcttgcctggcatttcagggctctgggttccagcctacttgatgtttacttaccgagttacttatttataactgctttgtagcccagcagatacgcatacagcagcagcttattcatgtgatggagcacatctgtaagttagttgatactgttcctactgatgaactggaagctttgaattgtgggaccgaattgcttcaacaacgaaacataaggtatcttgattatcctcctggaacataattgattgcagttccactactccaagtaacaaaatgggcaaagtgtccaggttgtctggcctagacataaggatgatagtcacatcgctaaactttaaatttatcgaattttcaaaccattcatttcatttaagattcatattcacatttttgagacagaagagggggaatttctatagtttctgttggggttaaaaatgaaggtaaactttatggctgctatagcactgatcatatttattgtgctttctttcttcaggaggaagctcctagctgaagcaggttttaatggaaatgacgtcagacttctgggttctctgtggaggcacaggcctgattcacttgataacacagtgcagggcgactcctgccctgtggggcatcctaataaagagttaaattctccataccttctctcacattccccttccactgaggaatgtttacccaccaccactccaggaaagacaggattctcagccaccccgaagaatctctttgaaaggccgttattgaattcccatttacagaagtcctttgtaagtagcaactgggctgaaacaccaaggatggaaaacaggaacgaaagcactgacttcccaggggagtgttctcaccagcaccactgtgaaagctcagagtaaacaagctgcttcaggatggaacgtagagagacacggccaggcttcctatgatatcgataactttaatattgatgactttgatgatgatgatgatgatgatgatgactgggaaaacataatgcacaattttccagccagcaaatcttccacagccacctacccacccatcaagggaaggtgggccagttaaatctctctcagaaaggatttcttcagccaaggcaaagtttcttccagtggtatcaaccgctcaaaatacaaacctctcagagtcaattcagaattgctctggtaagtctaaagtaaattgaatgcttagatattataggaaaacaaaactgtccaaaatagaagttgtatagcatagcagcagtcattgcctgagcgctacattgtttccatgcaaatttctactgataatatgaattacaaatcacagtttcaaaagcacgttgctcttttgtctctgtagcagctgtaggtttataaatgtgtaattataacctattgtagtaaagctctaaagtcatcccaaatgcctttgcctttaaagtaacagcttttactccctaaaacaataaagttcaagggtgccaacattttactgatttggaggtaggcaaaataaaaaggtgaatttatatactcaagatatgtatatttttagaattctggctgttgtgaagtacttcatttataagtagaaaattgtcaaatgtctcacactattaaaatgtgaagaagcataaggttgtggaatcagaaattcaatacatattaagttagtcatggtggttcacatctgtaatcccagcatgtgggaggctgaggcaggaggatggattatagagtgagaccttgtctcaaaacaaacatttcctaactgctcagtaaaggctccatgagccatgtcctgaattgggcttgggaatttttcaaagaagcaatgctggagctcacagtttagtgaggagtgaactaagctactgcagaggcctcagaatgaagcctaaattaattttaaagccttacgtcagccctataaagttatctcaaagtggttttactgaaacaagaatacatgtgcaaagttttatgaagtacaaccctccctatttttgccattgatgacttaatagctctgagtttgttcttagagtgatgctgttgacctttaaaatagccactaatggatttattttggtatgttagaatgtgtcatacttgatgtctgcaattatctttgagacagttgagtgttggagtgagaggagctgccagagcggctgtgtgagagcctcttgttctctagaaccgacgctgccccagtaagaatgcaagcgggagagacgtgagagacagtgaaggaagcatctgagaagttcaggtgacactgaggtttcagactgcggtgactgtgacaccattcacagaaagggaagtcacaaggatgagtttgatttagaaagcagttgagaaaggctattttcagactgttgaacttaaacagttgggaaatcattcaaatagacgtgtctttagggtgtgtgtagagatggcttgtcagttaagagcactagctgttctgaggagcgggcttaggtttccagcactcccaactccagttctaggggagccaacactatctttttggcctcctcaggcaccaggcaaatatgtgatacatagatatacatgcaaacaaaaccctcatacccatagaataaaaataaaataaataaaaaaatatttataaaagaaagtgaggactggagagatgactcagcagttaagagcactgactcttccaaaggtcctgagttcaaatccccgcaaccacatggtggctcacaaccacctataataagatctgatgcgctcttctggagtgtctgaagacagctgtagtgtacttatatataataataaataaatatttaaaagaaaggaagaaggaaggagagagggagggaggaaggaaggaagaaagaaagggagagagagaaagaaaggaaggaagaaaggaaggaaaggaaagaaagagaaagaaagaaaagcaagcagtgtcttacaggcagttggatgtgtgggatggaaacttaggaggatgtcagacagccagtcattctctgtatacagatgatgtttaaaatcacaggactagaaaaattccaagtaagaatatatcaagaaaccagtccaaaatatttgaaagactgccaaagttgagagcagaagtggaactaagaaagggaattcaaaactggtagggtggctggtcacaactcactgtgtgctgctcactgctgtgtcctggtgatagggcactacagcccagcatggacaaaccctaggtttgctctgcagcacagcagaactaaaacaagtagaaagggtacagttatcttgaagaccaaaggagaaatggaaggaaggatgaacaaagtgtattgtaggtactacaaaacaggaaagacttgattagacccctaggaatgtctgagactaattggaaaggcagccatgtaaacagtttaaagtgtgccgttgggtcttcaggggaaaggtaaggctaaactatgtcactgtgttcatgtactgatgatttttaaacattgattgtgttgtagataagctggcccaaaatttatcatcaaaaaatccaaaacatgaacattttcaaagtcttaattttcctcatacaaaagaaatgatgaagattttccataagaaatttggcttgcataattttagaactaatcagctagaggcgatcaatgctgcgctgcttggtgaagactgctttatcctaatgcccactggtatgtatttttagataagacttggcaggagtccattggcagatgttaagtgaaagctttttaatagaaataaaaagaacacctcacattattcttactgtgtagggacccttcagaccccaaaaccacagtaagaaagtgtgttacctcagcctctgctctgattagtggcatggtaagcttcatagttgcttaaggttgttacctcaaagctcattggattgacctgatgtagaactttttcttgggaaattttttttttctaatctaaatagcctagaagggaacagaggatggctgtgagcgaccaaggccatttctgactggtgctttgttagtgctgccgggtggttctgatcttccactacagagtggagccctggagttccagtgtagctccgcccctttcgataagggtgtgcccacggacaagccacctctctctttgtggctacgttcaggacagtaaggagtagaatgcctacttctcagatgaggatcaaaggaaaaggatgcagcatggttcgttcttagcctaggctttgaggagactggggctgtgcgttgttataaaagcctgtaagctactcagtgatttcaaatcaaacacataaggacattatctgaagccttcagttccagcgctcgggaggcacaggcagtcagatctgtaagttcgaggccagcctggtctacagagtgagttccaggacagccagggctacatagagaaaccctgtctcaaaaaaacaaagaaggatgttagctaagcagttaggctaggaagcaggttcagttcttccatgtagattttctgtgtgttgtttctcctgttagagactttagcaagtcccagttggtgctgctgatattatcacatactattgactagacatctgaatttattcaaactgatttagatttttaaaaaattattatcacataattctatatgtgatggggtgtgagggagctgcatgcacaccaaggcatatatgtgaaggtcttgtcagacttgtgcagcaatcttttttttttttttttttaaagatttatttatttattatatgtaagtacactgtagctgtcttcagacactccagaaaagggcatcagatcttgttacagatggttgtgagccaccatgtggttgctgggatttgaactccggaccttcggaagagcagtcgggtgctcttacccactgagccatctcaccagcccttgtgcggcaatctttatccagcccctcaaactggtttatattggacagcgatatcttatccacatttcagactttattaacttagtgacactgtgcctccatttcaaccctagtttggtccttgaaagctctgaccttgggaaggactttggcagtcatctaatcagaggctttcaatggctcttcccagcttcaggagttattttcaagacctttccactctgatttcaacctcttgacagatataataaaaatattccaaataaagtttcccttggacagctctttagaccattgacctcatggatttttcaggataccagggcctaggcaggctaaatgtcatgtctgagttcatgcagctggcagagcaggtctctcttctcagcatcccactatttctttgacatgtctacatacatgccaaaatgaaacttattcactatgtggaaaaggaagagtgtagtatatattttaaaaataaattgaagtcctaaaaactacctagcccagcttttgccattagtagattggtgaaattgcaaattaactagaatataatcatgtagttattttaaaatatgttcttgggagctggaggcacagctcagtagtagagcacttgcccactgtgaacggagccctgggtttgagccccagcatggggcagggcaggcagggaaagggaatgcgtacatatgtagctttcccttttatttcaaaggaataattttgataataataataatggtagtcacagacttaggattttagagaccccttatattgctggaagcaaaagtttattcagatttctctggtagactttttaaacagttctgttgagagttcatttaattcattatggcagataggtagatagccctgtgggtaatactatttaatgccctgaaaattattttaaatattatattggttttctttgtaacttttaccttcacactcaaattcgaaactgacatgtttttcattatttgtctcttaggaggaggtaaaagtttgtgctaccagctccctgcctgtgtttctcctggggtcacaattgtcatttctcccttgagatcactaatagtagatcaagtccaaaagctgacttcctttgatgtaagttattacataaaactattaataaaaatgcaccttagaaacacatgccagtatgctaggaaatcttattaactattgtttaaattattaaaataattattctgggtatatagcttcatggcagagtgtttgcctaacatactgcaaaaaataaattaattaattaattaattaattaaataaagcatacagttaaattaagctgtagagttaagtacatgtgttaaaacattgtgattcaaatagccatctgtaattcaaagaatgtattttattaagaactcttagcctacattttcctgatgtgggttttggggtggtttgtttgttttactactataaagggatttctttttttggctagtgatcatcatagttctctttcctatgcacatgtgtgtgcctgtacacctgtctttttcctcattgctgagttgaggaattatgactgctgcactctataaggttaatcattgcaaagagttggctacagggttacgaatcataccatctcagtgtgacagctggtttgacttttcttctaaagaatgtcattgcagtgttgataaccattgcccagctgttcaccttgttctaaccaacagttaccatcacagcaatgagacctgtaaacgtagccaggccgaccattgtggtgcagacctttaagcctcagcactttcagaggcaaaaagaggttcctctctgtcagttagaagcaagcctggcatacaagcaaatttggggccagctccagttacacacacagacaacatggtcttttttacagatagaggagatgaaacatagaaaatggaacagtggagagccttttgtagtttttcttgacacagaagcatcttgccatagcacaggctagcttcagatttgccggatggcaaggctgccttgaattcctaaacctcctttctcatcctcctgccagctaggattcctcatatgtatgccaccacacctaagtgggaaagctattttgagttgcatttaatgttaatttttaaaaatatgtgtactagctagatgtgacacatgcctataattaccagtactttagaagctgagggtacaggagggtcacaagtttgagactcaaaagtgaaactcttgactcagaaaacaaaacttaaaaataaaaatggtgcattgattgttatggtgaggtatttgtttcttttggaaagtgtgatatatgacttataaaatatgaaacctaagcacgatcatatctgattaatgtataaataaaatgaaatttaaattattactcttaacttagattccagctacatatctgacaggggataagactgactcagaagctgcaaatatttacctccaattatccaaaaaagacccaatcatcaagcttttgtatgttactccagagaaggttcgtatttatctcactctcttcagtgtaatattgcaacgcactcaaatacatatatttgaagaatttggtgataatttttatatacattaatgaattcttgtataaccttcactccagaccacagatggtaaagtcttctctgcctcctgtgttgtttgttctttctccagtttgttgtgaaacacttaattgacagtgagttgcagatctgccattttacctctcctttacctcactctgcatttcctgactgtatagcactcccttaggaaccactgtaatttacccgtcaggaaatgtacagtgacacatactgttacttaagccattaacctttcagtaatgacctttgtaaaaaagggaaaaaaagaaaacccctatttcatctcctatctaaacagtttcattattttgacattttgaagcataagggccagttttggggactgtgcctcaatttgaatttgccttgtttcctgctgattaaatccctattcctcacgttggcagggatgccacagatgtgctgtgtgctatcagaagacagttggcagtgactcatcccattaccagtggtggtcactggccaatcactcgatcaaaatagcattgccaggctgctgctcgctgggcttaacgtttccttccccttccagctgcctagtgagcagttgctctgttgtaggaggtctcagactgtacagacaccgtggcagacatcagagcctccccacaagctttagcatcgttgatgatttgtttcttattattactatgatgagtgccaggttgagtttactgatacaatccatcctggctttatgaaagccttgcctgatgctgcgtatttatcagtgtgaacttgtgggttctttattagtttagtaaattataatcattttcactatgtattttgatgttctaattgcctatgttcaaccagtgaggacgcttcatcaacctgacttctgtgtcttatgtccctgttaagatatgcttgttattggcacatagctatctatatgtgtaatacatagagttcttccccaatagtatgcacataccaaacacacatctaaactcccgttatcaggctggcggttgctcatggggaatgtgcctaaggacctagaaccaaccaccttaactctgaattcacgcatatacatcattgtgtgcacagacccaccctacacatgcacaaacacaaaatgaatacatgtaaaaaaatgtaagtcctgtaaccagagtaaacatgtggtaactctcagagctactagcctgataagtaaagctgttggatgtggatgagggcattgaagtgtctggattgccctttgcttttctgctctcttcacagactgaggacagaatcactcgtgtgtgagtagttctaacagggagtgacgatattcattcagatgtgtttacatctctcgtgtatctctattctaggtctgtgcaagtaacaggctgatttctactctggagaatctgtatgagcggaagctcttggcacgttttgtcattgatgaagcgcattgtgtgagtcaggtaagtttctcttgggatatcagtgtgtttataccaccagtagtgctcagagccacagcactgaagaacaacccacagtggctgactgatcactctgctgcttcactggagaataaagtgcatcttatatatcgacccgagagatacaaataacctgaaagcaacattttttttccaattagtggggtcatgattttcgtcaagattacaaaaggatgaatatgcttcgccagaagtttccttctgttccagtgatggccctcacggccacagcgaaccccagggtccagaaggacatcctcactcagctgaagatcctcagacctcaggtgtaagtcggtgaaggttgtgggttccattttctgattctgtacattagcatcacctgtagggctttatcaagccaagtgtccagatgtgcccaaggacagctaaatcagaatatttgaaattggaagaattttttttttttttaattctcagtgcagtaaaatttgggaacaaaatctgggtttttttctttacttaataaaagaacaactctagagcactctagacggcagcacacataaaggcgcctgcagccagggctgaccgcctgaggtcagcccctggtatctttgagagagagagaactggcaccttctgcctgttgcccaagcaagccctgataaacaagcaaataaatagaaacaaaaggaaaatcatcccaccctctgctttagaagtgagataaatcaaattcggtcctgggtaaccctgttgtaatccttttaacagattacattttgcgtatcttactttggcttccacactccacgtgccttcatggaatgagcaggtaaccctgctttctcatcttaaagtctctagtccatgcacgatttgagagcagtctagaaccctcttagcacagcactttcacttgaatttcatctcagcacgtgcatcttgctacctccaaatccataactaattggtaacaaaggcactaaaaatatttgcctatatacatttaggtggtgctaggctgttgtacctccacctgagtttgtccatgctttctgtgttgttaatttgctcagcagatacttaacatgtttgtacagtgagtttttttctgaggttcagggagattgcctaagggagtaaaggctgaacagaatattgaggtgaatttgtataaatttaatgacttatttttattttatgtatatgagtgtttatctgggcaccacatgtgtccctgggacccacaaaagcccgaagacatcggatccctgttgatctgacttttatataccattaatgaccatacttgaatgcaagaattattgagttttcagaatttttttgtgtataatcacaaatttggaatggaatgttttaatttaatgccacttgtagtgaggaatatttatgtaaatttggggtgagagaatacattttgttctcatattatgtgcgctaatactatatttaagattaatgttatactttaggttctaataaatactgaatgctagaaatttgtttctagaaatgctatgcttcctataaaatgttgtatttcgattcttctatctgcacccctcatggtttttattgagatggggtacagagtcttagagtcttgctatgaagccccagttggcttgaacttagaatttagactaggctgtccttgaactcttggcaatctgcctgcctcatcttcccaaattgctgtgattacagataaatcccaccatgccggattctgtatattctctctgtctactgtgtgtgtgtgtgtgtgtgtgtgtgtgtgtgtgtgtgtgtgtgtgtgttcatgtaggtacttaggtttgtacctgcatgactttgaaagccagaaatcaacctgtcaacctcaggaattgttccttaggagacagccaaccttggttggtttttggaggcaggatttcattgttgtggatggagttcaccatgttgactaaactggctggccagaaagatccaggcatccacctgtttctacaatccagtgctgggattacacgtggtaagcaaatgctgtaccactgagctatctgtcagttagttatattaattggcaaaagcccaccgttaaaagaaattgtgtaaattcccttacatatgaatgatgtttttgaaaatataggacttatgttttatgtttgaatgaacagtgcacatatttatctagagacagacaccttgaatatcttttcctggaactgtgggaaagtgatgtttcagagaaagcaaaattatacatatccggatgctagctagcacatggcgccttgtgcatatctgatactcataagaatggataagtgaaacatatggaaggatttggtaaatgtgtataaaatgtaagtctgctgattctttaatatatttactatttctgctttagaaagttataaatcccttagtagaagtagattttaagaagcacttcctggtagtttcctgatctttttctgctagtagtcccttacttgaattaatctgccagctgttgctgtgttgtggtgttattggagtcaggtgctcgtagctttagagcggtggctccattctcctctcctagagctctatgataatattcctcctcttaagccggcaaagataaagtctacttgggaagtacaagagtgactaaaaacacaagatttcatgctgttcttttaggaccctagcagatgagctaggtgagcgcaaagagtcaagcacacaggtttaaccgttgtacagctccagaagagctaacacccctctctctcccccgtgtgcccgctgctgcgcctggcactttatattacatttattatattacattatattacatttattatattacattttatgcattcagcctcacaaaagccttaacatgatgtataatcctccatttcctcactctctagataaagaaactgagtcacagcacacatgatggcaaatgcctgagatcccagcacttggtttttacttgtgtttctgagacagggtcttactgtgtagccctgtttagcctggagttcactgtatagactggatcgtcctctacctcagagagctccactgttcctgcctcctgggcactgagataaaggcatttgctaccacacccaacattgcaaaggcaggaaggtcagatgttcaaggccatccctactgcaagcaagttagaaagcagcccgcagtgtagtagtagtagtagtagtagtgttgtgttcgggagacatggctcactggttaagagcactggccacccctccagaggatctgggtgtgattgccagcactcacatggtagctaacaagcatctgtaactctagttttaagagatctaatgccctctggctttagaggacactatatgtgtatggtgcatagctatatatgtaggtaaaacacacacttacacataaaaatataaaaataaaatttaaaagactgacaagatggctcagtgggtaaaggtgccatcaaccctgataatctggtctcagtacccaagaccctcatggtggagtgagccagctccctcaggctgtcctcggatctctccatgcctgccatagcacaccagtccatgcttatgcacaatatccagtaagtacataaggataatttaaattttttttttaaaaggtaaaagaaatagtcacagaaaattaagtagcttgcaaagttcataaccctagcaaatataggagtgagggttttgagcccagcaatctggttgcagaaccttaaatactgctctgaaatgcaaaacagaagtcaccactaaagataattgcagactaggatggccagaaagtcagcatcctaacagagtgtagcagctaacagcatggagaggtcaggtgattttaaaaggacgcagagctcataggaggagcagcttggtagacagtttctgtggctaggctgggatttgcctttcataccacaaaactcccctattgagattgcaggattcagtgcagtgtttggtttttcatggagttatacaatcatcaccgctgtctttttaggacatcttgtctctcttgagggatctgttctccgtaccagctaatctcttttcccctctgctccagacaactattcattgactttctggcttcacagatttttgctattctggacatttcacatacaggttaattatccccagtgtttgcaaccagaagtgttttagatttgaggttcttctagattttggaatgttttcataaacataatgagttttttagggatttgacttagggctaattaaacatgaaattcgtttgtttcatatatacctcatacatacggttggaaggtatttttaacttttttgtttcatttatttaaaatatttcggggggggggagggtggctcagcagtaaagagcactgactattcttccagaggtcctaagttcaattcccagcaaccacttggtgactcacaaccatctgtaatgggatctgatgccctcttcgggtgtgtctgaagagagtgacagtgtactcacatatatacaataaatctttttaaaattattatcactatgtgtttatttaagagcatgaatgttctgtgtgtggaagccagaaagtagaaagtggaggtagaaaatggttttctgctttgtaagtccctgggattgacttcaggttgtcaggctgagtgcaaacacctgtggctgcagatgcatctggtagctttcacttactcattttgagactgttactgtatagcccaggttggcctagagctcactaggtagcctagtctttactcagatttcctggcatgcagaatactaggagttcagacatccaccatcccacccagctcaggaaggcagttttattttatttttatcttctttttcttgttttatttcgtttttgagctgggtctcatgcatgtcagactcatgtcagcctcacattctgagtagcagatgatgaccttaaactcctgctcctgtttttacctccccagttctgagatcagagacaagtcatcctatcctcctggtgtggggatcctgcccagggctttgtgcattttgggcaggcactacaccatctgagctccagctcctttccaggaggtaaattcaaacagggtttttgaatgtctgtgctcttactgccacatgtctgtcaggcaaggtcaggtgtggatttcctagtcacgtgaataatatgcttttctcccatgatccagatctttagatttatcactccggtacccaacagcaacacaaaatgtcttttgtaaacagaaatatttaaaaaaatttttttagatttgtttattttatatgtatgagtgttttgtctatgtgtatatatctgtgctgtgttcgtgcctcgtatctgtggaagtcagaagtgggcatcagatccccaggtgctggagttacagatgattgtaagccaccgtaccatgtaagtgctgggacagaaactgggaccactacaagaacttttaactgctgagccacctctttagccccctgaaacaacatcattttaaaactattatgtatccctttaatgtttatgcagtagaacataaatactataaatatattttatgctcactacatgaaattcacaaattacattgtaaaagtataatttggagctggagaggtggctcagtggttacaagtgcttgctgcttttctaaagaaccctagtttatttcctaatacccactttgggaagttcacagctgcatctatccagctctcggtctcatggtactttctgaccttgatgtgcccacacacaaataaataaataaatacattttaaaatgtttatcacttaggctgcaaatatttcagtatctggtgtgagcctagaatacatttaaatcctggctaagttttctggcactgaaaaaaaaatggagggagaagaaaagtgttttaagtcttacaaaatttatatacagagaatttttatttattttgagagggggtttctccttgtagccctggctatctggacctcacttatatagaccaggctggcttcaacctctcgaagatccacctgcctctgcctcctgagtgctgggattaaaggcgtgtgccaccatacacagccatgaattttatagatttttatatgtgaaatattttgcttattattatatttacctataagtaaatggtgtaaacaaataaaagttggtttttaaatctcctataccaaaattttggtccagattgaattactaaaattattagttaggggctagggagacactcaaaggcacttgctaccaagcctaatgacctgagtttgatccccagagccaaaatgttggaggaagagaactgactcccacaagttgtcctctgacctctacacatgcactgtggcatgctgcattaatgcacgcgcacacacacacacacacacacacatgcacacgtaagtagatgttcaaaataagtaaattaaatcattagtcatcattactgtaggagtttcatacatgtctatgttactttctttaaagtgcatgcttcctttagtatagctaaacagagtcttactttatgtatgtgagtacactgtagctgtcttcagacacatcaggagagggcatcagatcccattacagagggttgtgagccaccatgtggttgctggaaattgaactcaggacctggaagagcaagcagtgctctttacctctgagccatctctccagccccaaacagagtcttactatggtaccaagactagtctcgagtgcatgggctcaagctgtcttcccacctcagcttctccataactgagcttcaggaacacaccaccacatacatcttaaagacgtttcaaaggtaattttaggcacaagctttttactgaggtatctgtttacgagataagaatttttgctttgctctgtgatatcggtggcacaggcctagaatcccagcactcaggaagcaggtggagatcagtctgatctacagactaagttccaggatagccagagctacacagaaaaactctgtcttgaaaaacaaaccaaaaataatttttgtttacagttcatatatctacagatgaattgactcagtccatacattttacttttatggatgtaagcctgagaaatgttactgacataatcatgtagatggtaataagaaactttttattacagcagtaacactcaattatttgaattctttatgaagcatatgccaaaattacatcatgatctgtcatcaaaaattatttttaatgatctgtcaactgacatctcagttaggtactctaaattttgtgggaggtaaaaaattggaaagtatttgactaacaaatctgactaacgaacaatattactatttagtcgtttttctgaaccatatgctgttaaaaatttttactaggtttatccaataaatatgaagtattcttttttacttttgcaagaggaacctctacagtgtacctggtacatttgaaatatcctgacaatacattgtttaccttcctaaaagcaattgcttttatacaggttcttgctatgtgctctggctttcctggaccccactatgtataccaggctagccttgaatttagagggctccacctgctctttctcctgagcttgtgtcttcctgagcaccaacacacctgccttggtttgttgctgttgttgttgttgttgttgttgttgttgttgcttgaggcttgtagcctagggtagcctcaaattcgatatataactaaggctgcctttgagctcctgattcccctgtctctgtttccctcgtacttggaattacaggcatgtatcaatgtggcctggtaaattttccatttaaaggcaacatttaatactcctatatttagctgggtggtggtggtgcacgcctttaattccagcacttgggaggcagaggcaggtggatttctgagttcgaggccagcctggtctacaaagtgagctccaggacagccagagctataaagagaaaccctgtctcgaaaaacaaaaataaaaaaaatactcctatatttagttagaagccagtgaaatctaatttgggttgtttgtttttttgtttgtttgttttaagtacttgttgagataattcgtgtaccttaaaactcagctattcataaggtacagttgggtgtggtttttacattttatcagaacttcctccctgttttcctcttggttccttcactaagcatgtttgcaagagtcatctaggttatattataatatgtgtgtgcatatgtgtctatctgtctgtctttctgtctgtgatggtttgatgggtatcatggtctaaccagtgctaagtaaggactttaccactgagctggacgcacaacctttattctccatttttatggttgaataatattcatttgtatagctgtcccaaattatcttttcttcccttcttcttcctcctctcccttctcctcctcctccttcctcctcttcttcttcctcttcctccccttctcttccttctcctcctcctcctcttcttcctccatttcttcctcctcctcttcctccccttctgctcctcccccttctcttcctcctcctcctcctccttcttccttttttggtaggcactgtgtcttgcttggtatctggtgatccctaacaccctgttttccaacaggcattggaggacgtgttaaaagcagtaaactctggtggtctgtctactttcccaccataacaaactgtgaatgttgctccattagtgcctcagatcttctgtggtagaatgagttctttgttttagttttaattggatttgtgatctgcaagtttctgttcaaagctcatattttattctttttagtaaaggtttatttgaccaaattaaatcgtaaatagttctattttcccaattaagtcacaaatcaaacaaatttcagattatgttccagatgtttttaatatgagctttgctgaatacatccacatcatccaactcacagtgttaacatgtgacacagtagtttacagtgttagacgtcgcacaccatcaccatagtctgagaacttagccaccctctaaaactttacctgttctcgctggtgtccttcccctttcctctcctcagcccaccagacaattttctgtgcataagtttgcccacactgggtgtctcatataaacattcattctatgtgtgtatgactccttcttatctcgtgtgtgtgtgtgtgtgtgtgtgtgtgtgtgtgtctactctagggcaagcacgtggaagtcagaaaacaactggatctacatgtggatcctgggaccaaatttaggtcattattagacttggcagcaaatgcttttacccactaagccatctcactgttctccttactacttggtagcaaaatattttcaagatttaatgctggaaaaaaatattccattgtgtagttttagttccttctttaactatcacctactattacgatcatttccattttgttggctgttacaaagaatgctcttataggtatttccatttctctttggtgtattgctagcagttggatcatcaggtcatgtgatagctcttcttcaccttaaaaaggttcatttatttttacttatacttatggggtgtttgtgtgccagcctgtttgtatgtgaagcacatgcattccggtgcttgtgaagtgagaagagggagttgcaggcagatgtaagctgtctgttgtaggatttttgctggagcttacatactcttaaccagccctgcttcaccctttaaagaattatcaggctgtcttccaaagagtctgcactgttttatgttcctagaatctatctgtgagggttatgactccctcaaatatatcccagtgtttgtttttgatctaaagcatttgtcattttaaatgaataaactctttaaaattaacatgtagttgacaagaagggtgaccctttagatcacaattaatctggactcccaaggtctctcaaacattggaccaccaaacagacagcatacaccagctgatatgaggcccccaacaaatatagagtagaggactgctgggtcagtgttcactcagagatgatgcatctaaccctcaagagactggaggccccagggagtttagaggttaggtggggtggagggtggggaggaagggatgggatgtggaacagtcaagggggggaataaaaaataggagtgtaaaaaattaaattaattaattaatttttaaaaaatgaaaaaaattaacatgtagtttaaagtgggaagtgggtaggcataaagccattcctacacacagtccttacagcattcctatcagcaggaagctcacagaattctgcagatttcttcatcatttatattgctaagcagttgttttagatagggtctcactagttaaccttgtctagctctgaaatccatatcttcttatctggtgggaaatgatattaaataatagtatcacaagaatcagagtcctgcatcctgtggcagtttcatctgaagtcagaacccccaaggctggaattctctgttcccagcaacactctttactgttaacaaaaataggtaaaacgactaaacacaggtagtcctgccaagggtttctggtgctgtgattgaagaaaattcacttatacccatgctataatttactttgttttgtttgctatcctggaacagtctgtggtgataacattcagaagggtggaaggtaagatttcattgtttatattagaaaggacaaggaggcatatgaagaggaaaatgcgaaaggcctgacctgcacatatgccatgagtgccccccattaataaagaaataattttaagctataggaaagaaagcgtaacagcagatatttggtagggtagtggcagaaacagaagagagtggtgaggagtaaaatgggatgtgtgactagttggtgtgagagcagagctggatgttctgagaagcctaccacagagggaaagagggaaaggagagaatatggcgccaggagaagccactaaagtgcctatggattgtagttctgtaagatcctgacacagaaggaaggaattcacagaagagtctataaggaaggcagaaggccatatagagaatgaactaaggaaacatgaagaattaatgggtgccaagagcagtcacccagaggagaaggacgcttgtgtcagagtcaccgcattccctttgcagcccagagcaaaagtacaggacccatgatctctccttttatttatttctgccatgtgtgtactgcccccttatctttttaaatatttaagttacatttatttattgtataattttctttaattgtttaaatcttttagccatgtttgtttttgtttgtgtttttgagacagagtctaactatattgccatttcttctgtgtgtgtgtgtgtgtgtgtgtttgtgtgtatgtgtgatatgctggtgtgtgcttatgccaggcgtaaacatctggtgtctttctctctcagttataattgagacagggtgtcttgaacttggagcttacccgttaggctagactatatgctaatcacctggctggccagatgagtccctaagatcctcatgtgttcacctgccgtgtcactggagcatgttgctgtacagagctcttggcatgggtggtagggatccaaattcaggccctcctgattatacagcaagcattttacccaccaagcgcccacctctgcttcttgtccacatcgcctctaagaccgtgctcttgcctggcctcgttgttttgttttaaacctacagtccagatctctgtcatctagtctgtagacattcctcttcatcaccgttggtttgtttgtttgtttgtttttgtttgtttgtttgtttgtttgtttgtttgggtttggggaggtcagtgttgggttttttttccagacagggtttctctgtgtagccctggctgtcctggaacttactctatagaccaagctggccttgaactcagagattctcctgcctctgcctcccaagtgctggatcaaaggcgtgcgccaccaccacctggcccatcaccgtttttttaaatctttaattcttaatgtaatgtccatttcagtatttcaatatgtcatctgccagggataatggtcaacataagacagcttattaatgaagtttgcatggtggaaaaaaaatcagtatttaatatttgaagatgctaccttcacttgagctgctgtaacagtatcatagactggatgactcaggcaaaagtttatttcttgtggccctggattctgaaaaaaaaaaaaaaaaaagatcaaaattccaattcatcctttgtctggtggggttcctctccctgttttatacttggtggtattcacattggagccatatgtactagggagggaagggtcagtgaggtctctgtttggatagttttatttttgatttttgatttttttctttaatattatttaattatgtctttgtatgcatacatccttgtatatgtgtgggtacccgtgaaggccagaagagaatgttgacttttttggagctagggttacaggtatctctgagatgtctaatgtgggtgttggatttcaattgccagtcctctgatagagcagtaacagccgactgtctctccagctcctccgtttttataaggaccctgacctccttagtgactctacctccccacctagttaccccccccccccgggccccacctcctaatgccatatcattggggcaagcattttgggtgaaaacattcagttgatgataatggatacaactgtattttctcatagtaattaaattttgtgtttggatcttcttttaggtttagcatgagctttaacagacacaatctgaagtactatgtattacccaagaagcccaaaaaagtagcatttgattgcctagagtggatcagaaagcatcacccttgtgagtacagttgtgtaattaattatgtttaaaagtaatagattttaaaagtcttttctgtattcactgtactacaatagaatatgtgaaattgcatgttaacattttctttttgcattatgatagtaccaacttgctaattgtagggaatattataattttgaaatctcattttgttagataacaataaatcctagcaaatatattaagtatacctcctacacgcttacattctcattcttggtgtcggtgtctttttctctggtgtatctcagtgtacgaataacacagccctgctttagtgacttctcccaagtgtgtttgcctttgccttatggtagctaaaatgagtctctgacattcgtaactgctttcatgtgacccatcttcaacgtcttcattgttttctcatggcttttgtaaatgtagaaagcaccttttaatagctataatatacttatttcatagttctttatcttaattatcctcgtatgtttgctattgagctccttttgtaccaaaacttgtactactccttgtaccattttatttcttaggttttttttcttggaaggaaactgagtcagagggtttttaccaggctcttgataatttttgccatatgtttctacaacattttttatcaaggtagctccccgttgttgaatcagcgtgagacagcccaggattcagtcctgggcaccctcacaagaacaggattacaaatccagtcttattttctgtgttcacaaattccttgcttgagctgttgtgtgatcatcctgtatcataaggatgctgtaaaggtctctttagggaccgtgtatctctaggaacatgtggaaatgtgttaatatttaagtgaaaaggcatgattcctcactactactctttgggcttcttggcagatgactcggggataatttactgcctctccaggagggaatgtgacacaatggctgacactttacagagagaaggcctggctgccctggcttaccatgcgggcctcagtgactctgccagagatgaggtgcagcacaagtggatcaaccaggacaactgccaggtgacgctcgcagaagtttgcagacctttcatgttatcagcagtctcgctgtatataatacaggctttgtttgaaatagggtcttgctatgtaattgaaaccagggctaccctcctgcttccacttcttacctggctttgctgnnnnnnnnnnnnnnnnnnnnggagggagagggaaactgggtggtggtggtgcacgcctttaatcccagcactcgggaggcagggcaaggcggctttttgagttcgaggccagccaggactacacagagaaaccatgtctcaaaaaaaaaacaaaaagaaaaagaaaaactaaaaaaaaaaaaaaaaaaaaagagggagagggaaaatgtgtgcacaccagggactatggcatgcacatgcatgtgttgtcaaaggacaacttgcaagagactgttttttcctcccaccatgtgggtctcaggtatgaaatgtatgtctcaggcttggcagctctctgagcttgttttatctgaatggtcataaacatccaagtaagctggtagtgaatccatgaggcagcgaataacttgagcatgttactcattcttaaggagacgacaggtgaagggagggctaaaatgttatttttagtaacagggaatggggattattatcctaagagtaataattgcatccaaggaagacttcagcagaatagtagacacagatgaaatagtcaaatgtattctacattaattcatgagatacctgtgccaaacacagaacagtcttcagaatcagaagggggaagactggacctgaaaagtgtcccagccattcattgtcattgtgttgaaaataacaaaggcagaaccccgtgtggtggccaattcctgcagtccccacactcaggtggctaagacaggaagttttcaagagttccaggccagcctaggctatcatgcgagactctacattaaaagaaaaaaaaggggctggagagatggttcaatggttaagagcactgactgctcttcctaaggtcctgagttcaaatcctagcaaccacatggtggctcacaaccatccgtaatgagatctgtcgtcctcttctggtacatctgaagacagctacagtgtacttagatataatagtaaataaatctttttttaaaaaaaagaaatctgtccttttacttcagttaaaataaaccaaaaaaactactttatttgattttttttttctttttttttttttggtttttttggttttttgttttttcgagacagggtttctctgtgtagccctggctgtcctcgaactcactttgtagaccagactacaaccgcctccctctgccttctgagtgctgggattaaaggcacgcgccaccacgtccagctgtaaggacagatttcaatttgtatatttaatcaaaattccaatatttttctttgaagaacttttataaaatttttctagatgaatattcaagtgaagttatgagtttggcaataaaatcaataacatgactgggtggaggtggtggtgacatgcacctctaatccaagcactttggaggcagaggcaggcagatctctgagttcaaggccagtctggtctacagaatgagttccaggacagccagggttttgaaaaacaaaacaaaaataatagcatgagtactgtttgcagtttattacatgtaaaaacaataaatgataaagtttaatatttatgagaaatggagtttgaaatgtagcttgtgcataggaccctgggttcagtcctcatcaccacctagaactgtacacgccactgtacaaccataacctcctcatcacccctaaagctgtacacgccactatatacaagccactgtacgaccgtaacctccatgctcatcgtcctcagctacatgctggctttgaggctagcctggcctgcatgagacccaatctccggggtgggggtgggggtggggggatgaaggggttgcttaatggttaaaaacatacactgctcttctaaaggacccaagtttggttcccagcacccacataggtactcacagccactgtaactgcagcacgaggagatcttataccggagttccagcatactgtgggcacacgtttgcaacacatgcacacaacatgcatttgtctgtctgactgtctgtctgtctgtctgtttgtttgttttgaaacagggtctttctatgtagtcttgactcctagaacttgccatgtagaccagcctagtctggaactcacagagatctgccttcttggcctctcaagttctgggattcaaggcatgtgccaccattgtaatttttagaggtaaaaagttactcaatcatggcattggttacctaatttaaaaagtcatattatgggctggtgagatggtttagtggttaagagcactgattgctcttctggaggttcaaatcccagcaaccacatggtggctcacaaccatccttaatgagaaacaaaaaaatcctatgagccagagcaagtgggaaggggggaaaagggggaaaaatattttacattctattttggttggttttgttagttttttgagtcagggtctcactgtgtagccatggctgtcccagaactcactctgtagaccaggctggcctcaaactcagaaatccatctgcctctgcctcctgagtgctgggattaaaggtctacaccaccactgccaaactcaatttagattcttataccaaaataaaatatacaggactggagagatggctcagtgggtaaaggagcttattccctaaagtaaccaactgagctggaccaaggacccacatggtggagggacggcatcaattcccacaagttacacttggacctcatacatgtagtgtgtgtggtacatgcacatatatgcacacacacacacacacacacacacatatacactaaataggtgtggtaaaatagagctaggtacaatatagagctaggtctagtggtatatgattataagccaggaaacgtgccatgagttccagaccagcctgatgtgtagtaaatacctgaccaatcaagggcctggaaatatgtttccatggttaaactactcactgttcaagcataaagattggagttcagatctctagaaccttatcaatggcccacctctaattatagagctggaaggtggacctgggctcacaggacaagaggtctaatcagattaactctatggatatattctgggaccctgcctcagcaaagaaggtaaagactgacaacaaagactgtacacgcacagagagggagaaaataacagccatgcatgggtgtgcatgcccatagcagcactgggagtagagacaggtagattcccagagttcactggccatccagcctagccagcttcctgatgagcaaaagacagtgtctcaagccaggaaatcaaagagtagtagaaaaagccccattgttcttctctggtctctgtatgcacaaacatgggcacccagacctacatactcacgtgcaggcactacacatgtatagcacacagggacatagacatgtgcactcatgggcatgcaccacatacatacaatacacacaatacaacgtcatctgcatacacacaatacattttattttaaatagaggttaagtgaaaagtactgattgtgattgatgttttattatttatacactcttgagcagtggaaaaactaagcttaaaaaaatacccaaaaagaaaagaattgctgacaatgtctcagaagctaagcatgtgcacatgggtaaatagatggtgaacagcagcccagattgtatcttcagcatacaaaatgggccatatgagactttttttggagatatatatatacacacacacacacacacacacacacacacacacacacgtatacatatatacacatacatatatatatatgtatgaactaggtgtagtaggcacatcttttaatctctgctcttctgtgagtttaagggccgtctggtctgcatagcaagttctaggacagccaggactacagagatagagaccctgtctcaataaaacaatttaaagtaaattaaaaaaagcaacacagaaataaagatgttagaattcacgaaatccgttttcctctagttatttaagtgttgataagtgagcatggtagcttgtgcctgtggtcccctcacttgggaagctgaggccagacgctcgtgagtttgaaaccaaactgggccgtatgagagcctgtgataaatacaaacaaaaggaagaactttcagaaatgattgggatagcctgtaccatgtgcctcacagccatgaacttacttaagtaacactggggctgagcttgcctgtgtgactctagagctactgtgggccagcatctctcttttccgcagcctttgccagctctctagcattagtctgcagtgcgctttcttttacatggaatactccccccccccttttttttcaatttaatacattggtgctttgactatacacataactatgtgaggatgtcagattgcttggaacaggagttagagagttgtaagctggcatgtgggtgctggaactgaacctatgtcctctgggagagcagcctgtgctcttaactgccaagctgtctctgcagcaagccagtcagtgcctcctgtgctgatggtatgctgatctgctgaccctgggtctcttttactcctagtggcaaaattgtgtcatttaatgtgactgaccactagatatttctttcatctttgtaatgctatttttgcaatagcaagttatgttttaagtgcttaaaaagtcaactttatttgtataatgtaattttgcctgaatatacagtattttggccttgatcaaattaagtcctagattttcaactgaaatactcttattttttttttattgtgtatttggggatgggggaaatctgcatgtgaatgcaggtgccctcagtctgaagacatgttggattttcccccaggactagagttacaggcagttgtagagctgcttacaaagcccagctcattttgtttttaatcttacatatgtgttttcgggtacccacagaagcaggaagaggtcattgcgtcacctggagtttataggcaattgtgagctgctcaccttggttctggaaactttgcttgggttctctacaagagcagtttaccctcttaacaactgctccatctcttcaggccttaaaatagatactcttgaaacaaatttgtcaagctcctaaagattgactgttgcctagctcccaccgaatgattctaattcatatggaccgagaagaacagtccttggcctttctgtttgttctgttttgttctttttttttttttttttttagatttatttatttatttatttatttatttacttatttaatgtaagtacactgtagctgtcttcagatactccagaagagggcatcagatttcattacggatggttgtgagccaccatgtggttgctgggatttgaactcgggaccttcggaagagcagtcggcactcttaaccactgagccatctcaccagcccctctgttttgttcttatggtttttgtcattttgttttctttctgtataagcaactcaggcttatctacagttaaaattgcataagtttttactttgaaatcagtggttgaataacatgagttagcatacgatcactcggttgcatcttgaagattgatggtaaatactagagcagataatatcgttgtttctgagcctgggaagaaccagcagcaattaccttagggctagagaccaccctggagcccaggctattgcttacgcaccttaacatgaatgccatggctctgtaaacaaccccaccacacatgcctgtcagggacaatcagcacagaaaggtctgcttgcagttgatgcagaatccttctgatggcgataccaagtccacagaaagatcctgccaccctgagcaggatcctctacctccttggatctgaatagaatcataggttaccaatatgaaaatctcaccttggtcatgctaagtactgttgtacacagttcttttaaattgttagttaatgcattatgagtctaataggcttctattttcatatcaggttatctgtgcgacaattgcgtttggaatgggaattgacaaacctgacgtgcgatttgtgattcatgcatctcttcctaaatctatggagggttattatcaagaatccggccgagctggaagagatggggaaatatctcactgcgtgcttttctatacatatcatgatgtgaccagactgaagagacttataatgagtaagccacataccacatcctgtctgtcatggtccatctcatgagtacagtctgcccctgctgttgtagtacttgggtcctattctcattagtcatagaaaaatgaaggcatttaatatatattgtaaagtttatttaggtttattataaagatatacattcttgtttagtgaagtcatgtgatgctgacatgtacaaagtgtgttccagactaggcaggctaaccctccagatcgtgggttcctctatacccttccagacccagtcttacgcacccttacatattacaccccttccagggaaataatgaactcttgaagaactataagaaccatccaggttagtggagagttggggagagccaggaatagaggtgtatgactgagtctcgcttgcttgaacctaggaattgaactgaatgaggctggcccaggcaacaaaatgaaaccctgtctcagaaaaaatgagaggatagtgagaaccagtcttagaggaaggaggaaaggaaaaaggacaggacgggcaataaagccaaattcccctgtgaatccatcttctactttacccttttccattagaggcaggcagcaccttgtgttcagtgttcgcctttcccaagtgcaagtgtcttagaatgtaaatgggtggtctgtgagatgtctcagtggttagatgcttgtcaccaagcctgataacctgagctcagtacccccaagagatgttttctgtccacacatatatgagctagcatatgtacatacatgcatatattggtgtgcatttgtgcacataagtaaaatgtaaatgtaattatgttatagaatcctaagctttttactgacttcacggtcatcaccgtgtgtcatcacagccttgtacagatgcctttcagcgtgggtatacttaaatatgtcaccttaatgtcaactggcttaggaggctgattttatcatgtgtgctctcttcctttttttttttttttttttttttttggtttttcgagacagggtttctctttatagccctggctgtcctggaactcactttgtagaccaggctggcctcgaactcagaaatccgcctgcctctacctccccagtgctgggattaaaggcgtgcgccaccacgcccggtgcgtgtgctcccttaaatatgttttgtaatcctatgtttttgagactctggtctcctttatgctggcacaggtactgatcatgggaaatggcactagccacagtaactcctgtgaaaaagtgagctacaaagagattttgtaacttgccctagggaacgtgaaggaccatttatgggaggaacagcctgatgcactggcatcattggtgcagtgtgggtcatcctcacttcccatgttagggcagttttttcagttgggttggttgttttgtttttgttttttaaaacaaggttgctagtttcttattgttgtttgttgggctttttgtttgtttagttggttttcttttgagatacagtctcacttggtatagcccaggttggccttgaacttgtgatcccctgcctcagtcttaagtgctggtactgcagcagtgaaccaccaagccacctcttgctgtcttaaatgctttactacctgtcagctcattttatctttaccacagttctaaatgatgagacaattgcttaccttattgtcaaggagaggatgagctggagaagtggtgaggcgcaggtccctaatctccaagttcatctaactgtaaagcctgagcgtgatctttactgcaccaaggatactcagcacaaagcaatgagttgttcatatgtggatggctggtttgtgttcttaaacagaacctggacaagcagccttccatgtatggtgccttgattgatttcagctttatgatagcttaatttgttcaattaagccatactttaaattttaaatttggtagggggaggcttgggaggaaggctctaattttttttttttaacatttatttatttatttatttaatgtacttgagtgccctgttgcttacttcagacacaccagaagagggcgtcagatcccattacagatggttgtgagccaccatgtggttgctgggaattgaactcatagcctctggaagagcagctagtggtcttaaccgctgagccatctcttcaaccccatctaaaatttattttatatgtatatgtaaatgcccgaatgtacatgtcaaccacatgtgtgcctggtgcctgtgaaaactagaagagggcatcagattccttgatagctgaatatggtctgccatgtgggccctgagaaccaaacctatatcctctacatgaacagcaagtgctttcaaccactgagctatctctccacccctatacttttatgagctagtgaaatacagtttgattttatcttgtgatgtgtggtgctggcagcctcaacttgcagtcagccgtacaatcgccagggtcagtgaccagcagtttacacctgctatgttacccagcatcttcagggacattaagtgcatgacccatgtatattttcaactcaaaacaggcttgtcaaaaatatggtcttttgccaggcagtgttggctcatgcctttaatcccagcacttgggaggcagaggcaggcgaacttctgagttccaggacagcctggtctacaaagtgagttccaggacagccagggctacacagagaaaccctgtttcaaaaaaccaaaaataaataaataaataatggtctttcataactcttaaaaaaatttgtgttattaagtctaagtattcaaatcacgataacctagcaaccatttgaaaaaataatactcagaaaatggaagtacaatagtaatttgattctttaataataatgattgcctattaatggaaagtatacaccagtggtttttattgcattttaatttatttcctgtgtgtacatgcacaggtgcatgccacagtgcatgtgtcgtggtcagagaacaacttacgtgagttggttctcgccttttaccgtataggttccaagaattaagcccaggtcatcgggcatagcagaaagcacctaccctgctcagcgcctcaccagcctcatttcttgatcttaaacttcggactcaaatagcttatgtgcactcctagcttctgttttgtgtaagcaaatgtgggggttggtagggatcaaaccagggccttgcatgtacatgctaggcaagctttgttccactgaacgacatccccaggccttggggcttttgttgggtggttgtggtagttgtttgagactagctctcaattattaagccctggctggcctagaacgcactgtgtagaccagggcctggccttaaactttcagaaatatacctgcctctgctgcctcagtgctggaattaaaggtgtgtgccaccatgcctggccagtcctgtctgtttgtttgtttgtctgttttgagacagggttctcactatgtaacccaagcttttatcagactcatgatcctcttgcctcattactgggctgggattacagacatgtaccaccagccttgtcatatttgctttacgggactacaccacagcaactttaaagttctaacttcacaagcctgtgactccaacacaaatatattatatttaatatcatgaactacctcaaatgaccagtttggacaatgtgcaacagatgagggcattgctatttcccttaaatctaggacaccctgtctctgagttcccccagaaatcccctggattcttgaccacagtttcagaagtcctagtgcactaggacttcaactatggattctgcctgcttcctctagatatccagctcagcacatctgcttagagagagagaattaactccatcattgggggtaataaaaacgtaaagaaattttcaattaaaaaaaaaataaacattttaggatgaaatagcttatgaaaatcccaatattttggagcctggggcaggaggatttcacaatttcaaggccatcttgtgagactttacctggaagaaaaagaagatgaagaggaggtggaagtacaacattcctataaaattaaacccacgagaggcgaacctgaacatctcgtaacttgcagcataaagatgtcattggcactgcattgctaacagcaatgttcttatttatgaatttactttaaatactggtttcatattcttttggttttctactataaaatttaattttgttctgctcttcatcttttttagtggaaaaagatggaaactatcatacgaaggaaactcacgtcaataatctatatagcatggtacattactgtgaaaacataacggaatgcagaagaatacagcttttagcttactttggtgaaaaaggattcaaccctgatttttgtaagaaatacccagatgtttcttgtgacaattgctgtaaaacaaaggtaattacttaagtggtgatgcaggcctttaatcccagcacttagaaggcagaggaaggtggatctctgagattaaggccagcctggtctacacagtgagttccaagacagccaaggctacattatgaaacccaatctcaaaaaaaaaaaagtaaaatagtaaaataataaataaaggtaggccggcatagtggtgcatgtttgcaacccagtgcttagggggcaggagcaagaaggtcagaaattcaccatggtcttttactctatggtgtgtttcaggccaacctggactacatgaaaccttaattcaaaaagtaacaaaaaataaaaaagtaaaaatccaacatgggcaagcatggtattttaaacttaactatagtctatatttagagatctcagtctcagaacagtagtaatagtagtagtctttttgaaaatcacttgtttaactgtaaaagcagtgagaacaccatgatgatgtcatgccagcagtccagagactgagacaggaggatagagaatgtaaggccaacccgggaccacaaagtgagatcatgtctcaaaataacaacaacatggtgtctggataagcttaatattgtcaggcctaaaataaccttggagactgttaaactcattcattacgtacttaaattatggcaatttctctctcacatacaaacaatctccccagtactggattgatcctaaatcctcaagccatactaggcaagtgaactatatactcacgccccacctctttattttatttttaaaagacgagatctttatagctggcctagttagcttcactgtcaacttggcacagcctctagtcgtctgagaagagagttagttgagggattgattgcccagatcaaattagcctgttatcatgtcccatagctgtagggtttttttattattatcattattattattattatcaatgtatatgggagggcccagcccattgtgggctgcatcattgcctgggcagatgatcctggtctataagaaagctggctgagggtctgaagataaggctcagcagttaagagcactgactgctcttcagaggacctgggtttgattcccagtacccatatggcagctcaccactgtctgtagttgcagctccaagacttctaatgccttcacacaaatacacatgcaggcaaaacagcaatgcatacaaaataaaaaataataaacatttaaaaagaaagagagagagagaaacagagaaacaaagaaagctagctagctagctacatataagctagcaagcagtgttcctccattgtttctgcttccagttcttgccctgacttccctcagtgatagaaatacctgtaaactggaataaatcctgttccccactaagttgcctttggtcagaatgttttatcacagcaacagaaatcaacctaaaatagtagcccagtctgtcctagaaatcagagtgtagcccaggcagagtgtggcccaggtagagtgtagcccaggcagagtgtggcctcaaatccacaggggtccttctgcttcagacgcccaagtattgatgctacaggcactgagccactacacctggcttacagtttcaagtcttaatatttatggtgcctcactgtttatagacttttgcacacttgctatgttatttaaactaactttagtgtgctagaaatacccagtgaagggaggcagacatgtaatacagcatactatgaagtgttacagaaatatatagagctaggcagagcagagagtgatttactctgtggaatctgtacagccattgccattatacctgctcaccctagaaatgctgctatccgttcacttatttgccacgcagttgctctgtggcaggctctgttgtaggagtttagggtacatgcaatatggacaattagggtaggtgaaggcagaagcatcatctagtaaggaggacagacactgaggaaatgcaaagaggaactaaaaggaaaagtcatggtggcagcccatgtagttaacccagtactcagagatagatctgtgagataaaactagcctggcctacacagcagggaaattacagtagcaccaaggactgaggagagacagagaatctgtgacctgcacagatggtagtgtctgtcttcctaaagactcatctcacaagggacagagtactgctcctggagctgtgaaggggaggaacttaagttcttctatgtacagtgctggtaggtcgttgaaagacacgatacatgtctgaagcaacagaaatatggctactgtagagtcctaattgtattctattctagaatgtaagagtgtgagcatttaacactcaagaggcacaggcaagtggatctctgtgagttccaggccagactgctctgcatattaagttccaagataaaactaggattattgcacagagagatcctgtctcagaaagaaagagagggggggagggagggagagaaacagagagagagacagagagagagaagaaaaaataacaaatatttgaaactgccttagttttttttagcgtggaaacgaattctaagttttaccataccattaagctccagtgacctgggtctagttatcttagttatagcagaaagtaatttttttattcataggattataaaacaaaagatgtgactgatgacgtgaaaaatattataagatttgttcaagaacacagttcatcaccaggaacaagaaatataggacctgctggaagatttactctgaacatgctggtcgacattttcttgggtaagttatttactgtgttgtttgaattatatcacttcaaattaaacatatagggctagagagatggctcagaggttaagagcactgactgctctttcagaggtcttgagttcaaatcccagcaaccacatggtggcttacaacaatctgtaacaggatctgataccctcttcttgtgtgtctgacagctacagtgtattcacatacataatataaataaataaaaaaattttaaaataataaacatctaaggaagtggttataagtgcatttaaaaagtcactaaggtgactttttacattaacaaataatgatgatgataggactggcaagacagtgaaaggcctgagtctgatcctagaacgtacataaagaaatccagacggcctgccagcacatggctttaatcccagcactcaggaggcagaggcaggcagatctctaagttcaaggccagcttggtctacagagcaggttccaggtcagccagggctacacagagaaacccaaagaatttaaggaaggaaggaggaggaaaagaagtagaggaagaggagaagttcagacatgggctgggggtggctcagtggataatgtgcttgctactacagtaagcatggggacctagggtctggatcccagcacccatgtaaaatctgcctataaccctcgtgatgggcagatcccaggagcttgccccctagccagtctagtcaaagtggagagcttcagacagaggcctaactttaacctctcctacacatctacatacactcatgcatgcatacaccacacacacaaagccagatgtgggtaacaaatgcttgaaattgcagagaaaggggcaagacttctacctccacctcctttgagacttgatgagatgctgttttgcttgtggaatttgtatattctttatcagagtgtaattgaacatacagacttaaatatttgcttaatagatacttaaataactaaaaccagagatggtatttagaaggctcagtggtagaggtcttgtgtgtgagatccttgatttagcctcactcagcactggaaaaaattccaaaagtcctcggagggccagcaagacagttcagcaagtaacgatgcctgctgcccggcctgacaacctgagttcagtccctgggtcccatgtggttgagagagagaaccaactactgcaaggttgtcctcacctccacaacgaatgctgtggcacatgtgtgtacccaatgaataaatgggtaaaaaataatttttaaaaattctgtgagatgggtatacacacctgtaactctcagcacttggaaggtggaaatgggaagatcgggagttgaagtaactttcacggcatcctgggctgcccgagaccctgtctcagaaaatataaagcacaagagaatagtataaagctatcagcagttatgtgaattctttattttttttgctagtttttctagtattattttataagctgtgaatgcaacagtttgaaataacaagtttaattttgctgtagtttttggttaacatgtgtagtaagaacaaggaaaagtaggagcaatcagggactggggtagagttcaagcccagtgcacacggtgtggacttctaccccagcactaagagaagacatggcgaccacagagccttggagctctcctcagatatgcttgtaactcagaaatgagggtagggtctgtttgtgctgtggggtttcctgtggaacagatgatctcttgtttgtccacagatgtccttgaatggctttttagcctcctgtctgaatgacgctgagcctgtattactcatctaaccttttgaaccttattagggagcaagagtgcaaaagttaagtctggaatatttggaaaggggactacatattcacgacataatgccgaaagactttttaaaaagctgattctagacaaaatcctggatgaagacttatatatcaatgccaatgaccaaccaattgcctatgtgatgctaggaacaaaagcccacagtgtgctgagtggccacttgaaggtaaggtatttaaacatgcgtcttactgtcgcacagtatctatcataatatatcataacagagtttgttatccttccaaagtcacatttcctctggagcatattaggattttaattagaaagagatcttgaaattgatccaattaatatgctgtttgtcaaaatgaatttaatagatattcaagctactaaatcttcccatattccctgaaaaagcatgtatggtctggcaagtgggtacgggtacttgctactaagcttcagatctgagttaaagctctgggacctacattgaaaaaggagagaacagacacctataaattatcctttacagatacaccatgccgtgtgtatatataaagtgcatgtacacacagaaaagagaaacgaataaataagtaagcatttatcaagaggtgctctcatgcgccaggccctggaaatagaaagagggaatgcacagccttgttctgggaaagaaatgcaagggcaggcagtgcggctccacaggtaaaggcactgccgttcaagcctggcaatcagcattctgaccccagaacccagggagaaggaaagaaccgactccgcaaagctgttctctgacctctacaccttgacacacatacaggcacgctcatgtacacacacaaagtattaataaataggattttttaaagtaaaatttaaaaagtaaattaaaaacaaactgggaaaagctttctgggtacagtgtgcctctgctcactctgctgaatgttttctttatcaccaaggtggacttcatggaaacggaaaattccagcagtattaaaaaacaaaaagctttagtggccaaagtatcccagagagaagaggtagttaagaaatgtcttggagaacttacagaggtctgcaaattgctggggaaagtctttggtgtccattacttcaatatttttaatacagccacactcaaaaagcttgcaggtaggtaggtacctgtaggccttgctcttctgacgcaggttagtggccagttcatctactaaaggatctgtgttttgtctttattgtttctcagacaagatcttttaattaatttgttgttgttgagacatggtttctctatgtcacccttcctggtctctatctcactatgtagaacaagctgaccttgaactcacagaggtctgccttcctttgcccctacctcccaagtgttgggactaaaggcgtgtgccaccatgacatgatgagacaggggcttattatttagttcaggatggctgcaaactaatcctcgagcctcaagctgcctgagtgttgggcttagaagcatgagctaagggactttgtaagtcttggtctattttaaattttggtttaatctctgggttttcaacccagagacacatttaagctctttcttgaggtaaaaatatatacggttcagatatatgctataattttaatttcatgcctttctgtaaagctgaatgctagaatgtgaataattgccttctataaagccagatgtcaagtatttgtgcggtctgccttccgtcctgatgctcagctatttccgtgcaagtgctttgcagtgagaagctaaacaggaaaggaactgctttaggcttctttgactctggatctataacactgctgtgtctttagttaagaaatatttgctgatctgagttatttgcatggactgagataacctagaatgtcggtggtaagatctctggaaagtaagttgccataattgcctctgtgtcccctgctgctgctccttcgtgaacccacatagccatctactctccctgcactcccgcccacgcagtcaccttttgttcaggccttgctttccctgcatcatcacggcagtcccggcctgggtttggtttggggttttggttttgttgtatggcactttcgtactaggaatttaaccctggaccgcacctgtgctgagcactgacttagcagggctaagcttcagccccacctaaccattctgttcaatatcagtgccttctccatgacaccagaagatgtcaacagaatactgcacatctcagggacaaaaatggaatactgttttatcgaacctaaacatcttttttaggtcatcaaaatatctgtcacttgcaagaaaactatgaaataggtcatttctcaaagacaatactttattaatgccaaatttattacctactacttggtctcaccacctgtctacttttnnnnnnnnnnnnnnnnnnnntgtgtctagcctaggagccactgaatgtatgcaagtgaatgtgggtgagtgagtgtgggaatgtgtgtggccaatgtgagatatgatgggtcatagtgtacgagtgtgtgtgagacccagtcgtgtgtgattgtgtgcatgattttccatgtaggggtgttggtatatgagaaaaaggtgtgagagagtattgtgtgaattcacatgtacagaagtgtgagagtgtggttgtgtgagggtgcatgagtgtgtcagagtacatcagtagtaagcgtgatgtgagtgtgtaagattgtgtaagtgtgaatgactgtgtgattttatgtagttctgttgagtgtgcttgttggagagactgcatatatttgagtgtgagaacgtgtgtcactgtgtatgtataaattatgtcactgtgtgtgtgtaagtgtatgagactatgtgtgtatacattgaaaagagtgtgtatgaatgtgtgttgatgtgaatttgtgtgtgaatttgagcatataaaattatctgtatgtcactgtggccgtgtgttggcttttgactgtgtgtgtgtgtgtgtgtgtgatcttatgcacctgtgaaaatttcgtgtgttagtgtgactatgatcacatgtgagcccctgtgtgagtcagagagtctgagagtgggatgtgtgagtctgtatgagtgtgattataagtgtgtgattgtgtttggtggtgtgtgtgcatgtgtgtcaatgtgaatatgtgtatatgaatatgcatgcatttgagggtatttacctgaatatggatatgaatttgtgagtgtgtatgaaggtgagtgtgtgtgtgtacacgtacactctcacacatgtgctagtgtgaatgttgaatgcttgtgtgagagatgtttgtatgtatgagtgtataagtatgtaagcatgtgagtttaagccttaacatgtgtgaatggtgtgtggctgagtgtgagtttgtgtgtgtgcaaatgtttgactgtatgagggtgtgagaatatggttgcatgcctgtgttctgagacagcctcaccatgtaacctaggctggctttgaactcacttgattctgtccccttagtgctaggattcctagagtgaatccccaaacctggtccatttcagcatctcaagacccaggtagggcaactgggtgcaaggctctgggttcagttaccagtcctcaaaactgaccaatgaggaaacatgctgggcaggccaggctgagtcctgcagttggggagccattctggaacacagagtacccacggcccagcccatggccagatgagcttgtccccaagacacaccccgtgtacgtgtggaaaccaaaaccacgatagatgtggctgggcatcttcctagtgaggaggaggctccagcccagcctgcccagcctgaatttcagcgcctgctgacagagcagactacactctctaggcttcagtctccccaacagtcaaaccaggagaaactcatttctgatctttgtgtaccttccctcatggataccggtacaccaaggcacacttttgagcagtaagaaggcacagtctgccacatggaagcatttgtgcgttaaaggggcacaagttttccttgtctctccagtgttccccctccttgctctctacaaccaccctcctcagccttgggctctctattcaacctctcggtctcttgtggttgtcaccatgggtagaaaccctactttgggatgctgatctaggtctagcgagggtccctccagatgcaaatctgaccacccagcatgggcctgatgatctgcatggcatccatctagggctctgccttcctctgggaccaccacgagaattctccatttatcctgcctgagcacgcaggagaccagattggtgtcgggcaggcacattcaacagacgcccaatatagacattcaattatcttttaattttgtttctatcttcatttgtttatttcagtttcatttaaacagagacttttcaaaagaacctgtaatttatggcatgtaggtagcatttgttcacctgcagatgtaatgagacctgggctggagcctaagctagaatcctaatactctgccatggagacactgcctgcccccagggaccccagagcctgcagtctgccttctgcgcttctctgtatgaatcctgacttctgatcttccagctttgcaatggttagcttccccttccccctccatgctctgaccttcctggaaaccccccagagtagacactccccctccacttgaggaccacaaactcccttcccttggctgcattctctgctctggtggcctccctgtaacagaggaaggataaagccacatttcaaacattaacacgcagactcttgagaggtggggacctccgttttagggttcccagaggggtctgtgagcatccgctgtgcccagcagcccacctgactcagctgacatcccctcccttaccggctccagcccatattatccaggtcggctaggagtcagtcctgcagttcttgcccagggcctttggttataagcaagtagtaaggattgggagaggggctgaaagaagagactggagaaggagaagctggtttggaagggcaaggaactcaggaaggcggccatggaaggggcctgtcttagtcagggtttctattcctgcacaaacatcatgaccaagaagtaagttggggaggaaagggtttattcggcttacacttccatgttgctgttcatcaccaaaggaagtcaggactggaactcaagcaggtcaggaagcaggagctgatgcagaggccatggagggatgttccttactggcttgcctcccctggcttgctcagcctgctttcttatagaacccaagactaccagcccagagatggtcccacccacaaggggacctccccccttgatcactaattgagaaaatgccttacagctggatctcatggaggcatttcctcaactgaagctccttcctttctctgtgataactccagcctgtgtcaagttgacacaaaactagccagtacagggcccagggaggtttggagtttgactggacctagacggctggaaagatccccaccggcaaagataaggaggcctggcctgcaggagtcaacaaagtagggcacactagactgccacatgcagaagggtaaactgaggctgttgggtggaggctcacacacataaggacctcctaaggggatcccaggaggccagcaagatgacactccagtcaagcaaggcgacctgagttcaaccctcaggatttgcacggcagaaggagaacagaatccttgggctgtcctctgatgtcacatgtgcctatgtgtatgtacccacacatgcacttgcacacacacacaaatataacaaaaaagtttagagttttcccaaggccagaaccctcagaaccaagttcctgggccttcaaattggatcgttctttcactttgcaacctgaagacaacctttaaaaagtggagcgtgtgtgttgggcatctcggcagctgaggacctgaatcctgggcacagatggaggcttacccagagcaggcctgggcccccactcttgctcagtgactttacctcccttaaaactgtgacctcagcacccacccttgagaaccagtaaaaaacctgcacatgggggagataaaaatagccaagccttgctgagctttagcaacaacatggggcttcatgcatgttgactactctacctgatgagctaattattcggtcaccctctgtctcttgccacttttcaggcaggcacagagaagtaaaggtacttgcccaaggtcacacagctggtgaatggcagatttgagtctggggtccacagtgctgatgtgggttgggggttgtgaggagtcactcctccacaggcctcttttcctatgaggttggctcatcatgaagaggaggcagggtctctaaggtctcattttgtctgggtgctaaggtcttgtatttcctggctgcttcagcaaagctagtttctcttcaacttgttgagtagaggaggagggcagaggcagccaagggcccagtcaggtggcttggccgccagcccaggcccagcgtcctcactgtttcattgcttggctggttaaaagctgacccctcagttagggccaaggccatccccatacgcctgttaactgtggctccacctgctccgggaaccaaggcaaaagctgccccaagcttccaacctaaggatttgcaaaagagaaaataaacaccctcacacacagaccaacagtgtggcttctaggcatctggtgacagttctgctcagagattccttcctctttgaatccctgttggacactccctcccaccaggggctgcaggtgactgatctgaagctcgggcccctccagtcgggaccctccctcctttcaggcaaggatccaaagaggccagctgcaaccttagccatcccctgccccattgccgactcagtggactcaaagtcacctctgctccagcaaccgctggccagatccggctagggactccctcccactccacagcaggatccaggaactggtccctattgggcaatcattaatcggattcttggcattcctctgtccctggccagcatgctccccactggagaaggagcagagggccaggactggcatttggacatgcagctgcccagcaaggtggtgctgtccgcagctgcgctgctcctggtaactgcggcttacaaactctacaagtccagacctgccccagtcgggcaggcagggagaaacaacaaggaccacaaagcagaaaatgaaacagaggccttgggacaacttgccttccaggaggctccaccggggaccctgccaaggggtcgaagacgcaggaaggccagcaagggggctgggacctcactggactacagcttggtggatccagaagacccctgcatcctggacatttccaggtctgaagaggccacaagaaaaggctctgatgaaagtcagggcaggcagtgtccagactctcagcaggtgcctcctccctgtggtggccaggaagccggaacagatgttagaggtaagcccaaccctccccacctccctcattcaggctgtgaacctacgagctcctcaggcagacttatcccaggagtgggtggcagctgtgtgggtgacaagctctctccatggccagacagcagacccccagaggaaacaggatctggggacctggaagcccccaacggttggactgatcttacactggtcaatggtgacatgaaccagagttggatcttcacccacatgacaggggtcagcaggggagaggccggggtcctccaggctgctgcagacatgggcttggccacgcagcagcaggaaggagccaccaacgcctcccatactttctcatctgtggcccggatccggatggaggagaatattatacaaaaggcagagggaccagggctgaagggcagagtatatgactatttcgtggagtccacgtcgaaggctgactccaggccagtcccctgcccagcagctctggctgatgctccatcccctgggcctggaccagagccccttgtcactggagcagcctccagagacgaagccgctaacacagccggtggtggtgcatctgaagcagcatccccacagcctgtggcatccccatctgcaccgggcttcagcagaaaggtgagcctcctgcagatcgctgagaacccagagctccaactgcagcctgaaggcttcaggatgccccttcctgcccacctggaccagagagcccaactcagctcagcctgcagccacggggagccccacgtgcagcttgtagctgggaccaatttcttccacatcccgctcaccccggcttcagctctggatgtccgcctggacctgggcaactgctatgagatgctgaccttggccaagaggcagggcctagagaccctgaaggaggcagcctacaaggtattgagtgataactaccttcaggtcctccgcagcccagacatctatgggggcctgagcggagcagagcgggagctgattctccagcgcaggttccgtggccacaagcgcctggtggtggcagacatgtgtccccaggatgatagtggccgcctctgttgctatgacaatgtgcaggatgcttggcaccctctggcccagctgcccccggaagccatgtcccggggttgtgcactctgtaccctattcaattatctgtttgtggtgtctggctgccaggaacctgggggccaaccctccaaccgcgtcttctgctacaaccccctgacggcaatctggagtgaggtgtgcccactgaaccaggctcggcctcactgccggctggtggccctggaggggcacctctatgccattggaggtgagtgtttgaatacagtggagcgttatgaccctcgcctggaccgctggacctttgccccgcctctcccaaacgatacatttgccctggcacacacagccacggtgtgcgccaatgagatctttgtcaccgggggcagcctgcgctacttgctgctccgattctcgacccaggaacagcgttggtgggccggccccaccgggggcagcaaggaccgcacggccgagatggtggctgtgaatggctttctctaccgttttgacctcaaccgcagcctgggcatcagcgtgtaccgctgcagtgccagcacccggctctggtatgagtgtgccacataccgcttaccttaccctgatgccttccagtgcgccgttgtggatgatcatatctattgtgtgggacgcaggcgcatgctctgcttcctggcggaccacatctcacccaggtttgtgtctaaggaattaaagggtttcccttctgcacggggcacccttctgcctgccgtcttgaccttgcctgtcccggatgtgcctcagacccctgtctagcagtccctcagctgggctccatcaggattcagaaaaacccctttgcctatcactctgggtaagaagcaggcaggaacatgacaggccgtggagtggaaagttctctctcctgtaccacaggctatggggccttggaggattcttgaaaagccacattacaggtctgccacaacattgaagccagagcctagcattccacgacagctggaatctcacaacttcgtgagtgactgacccagcactgtgattcaagtcagaattcctggtaggggcggtttcaggatcccacagaaatgaagggacacagtcttctcccaatcacagttccaggggccagggtacctccagaggatttctcaagctggttggttttctgtgtgctaccatagaccaccttcttaagcaatggtctcaccaattcctaagcattgaggcccactttagaagcttctagaagcacctggaacacaggtggaaagaactgaaggagggtttgggcaggagcaggaagcagctcaggatagccctgaggtttggccagcaggacaggcacagctgaagctgaaggcatccacagtaacactgtttgagagcatattgaccaaggcccacttttgttgttgttgttacctcaggttctgtgtgctggaaggagaaaggcatccatcttgacaggagttctatttgcatattaatcattgcacaattgaggtcttaggaggcagatgtggttccaggctcccttttccgggcccctgccacgcccacaaccacctgacctcaatagaccgccccccccccccccagagttcagaatcctctctgcctgggcagggcagccaccattcttcagnnnnnnnnnnnnnnnnnnnnatatttgctgatctgagttatttgcatggactgagataacttaacctagaatgtcggtggtaagatctctggaaagtaagttgccataattgcctctgtgtcccctgctgctgctccttcgtgaacccacatagccatctactctccctgcactcccgcccacgcagtcaccttttgttcaggccttgctttccctgcatcatcacggcagtcccggcctgggtttggtttggggttttggttttgttgtatggcactttcgtactaggaatttaaccctggaccgcacctgtgctgagcactgacttagcagggctaagcttcagccccacctaaccattctgttcaatatcagtgccttctccatgacaccagaagatgtcaacagaatactgcacatctcagggacaaaaatggaatactgttttatcgaacctaaacatcttttttaggtcatcaaaatatctgtcacttgcaagaaaactatgaaataggtcatttctcaaagacaatactttattaatgccaaatttattacctactacttggtctcaccacctgtctacttttacatttttgtgttactatgtcttgtgtgtgtttggggagggagtggtgtgtgtgtgtgtgcgcgtatagaaaccagaagactgagtaatatgttgttcttcaagcaccatctacttcttttttcagcaggggtcgttcactagcgcctggggctagacagcttgctaggctaactgtccagtgagccccaggatctcctgtctttacacccgaggcactggctcggcttttacacgggtgcgagcaaccagacttgggtgcctgtccctttgcagcactgtactgactcagccatctcctcaggcccagtcgtctttctgaagacattccactctgtaatgtgacctgcagcagcactaattattaatagctgtacttaaggcctcccatgctcgggaagcagtgcgtgcaggacagctgcagaacgtccagcaggattcataagatactgcttgctttccaaagtgcagaggggttttggatttttggttttggttttggttttttgagacaggatttctctttaatcccaacatgggaggcagaggcaggtgcatctctgagttggaggccagcctggtctgcagaatgaattccaggacagtcagggctctgttttacagagaaaccttgtctcaaaaaagacaaaagaaagaagttaaaacagtatgtgagttagaatccataaaaaatggtaggtttttggctattaatgtagtttcctaactggtctccttaatgtcctatgtgagcatgttgtgcttttacttttatgttttcccaggccactaacactagaacagctcactagacacaatacagagtctgtcaagggggtcatagggtctgcatctgctttcttcttccattttgtctcccactagccctcttgaacctgctctatcccatagtctatcactttcctccaagcataagagtgactggaaaggatctgaaatctaccctctgctcaaggcagagatatgggattagcaccctttcactccaaagccaacgctcttggctcagagcaaacccaagccttggtttctaccactgcatccagcttgctccattcttcctccttcagagccaataagcatccctttctactctttcccaaacagcagccagcgtgacctttgagccataagaaggtgtactgtccctgcttcacctgcatgggactaaccagatgaggactcagtcagtgtcggggcagattcagtgtagtgtgtctcttgagatggagtgtgtatgtctgcagagctagacatagaatgtcagtgttgtttacaaatacggggacatttgtcctgcagctagacaagccttggcagtggggacagtgtgctggaagcctgaacacttagcacagggcccaccctagctttccacaggcacttggctggctcccaccccctacgttgacatctgtgcctttgttgctgagactggacagtgggccctgcctcctggcctgtgtgctgcatttccaatctaacttcaccttttagaaaactccccatggatccggtcccagcaatagttggctcttaacaagcatgagtgaaatgagcagatgcacatgaattcagtggtttttccatgagtggtgatttaaattcttaattttatatccacacacagaatctttatcttctgatcctgaggttttgcttcagattgatggtgttaccgaagacaagctggaaaaatatggtgcagaagtgattccagtattacagaagtactcagaatggacattgccaggttccgtatcctccaaacctgtttacttgtgagcccctctcagaactgtgttactgttaagcagtgcgtctccctgagctggcaccaggtagttaatgcatcctacacctgttacactgaagttccaatcctaagaacagtcccagtgtgtgaggcacctctcaggtagttaggaagcccggcattaaagctgctgatggagcacaggtgggagggagcctctgtgcctgcccgagggcctacacgctgttgttttggtaaggcaaagtgagtggccaaggagtcatgatccctggcacccattccagatggactatcacctcactatgtgatcctggcaggacaccagcatccccagtgtgcttcactgttcgttctcatgtaaggaagggacatgttatctagcaagcttgtcaagataacatgttagagtagctcttacgtgctttgggaaaatggatgtgtcactggaacactcttgccattggaagaatctgactttgtgaggacatcaaagcagaggttgccagaggctgcattaggtctgtcctgtggtgcctcgttacaagccatggcactggtatagagatcactggatgagggaaactgagaaaaaggagtagtttgctgtaggggatgaaggggcacagtgtgctgtccacttacacgccagcattaagttgtcatccccagtggacctgctgtcttagtcaggtttctattgctgtgattaataccgtgatcaaaagcaacttggggagcagagggtttgtttgtattatgtatcctgagctgtagtccattgaagcaagacaagtccagggctgaagcagagactatgaaggaacactgcttactcgcttgttccctctcagcttctcagcctctgcctccatttacctcaggaccacctcaaggacagcatgaccaagggtgggctgtgttcctccttcccatcaatcaagaaaattcaagtcatgcaatgttagcacacacctttaatctcagcaatcaggaggcagaggcagatggatctctgaagtaaggctagcctggtctacagagcaagttccaggacagtcagggctgcacagagaaacccgtctcagaaaaaaacacaaaagaaaagaaaatgccctagcatccctaacaggccagtctggtgggagaactctctcagttaaagttccttctccaataactctaggcaaatgtatgttttcactcaggccaaattcctgcttgatatgccacgtgttcataacaattatgcagagaaatggcttaggagtaaaatacagtactgaattttctggtgtgtttattaagaggctgttggttaaagatgaagaacagaatttgttggtttttttatattggacttattttctcaacatgtttaaaatgataaataaaatcagctaacacttatggcagcctttacttcagttcgcaagggttagctgcacaatgtaaaataacataggcctcatgcagtaaagtgtgaactaaacctgacatctccagttgagttgaaaattatcacaaaaatctgtaagtaatgagttttgattctctctcattaaatataaattgccattgaacatacttaagcttttcaaaataaaatgtttaattcctgctgaggtgttgaatccattcagcaggaaagcagctggtattgggctccaaacccagggtcacctgtaaatgtctgcatttcctgtttgtagctgaggatggttccccaggcgccagaggcgccccagaggacactgaggaggaggaggaggaagcgcctgtatcttctcactactttgcaaatcaaactagaaatgaaagaaagagaaagaaaatgtcagccacccataagcccaagaggagaagaactagttacggtggcttcagagcaaaggggtatgtatggtctttatgtctttgtagcatccgggggacggggaggatggggtgcatatagctgctctaacagtcaatagttaatagattgatggctagcccctaaaccaaagtaaaagcaggactttggatttttaagtaatctaatttgcaaaaacttctcaaactttgactttaccttggaatttttgtttcttttgaggtaattattcttcttaaagtattttccaccaaaaacaccctgagtaaataacacggccgtgtccttcaggcttttgggagtctataagtgtttgctgcactccctctgctgcaggattctctgggtctctctgctattttttgagacagggtctcctctatcacagtctgcccttgaacttagtttaaagccaaggttgaccctgactttatactcttcctgcatccacctcccaacttctgagattacatgtgggccatcacacctggtttatgcaatgctgaggtccagcccatagcttcctacaatctaactgagcactgctagcccagcgcattccccaccctccctgctacttttaatgcccgggagactgggtctcctagtcttggcaggatagctgagaggagaccacttggggaaatccaaaggccagacaagccaagtttccttgggggctgtgtaagtggtttctgtcttctcctccctttgcttggctgcagcatgtctgcacaggagaagcgaagtcagagtggccaggtcttggcagcaggcatgttttccaccattggactgtatccaagagtccctccctccccctcttcctccttctcccctgctagatgcccatcacctcctgccctcaatccagagatggtggtccccagagaagtgtatactgtaacagaactgcttagaacaggaaccaaagctgcatggctctgagctgttgtttgcagttttccaccttttctccttctaagtgagaaaaacaagattgagtgggggaagagaaaggcagacaatgtcaccaaattgtcatttcttgttaaatccataaacagacttcttacatgtgctaaccttcctccagagtacacaattaaagacatttgtaaatggtggtttaactttgtggttttgagtgcgcaagtgaccatcagatattcctcagtgaggacattttctcatttccttcatttattcctccccttgggaagcactcatttgcttagttgctcacagagcatgagaccttaaaaagcttctggtccaacccccttgggtttaggatggggaaactggcctggcctgtgttgtgtgggagggaagggcttgcctgaggccagtctcgcctactccgtttcagaggtaggattggacactggcctggcctgacggctcagagcactttcacttctgcgagtctgtggacactccttgaaaccgtgggcgatctgacatctggcttctacttgttgggagggaagagaccaacactgttctttgctgctggctccttcacttcatttgcacagcagctgtttgtgagaaaggagctctttgccatgttgcctgtaatctgatttaataaggagtaaaactcaaatttgcacgaggcataaaggtttactgtagcactcgggagctaggaggcaggaagatcagagtgcaaggtaatctgtggttcagtgccacacatggtcatgcgtgcctcagtgtcagcagttgagaggc

SEQ ID NO: 1433 - DNA, 4498 bp, Mus musculus
cggcgcgccgagtttggatggtggttccgcccggcgcgacgtaagcctgagtgaggatcatggctgctgttcctctgaacaatctacaagaacaactacagcgacactcagccagaaaacttaataatcaacccagcctttcaaaaccaaaatctttaggttttacttttaaaaagaaaacatcagagggtgatgtgtctgtcactagtgtgtccgtagtaaaaacacctgcgttaagtgataaagatgtgaacgtgtctgaggccttttcattcactgagtctccactccacaaaccaaagcagcaggcaaagattgaaggcttctttaaacatttccctggaaggcagcaaagcaaggggacctgctctgagccgtcactgccggccacggtacagactgctcaggacactttgtgcactacccccaaaacccccactgcgaagaaactgcccgtggctgttttcaagaaattagaatttagttcttctgcagactccctcagtgactgggctgatatggatgactttgatatgtcagcatcagatgcgtttgcttcactggctaaaaatcctgccacaagagtaagcaccgctcagaaaatgaaaaagactaagagaaacttctttaaaccaccacctcgtaaagccaatgcagtaaagactgacttgactcctccctcccccgaatgcctgcaagtggatttaacgaaggaatcggaggaggaggaggaggaggaggaggaggcggagggggcggactgcctgagcagggatgtgatctgcattgacaatgattctgcttctgaagagctcacggagaaagacacgcaggaaagccagtctttgaaagctcacttgggagctgaaagaggtgacagtgaaaagaagagccatgaagacgaagctgtgttccattcagttcagaacactgaatactttgaacacaatgacaatgattatgatatagattttgttccaccttctccagaagaaatcatctccactgcttcttcctcgttgaaatgttccagtatgttaaaggatcttgatgactctgacaaagaaaagggcattcttagcacctcagaagagcttctgtcaaaaccagaggaaatgaccacacacaagtctgatgcaggaaccagtaaagactgtgatgcccagcagatacgcatacagcagcagcttattcatgtgatggagcacatctgtaagttagttgatactgttcctactgatgaactggaagctttgaattgtgggaccgaattgcttcaacaacgaaacataaggaggaagctcctagctgaagcaggttttaatggaaatgacgtcagacttctgggttctctgtggaggcacaggcctgattcacttgataacacagtgcagggcgactcctgccctgtggggcatcctaataaagagttaaattctccataccttctctcacattccccttccactgaggaatgtttacccaccaccactccaggaaagacaggattctcagccaccccgaagaatctctttgaaaggccgttattgaattcccatttacagaagtcctttgtaagtagcaactgggctgaaacaccaaggatggaaaacaggaacgaaagcactgacttcccagggagtgttctcaccagcaccactgtgaaagctcagagtaaacaagctgcttcaggatggaacgtagagagacacggccaggcttcctatgatatcgataactttaatattgatgactttgatgatgatgatgatgatgatgactgggaaaacataatgcacaattttccagccagcaaatcttccacagccacctacccacccatcaaggaaggtgggccagttaaatctctctcagaaaggatttcttcagccaaggcaaagtttcttccagtggtatcaaccgctcaaaatacaaacctctcagagtcaattcagaattgctctgataagctggcccaaaatttatcatcaaaaaatccaaaacatgaacattttcaaagtcttaattttcctcatacaaaagaaatgatgaagattttccataagaaatttggcttgcataattttagaactaatcagctagaggcgatcaatgctgcgctgcttggtgaagactgctttatcctaatgcccactggaggaggtaaaagtttgtgctaccagctccctgcctgtgtttctcctggggtcacaattgtcatttctcccttgagatcactaatagtagatcaagtccaaaagctgacttcctttgatattccagctacatatctgacaggggataagactgactcagaagctgcaaatatttacctccaattatccaaaaaagacccaatcatcaagcttttgtatgttactccagagaaggtctgtgcaagtaacaggctgatttctactctggagaatctgtatgagcggaagctcttggcacgttttgtcattgatgaagcgcattgtgtgagtcagtggggtcatgattttcgtcaagattacaaaaggatgaatatgcttcgccagaagtttccttctgttccagtgatggccctcacggccacagcgaaccccagggtccagaaggacatcctcactcagctgaagatcctcagacctcaggtgtttagcatgagctttaacagacacaatctgaagtactatgtattacccaagaagcccaaaaaagtagcatttgattgcctagagtggatcagaaagcatcacccttatgactcggggataatttactgcctctccaggagggaatgtgacacaatggctgacactttacagagagaaggcctggctgccctggcttaccatgcgggcctcagtgactctgccagagatgaggtgcagcacaagtggatcaaccaggacaactgccaggttatctgtgcgacaattgcgtttggaatgggaattgacaaacctgacgtgcgatttgtgattcatgcatctcttcctaaatctatggagggttattatcaagaatccggccgagctggaagagatggggaaatatctcactgcgtgcttttctatacatatcatgatgtgaccagactgaagagacttataatgatggaaaaagatggaaactatcatacgaaggaaactcacgtcaataatctatatagcatggtacattactgtgaaaacataacggaatgcagaagaatacagcttttagcttactttggtgaaaaaggattcaaccctgatttttgtaagaaatacccagatgtttcttgtgacaattgctgtaaaacaaaggattataaaacaaaagatgtgactgatgacgtgaaaaatattataagatttgttcaagaacacagttcatcaccaggaacaagaaatataggacctgctggaagatttactctgaacatgctggtcgacattttcttggggagcaagagtgcaaaagttaagtctggaatatttggaaaggggactacatattcacgacataatgccgaaagactttttaaaaagctgattctagacaaaatcctggatgaagacttatatatcaatgccaatgaccaaccaattgcctatgtgatgctaggaacaaaagcccacagtgtgctgagtggccacttgaaggtggacttcatggaaacggaaaattccagcagtattaaaaaacaaaaagctttagtggccaaagtatcccagagagaagaggtagttaagaaatgtcttggagaacttacagaggtctgcaaattgctggggaaagtctttggtgtccattacttcaatatttttaatacagccacactcaaaaagcttgcagaatctttatcttctgatcctgaggttttgcttcagattgatggtgttaccgaagacaagctggaaaaatatggtgcagaagtgattccagtattacagaagtactcagaatggacagtgccagctgaggatggttccccaggcgccagaggcgccccagaggacactgaggaggaggaggaggaagcgcctgtatcttctcactactttgcaaatcaaactagaaatgaaagaaagagaaagaaaatgtcagccacccataagcccaagaggagaagaactagttacggtggcttcagagcaaaggggggctctactacatgcagaaaaacgacttctaaaagtaaattctatggtgtaactggatcccgctcggcctcatgtgcttctcaggcaacatcatcagccagtagaaaactggggattatggctcctccaaagcctgtaaatagaacgttcctcaggccttcatatgccttctcctaacagttctctgcgcatagatcttgtttgtcagcatctgaccatctgtgaatagaaagctgttagtcttgttacagcatttgaagttttcacttctatctattaatatttaaatgtatctcatgtgatagttcttatttttaaataaacattttctttggtgctactgcaaaaaaaaaaaaaaaaaaaaa

SEQ ID NO: 1434 - DNA, 4251 bp, Mus musculus
atggctgctgttcctctgaacaatctacaagaacaactacagcgacactcagccagaaaacttaataatcaacccagcctttcaaaaccaaaatctttaggttttacttttaaaaagaaaacatcagagggtgatgtgtctgtcactagtgtgtccgtagtaaaaacacctgcgttaagtgataaagatgtgaacgtgtctgaggccttttcattcactgagtctccactccacaaaccaaagcagcaggcaaagattgaaggcttctttaaacatttccctggaaggcagcaaagcaaggggacctgctctgagccgtcactgccggccacggtacagactgctcaggacactttgtgcactacccccaaaacccccactgcgaagaaactgcccgtggctgttttcaagaaattagaatttagttcttctgcagactccctcagtgactgggctgatatggatgactttgatatgtcagcatcagatgcgtttgcttcactggctaaaaatcctgccacaagagtaagcaccgctcagaaaatgaaaaagactaagagaaacttctttaaaccaccacctcgtaaagccaatgcagtaaagactgacttgactcctccctcccccgaatgcctgcaagtggatttaacgaaggaatcggaggaggaggaggaggaggaggaggaggcggagggggcggactgcctgagcagggatgtgatctgcattgacaatgattctgcttctgaagagctcacggagaaagacacgcaggaaagccagtctttgaaagctcacttgggagctgaaagaggtgacagtgaaaagaagagccatgaagacgaagctgtgttccattcagttcagaacactgaatactttgaacacaatgacaatgattatgatatagattttgttccaccttctccagaagaaatcatctccactgcttcttcctcgttgaaatgttccagtatgttaaaggatcttgatgactctgacaaagaaaagggcattcttagcacctcagaagagcttctgtcaaaaccagaggaaatgaccacacacaagtctgatgcaggaaccagtaaagactgtgatgcccagcagatacgcatacagcagcagcttattcatgtgatggagcacatctgtaagttagttgatactgttcctactgatgaactggaagctttgaattgtgggaccgaattgcttcaacaacgaaacataaggaggaagctcctagctgaagcaggttttaatggaaatgacgtcagacttctgggttctctgtggaggcacaggcctgattcacttgataacacagtgcagggcgactcctgccctgtggggcatcctaataaagagttaaattctccataccttctctcacattccccttccactgaggaatgtttacccaccaccactccaggaaagacaggattctcagccaccccgaagaatctctttgaaaggccgttattgaattcccatttacagaagtcctttgtaagtagcaactgggctgaaacaccaaggatggaaaacaggaacgaaagcactgacttcccagggagtgttctcaccagcaccactgtgaaagctcagagtaaacaagctgcttcaggatggaacgtagagagacacggccaggcttcctatgatatcgataactttaatattgatgactttgatgatgatgatgatgatgatgactgggaaaacataatgcacaattttccagccagcaaatcttccacagccacctacccacccatcaaggaaggtgggccagttaaatctctctcagaaaggatttcttcagccaaggcaaagtttcttccagtggtatcaaccgctcaaaatacaaacctctcagagtcaattcagaattgctctgataagctggcccaaaatttatcatcaaaaaatccaaaacatgaacattttcaaagtcttaattttcctcatacaaaagaaatgatgaagattttccataagaaatttggcttgcataattttagaactaatcagctagaggcgatcaatgctgcgctgcttggtgaagactgctttatcctaatgcccactggaggaggtaaaagtttgtgctaccagctccctgcctgtgtttctcctggggtcacaattgtcatttctcccttgagatcactaatagtagatcaagtccaaaagctgacttcctttgatattccagctacatatctgacaggggataagactgactcagaagctgcaaatatttacctccaattatccaaaaaagacccaatcatcaagcttttgtatgttactccagagaaggtctgtgcaagtaacaggctgatttctactctggagaatctgtatgagcggaagctcttggcacgttttgtcattgatgaagcgcattgtgtgagtcagtggggtcatgattttcgtcaagattacaaaaggatgaatatgcttcgccagaagtttccttctgttccagtgatggccctcacggccacagcgaaccccagggtccagaaggacatcctcactcagctgaagatcctcagacctcaggtgtttagcatgagctttaacagacacaatctgaagtactatgtattacccaagaagcccaaaaaagtagcatttgattgcctagagtggatcagaaagcatcacccttatgactcggggataatttactgcctctccaggagggaatgtgacacaatggctgacactttacagagagaaggcctggctgccctggcttaccatgcgggcctcagtgactctgccagagatgaggtgcagcacaagtggatcaaccaggacaactgccaggttatctgtgcgacaattgcgtttggaatgggaattgacaaacctgacgtgcgatttgtgattcatgcatctcttcctaaatctatggagggttattatcaagaatccggccgagctggaagagatggggaaatatctcactgcgtgcttttctatacatatcatgatgtgaccagactgaagagacttataatgatggaaaaagatggaaactatcatacgaaggaaactcacgtcaataatctatatagcatggtacattactgtgaaaacataacggaatgcagaagaatacagcttttagcttactttggtgaaaaaggattcaaccctgatttttgtaagaaatacccagatgtttcttgtgacaattgctgtaaaacaaaggattataaaacaaaagatgtgactgatgacgtgaaaaatattataagatttgttcaagaacacagttcatcaccaggaacaagaaatataggacctgctggaagatttactctgaacatgctggtcgacattttcttggggagcaagagtgcaaaagttaagtctggaatatttggaaaggggactacatattcacgacataatgccgaaagactttttaaaaagctgattctagacaaaatcctggatgaagacttatatatcaatgccaatgaccaaccaattgcctatgtgatgctaggaacaaaagcccacagtgtgctgagtggccacttgaaggtggacttcatggaaacggaaaattccagcagtattaaaaaacaaaaagctttagtggccaaagtatcccagagagaagaggtagttaagaaatgtcttggagaacttacagaggtctgcaaattgctggggaaagtctttggtgtccattacttcaatatttttaatacagccacactcaaaaagcttgcagaatctttatcttctgatcctgaggttttgcttcagattgatggtgttaccgaagacaagctggaaaaatatggtgcagaagtgattccagtattacagaagtactcagaatggacagtgccagctgaggatggttccccaggcgccagaggcgccccagaggacactgaggaggaggaggaggaagcgcctgtatcttctcactactttgcaaatcaaactagaaatgaaagaaagagaaagaaaatgtcagccacccataagcccaagaggagaagaactagttacggtggcttcagagcaaaggggggctctactacatgcagaaaaacgacttctaaaagtaaattctatggtgtaactggatcccgctcggcctcatgtgcttctcaggcaacatcatcagccagtagaaaactggggattatggctcctccaaagcctgtaaatagaacgttcctcaggccttcatatgccttctcctaa

SEQ ID NO: 1435 - DNA, 96594 bp, Homo sapiens
aggccaggagttcaagaccagccctggcaacatagcgagaacctgtctctggaaaaacaatttttttaaattagctggacatggtggcatgtgcttgtactcccagctaaacaagaggctgaggcaggaggatcacttgagcctaggagttcaagactactgtgagccatgaatgtaccactgcactccagcctgggtgacagaatgagaccctgtctccaaaagtaataacagcaataataatgtatatttactctataccaggcattataccgagggccttacgtcacttaatcttcatactaaacttatgagacatgtattactatttctattttacaaatgtagaaaccaaaattcagaattgtaaagtgagtgtggtatttagattcaaatctggtggaagctttattttatgttacttgcaatctgtgaagaaaaaactagatccaagattctaacaggaatttatataatatgattacaaaatgagtttatttataatttaaataaacaaaattcccttttattttctacaacaaacatgctaagattatgtgagtaaacttctcggctaaatattgtattctagggagacattaaacaagaactttgtagttaacattgttctttctgttttatctttctgtacttacagacattttctttcttttttttgagacaagagtctcgctctgtcacccaggctggagtgcggtagtgcgatctccgctcactgcaaactccacctcctgggttcaagcgattcttttgcctcagcctcctgagtagctgggaatataggcatgcgccaccacacctgactaattcttgtatttttattagagatggggtttcactatgtttcccaggctggtctcgaactcctgacctcaagtgatccacctgcctcagcctcccaaagtgctgggattacaggtatgagccactgtgccctgccgactaatacttttttattgtatgccaaatactgtgtataaaataaccttaaaggtcgaagttaataatatttttctctgaatggttgactctattttctgttggcccatgtacctcaaaagaatgataattctatccaatcagaaattgagctgattttggaagagttacggctttacttagatgtggtccacctctgtttttaattatcttgagagagtgagacctgtcatgtattttttgcaggcccctcccttcagagggactccacattccaaactaagagactgcagatcttactctgcctttccagcctaggtctcgagcttagcagctcttggcccccagtctaccccagcactcagcaaatatcccatgggaaaaaaagcctcttatctaggctcctttagactctaatctgttaacaatagcctgagaggccatcaaaagttcagtgtaaaccacactcaatcttcagctttgacaaatgcacccagggagaaaaatgaccagcaatcccagttcacctagcaatgggctcttctttctctgatcccactgctctctgatgttcttatgtctttaaaaataggacttgggccaggcgcagtggctcacacctgaatcccagaactttgggaggccaaggcagttcaagaccagcctggccaacatggtgaaaccccatctctactaaaaatacaaaatttagctgggcatggtggcacacacctgtagtcccagctagtcgggagggtgaggtgggagagtcacttgaactcaggaggcagaggttgcagtgagctgagatggcgccactgcactccagcctaggtgacaagagtgagattgtctataaatatatacacatgtgtgtgtgatttgtataatttatcctttttttgtatgtgtgcgtttttgtttttctggttgttgtagcaggagtgacaacctactgatacctactacatccttccttgtgaataacaacgtatattctcagaagagcgttgttcttaccactgaatatctcagactgcttctaacatattcttagaaaacataacaaaaggcagactatgtataactttaagtttaattgagatctttctccacctacctggtctcttaacagtgttctttgtttactttgctcctgagtggttaggagtgtaaatatcttactagcacagtacattgaaaattcaatgtatttgctataataggatttgttcttcctaagggctttataaaataaacctcgagttttttgtatttttaaaagtctgagctgggcacagtggctcacacttgtaatcccagcacttggggaggctgagtcaggaggattgcttgaggccaggagttcaagaccaacctggacaacagcaggactgtctctacaaaaaataaaaataaaatgtctgtatttaatattattgataggtaacattctcacatgttcaaatgtcaaaaaatatgaaagggtatacagtgaagtatttctttttttttgagacagagtctcactgtcacccagggtggagtgcaatgacaccatcttggctcactgcaacctctgcctcctgggttcaagcaactctcccacctcagccttggactagaggcgcatgccaccatgcccagctaaattttgtatttttagtagagatggggttttgtcatgttggccagactgctctcgaactcctggccccaagtgatccgccggcctcggcctcccaaaatgttgggattacaggtgtgagccatcacgcctggccacagtgaagtatttctatgactcattcctccatctacccagttcccactcccaacaggtattcatgattattagcttcttatttattagaaaagtttaaatgaatatgctagctgacacatatccgaatcattttcccccattctctaaataaacatagcatcctatggctactgttttgcagttcgcctttttttttttaagtataaacgggaattaattggcttatatgactgcaaagtccaggacgtggctgccagtacagcaggatccagggcctcagacaattaattccaccaaaacccagcttctctccttctcttgcctgcactctcctctccggtggctgcatcctcaggcaggctcccctcctagtcccacatccaggatgacaccttaacagtttgggaactccaacagaaagggcacacctattaccacattcccggtagattctagccaaagtcctgtggagggctctcattggcccagctggagtcatcaggccaagccagtaggatatactgattggccaggctgacgtggcagggccacccctggtgttccaggcttgagaagtcagtcccacattggcatgagtttcctggctgaattgagaaaagtggctctccaaagccgtgtcaggctgctgtaagtggatgattttccccaggcaaagattacagatgtctactgcaaaaggcagtgtttttgatgtctttttttttggctctttcatgccaggaagctgctattatgccaaacgcatctgtggctcaggccatacaggaccaaacgaaaagccaaagttgtttacatctttcctatgatcttgtttttgtgggcgcccaaaaaattatattacaaaccctccaactagtcccaagtccatacctctaactaccccctttttctaacacaaagccaatatttcccctgccctaaattaacccaaggctaggtactacagaacccctagagataccgctaatctccaaaacccaccagaattattcagaccacccagtcccaaactttccctgcactgccttgccttccctgctgaaacgctaataaaggttctcgtttaagctttcccttcactcccttctgcctcctgaccaaacctggtgcttcttctccatgtggccctgcatggcgtggtgtgtccctcctctcaggaaatgtggataaattattccttcaaagccactagtctctctgtcatcagtcagtcgcttctataaattaaaatcctacaggtacaactgagagaggggctgctgcgactgagttttcagtcctggaaaaccacactttttttttctgtctctgcaaggctttggcagtctctcctctccacccccttattaatgctggcctctgtttcacaggtacctctctacacgagcaggtgcaaattgtcactgatgggggaaacatgaaacaaactcagatgcctccagggacacgtgagaagccacacttgtttcagcctattgttctcttgagggaatgtgggccctgtgatgatgctagatctttcttttctttctgtaccttcctctcttcttccctctctccttccttccctccttctctccttccctcacaccctccctccctttcttctttcctcttttttaagaaaaactgaaaatctatttctgttttgattggagcttttgtgtgtgtgtaaaatatgttgtgtgtgtgttttttttttccacagcaactgctttttgtgtgtgtggtaaaatatgtatgaaataaactgccattttaacctttttatgagtagaactcaatggcattaattacattcaaaatgctgtacagccattgccacaatttctaaactttttcatccccccaaatggaaactatgaacccagtaagcaataattcctcattcttccctccttcctactctcagttcctgaaacctctaatctactttctgtctctatgaatttgcctattcaaaatctttcatataaatggagtcagatcgtatttgtttttttgtgttggcatatttgactcagaatgttgtagcatgtgtcagagcttcactccttttcatggccgaatgatactccactgtatggatatactactttttttttttttttttttgagatggagcctcgctctgttgcccaggctggagtgcagtggcacgatcttggctcactacaacctccacctgccaggttcaagcaattctcctgcctcagcctcccgagtagctggggttacaggaacacgccaccatgcccggctaacttttttgtatttttagtagagacagggtttcactatgttggccaggctggtctggaactcctgacttcaagtgatccacccacctcagcctcccaaactgctgggattacaggtgtgggccactgtgcccagcttattagatataccacattttgtttattcattcatctgttaatgaacatgtgggtgaaatatgtcaatttttacttgttgcaaaaacaaaacacaccttttttttttttttttttttttgagacggagtctcgctctgtgccccaggctggagtgcagtggcgcgatctcggctcactgcaagctccacctcccaggttcatgccattctcctgcctcagcctcccgagtagctgggactacaggcgtgtgccatgacacctggctaatttttgtatttttagtagagacggcgtttcaccatgttagccacgatggtctcaatgtcctgacctcgtgatctgcctgcctcggcctcccaaagtgctgggattacaggcatgagccaccgcgcctggccaaaacacatcattgttaaataactcctcaggctacccttctctatgggaaaatgcagagtaaatcaacagatttttaatagcaaaatggccaaggaaaaagcaggatagagacaacgcaaagatacaaacaatctaccaaatgaataaagccactaatgttacttaggctcaaacagtatcccccaaagtgagaggctggatactcacaactcgataaagggtgacattcacctgatattgttgctgtctcacatggccttaatcatcttattgcttttgtcttcactgttcttcaattttgtgcccttctctagtgccagccattgtggtaggccctgaagaacaccctcatggagagcatattctgtagaggaagacaggcacactaatagtatcaacacaaccaatacaaatgctgactgctgttatgggaaaacctaggagggatacacaggcagatttggaggattaggtaaggctttccaacttcccaacttctccaacaacttgcagagaagttgtcctgagacctgagagatgaatgagaggtatgatttggaggcaaaggccaggaaactggaaagactataaaacaccttgaggaaatgacaggaaaatggggatgagggacagatgacatatgagaggaagcagggactcaatcggagtttggtattcaccttgaaggcaaatgggagctgctggaaggattctgtgttttttttttttttgagacagattctcactgctgcccagggtggagtgcagtggtgtgatctcagctcactgcaacctttacctcccacctggaaggtagatgttagcgtagggtggtgaaaggcttgtgcactcatcttaatcttaaatatataccttggccaggcaaggaggctcacggctgtaatcccagcacttttggaggctgaggctggcagatcgcctaaggccaggagtttgagaccagcctgggcaacatggcaaaaccccatttctactaaaaatacaaaaattacccaggcgtggtggcatgtgcctgtggtcctagctactcaggaggctgaggtgggtgaattacttgagcctgggaggtggaggttgcactgagccaagatggcaccactgcattccagtctgggcaacagaggcagaccctgtctcaaaaaataaaaataaattttaaaaaattgaaaaaatacatatctcaatgattgtatgtatataatgattttatatataaatgatttatatattactttatctatattaaatgtctatataagacagatatgtaatttccagcactccataagatttccttgggagcttcctcatctacctctgcctccaggggtaacctggtatgcactatatactctttttctcttttttttttgagatggagtcttgctctgtcgcccaggctggagtgcagtggcgtgatctcggctcactgcaagctccgcctcccaggttcacaccattctcctgcctcagcctcctgagtagctgggactacaggcgtccgccaccatgcctgactgatttttttgtattttttagtagagacagggtttcaccgtgttagccaggatggtctcaaatctcctgacctcgtgatccacccacctcggcctcccaaagtgctgggattacaggcgtgagccactgcgcccggccctatatactcttttatctacctctttttgtgctcagcatagtgtctgagcttcatctatattgtatgtaccagtagttcatcctcctattactttgtaatacagaaaaaaactgagaaaagctttgaaatggtctaaaacagattactggggccaggcatggtggctcaagcctgtaatcccagtactttgggaggccaaggcaggcagatcacctgaggtcagaagttcatgaccagcctggaccacatggtgaaaccccatctctactaaaaatacaataaattagccaggcgtggtggcacgtacctgtagtcccagctgctcgggaagctggggcaggaaaatcgcttgaacctgggaagtggaggttgcagtgagctgagatcacaccactgtactccagtctgggtgacagagcaagactccatctaagacaaacaacaaaaaaatgattactgggtgtcattgaaaaacaaggtgcccagctgtccagcttacttttctaggatgtctgattctatgaagactctaaacctttcactgtctttgagctacagaacaactatacaaactatagacacttcttgtctatagaaatgcaaattgtggccgggcacggtggctcatgcctgtaatcctaacactttgggaggccaagacaggcggatcacctgaggtcaggagttcgagaccagcctggccaacacggtgaaaccctgtctctactaaaatacaaaaagctagctgggcatgatggcgggtgcctgtaatcccagctactcgggaggctgagacgggagactctattgaacctgggagatggtggttgcggtgagccgagcttgcgccactgcactccagcctgggcggctgagtgagactccgtctcaaaaaaaaaaaaaaaaaaagaaatgcaaattgttttcagtagaatgcaattgattactaagctgtggatttcatcagttctgccagtttttgtatatatttgtagttatttcattattcctcatttgactatgtgtgtggtactttgaattttccattgaagcagttgtaatctttctggatatctcattcattaatgagttaaataaaatctctaacatttattttatatctgtattatatttgatattaaaattattcttcaacagtagtatacagttatatgaataagctgcaatttatctattcatctattggtggacatctgggttttttccctttggctattatgaataaagctgctatgagtcttttggtgaataaaggcattcattttttggggtaaatatctagaaatgggatttctggggtatagggtaggggtaaatttgatttcagtagagactgatgtttccaaagtggttgtaccattttacactcccatcaacactgtatgagagtcccatttctgcatctttgcaactaagggaattgtcagtcttttcatttcagctattctatggagtgtttaatagtatcatattttggtttcaatttaccatagaagattttcaggagggaggtaacttgaacagatttttacattttagaaaactctttctgcgtattatgtggagaatgattatttgtataccaaagttcatagcagcattattcacaatagccaaaaggtgggaataaccaagcatccatttatatggatgaatggataaacaaaatgtagtatacatgtataatggaatattatttagcctcaagaaggaagaaattctgatacatgctacaacatagatgctccttgaagacattatgctaagtgaaataagccaatcagaaaagagcaattattgtatgattcaatttatatgcggtacctcgcacttacagacagaaagtgcaatatcggctataaggggttgtgagaaacgggtaacggggagttactgtgtaacaggcagattttctatttgggataatgaaaaagttctggagatggatagtggtgatggtttcacaacaatgtgaatgtacttaatgccagtgaactgtacacttaaaaatggtgaattttatgttagatagattttatcacacacacaaagaggagggagggcgggagggaaggagagagggaaggaagtagagaggggagaagagaggaagaaaggaaagaaagtaagatctggcatcacagggcccacattcccgcgtgtcagcaataggctgaaacagaagcatggtttctcacgtgtccatggaggcatctgagtgtgtgcccactttcccggttcaatgacaatttgcacctgctcgtgtagaggggtacgggtgaaacagagaccagtattattaaggggatggagaggagagaccgccaaaacatcgcagagacacaccgtcggagccaagagaatggggtgcagacgcctggcttggcctgtgggaactggcaagtctcagctctcaaacgcccgggcttttcaacccgccacagccgggttccagctgcctacttcctttaaagccttcaccgactctaaaacaccaaaaacaaagacccaactagctccggaagcccgagatgtaaccgtagtcatctgaccctcccgtccggactctgattgggctttggagatacgcgtccctcccggcgctgtacggcgaccccgccccagcagcctgagggggcgggaacagatgtccgagtgcgacagtattggtcggcttccccaggaagcagccaatcggaataggcaagcttccggcgggaagtgagccagggcttggcgcggcggccgtggttgcggcgcgggaagtttggatcctggttccgtccgctaggagtctgcgtgcgaggtgagtaccgcgcgcgtaactacgggtcggtccgcattgatctagccctgctctggcggcccggcccggagctggaggccgctcgggttcttccgtttcctgcactggttcgcctcggcccgctgagtcctctagtctggccaacatcctgggaggacagcagatacataaatacgttcccaaatggggaaacagaggcccggggcgggggcgaactctgccaaggtctcccggggcgtcggaggccgagcatgggctaggacctggcatgttgttgcccatatactccagtgcgtaacatgatgccctgcacagagtaatcccagcccagacctctggcactactacctccgtgtccctcctgaggaacaacgaaaacactttgtactttttctgtggccttccataatcacgagctgggctactcttgtttttgagtgtctactgtgtgccatgttcctggcacccttgatcttacaactgtagctttacgatatcccagcaaagcgaagtgcttaagaatactgcatcagattgcttgggttcgaattctggctccttcacatttagctctgtgtctactgcacgttactgaaacactaagtgtcttggttttcgtctgtcatatgggggaaatggtctcttctacttcctggcgtttttgttaggattaaacgacttaatatatgcaataataaatgcttcgaaggctacctgttacatagtacacagtaagggttctgttatcattacccagagaagcggatgaaattgtccccattttagacatggagaatctgaagtacaaagaggttgtctccgtacagaaagagcatttggtgattaagtgctagagatacaggatttgaactaagcgcctgattttaaagtatgtcccacaacattaggctttctcctatagccctcacctgtccttaggtcacacagaactttaggtacctcatggcgtgagatggagcaggtgactgacagctccttgtgccacccatgcagataaataacactggtgtgtcactgtcaagattaagggacaggaattcgagagactgcatgagagatcagaagatgaagaagcgggtaggcaaaagtattctgtttggggaatagtaaatagaattaattaaatcaacattttgttagctgggctgcttatactgtcagacagtagcttataatctactgggaagaaatgaaatttctgggtcctgtgtcactttcaatgccactcaccatgacaggtaccttataagtatagtttacagtcctatcagtaacctggagaagtagttatttccttcgttttactgaggaaaccaagagttaaaaaatcaggaaaagtgttagatgtgcagtagaacatcatcatgctgggaagttctacacatccgcttcaggacaggtggtattacctatgagcaggaagggaagggaaaaaggtaaggggaatgagtgatagtttattgttttgatttttaaatttttatctgttttttcctttttcatagtcattcctggaatgagtgagtttgtttttgtttttgtttttgggggatggagtctcgctctgtcgcccaggctggagtgcagtggcgcgatcttggctcactgcaagctccgcctcccgggttcatgccattctcctgcctcagcctcccaaatagctgggactacaggcacccaccaccacgcccagctaattttttgtatttttagtagagacggggtttcactgtgttagccaggatggtctcgatctcctgacctcgtgatccgcctgcctccgcctcccaaggtgctgggattacaggcgagccaccgcgcccggccatgagtgagattttaaatatatctgaaatgaggccaggcacagtggctcacacccataatcccagcactttgggaggatgaggcgggcgaatcacctgaggccaggagttcgagacttgcctcaccaacatggcgaaactccctctctatagtaaatacaaaattatctgggcgtggtggtgtgcgcctgtggttctagctactggggaggctgaggcacgagaatcgcttgaacccaggaggctgcagttagtcaagattgcaccactgcactccagcctgggtgacagagtgagagtccgtcagtcaatctacctgaaatgttttatgcctttaaaagagagagaatagggccgagtttaactttttaaatttggttggtgggtacatgggtgtaattctattttctgtatctttatgtaagaaatattaaaaattaaaagatatacatatatattttaatttacatatatatgtgtttttttctaagagaaaaatggatagaataaagaggtccaagataatcgtagaataatcctaggacttcagtgctgaaagcccctaagggtctccactacctgtaggataaaatctaaactccttggcatgataccagaggcttttgagcattctgtatcgctaacacatactattctacctcagcctttgtaccactagttcatagactactcttcttcacaacctcagtcctgtctgtaaagttccacttgtccttcaatatccaattcagtgttctttgaaaagcttctctatcatttgcctgtttttccttaatctgggaagccatagtcttttaagaaaagacttgattgtcagacttatctcgttgcattgtaattatttgttgacatgtctattttctgctagtctataagctccttgaaggcagtaataatgtctttcccatctctgtacttcagtgcctaccatgatgcctggcacagagtagtcactgtagatattagctgaatgaaaaatacaagttgaagacagagagtgaaagttcttggagttatgacatatggactttgttctctggaatgacagggaactattgagtttactttctttaaaaattcccgtattttattgaaacatattctcaatgtcaagaaaaatattccagtcataatcctatctttcaaacacttgaactatttttattttccatgagtcctttccaaatttcagctataaaattagttatacagatttagctatacagatttcttaggtagctgtagccttaatgtattcataacttagtgtttttcttttttctttctttttaaacctgacacttgaggaattttttttttcttttctttttttttgagatagggctcactgcagctccagcctcccgggctcaagtgatcctcccacctcagctgggagtacaggggtgtaccaccatgcctggctaattcttgtatttgttgtagagatgggcttttgattttttgtagagatagggtctcgccgtgttgttcaggctgatctcgaactcgtaggctcaagcagtttgcccacggagtgctgggactacaggtttgagcccaccgcacctggcctgcttttttcaatattaaattatttcctggctgggcgcggtagcacatgcctatgatcccagcactttgggaagccaaggttggggattgcttgagcctgggagttcaagaccagcctgggcaacatggcaaaaccccgtctctaccaaaaaataaaataaaaatctaaataaattatttattttagtgaatcagtctttatgcttgtcatttgtcttataaattttcgcaatattcctctctctttggtttaataggtatgaaatgatgctccatgttattattagaaaaatttcacaattttttcataaatttacttagtgtctgtatattctggtgagctgttgtgtttatattccctgaacatttgttcactggaactggatgttctttatgtgtttttaatattaatcatttatctgttatttgttgctaatttttcttttcttttttctttttttgagatggagtctcatcctgttgctgaggctgaagtgcagtggcgtgatctcagctcactgtaacctccgtctcccgagttcaatccattctcctgcctcagcctcctgggtagctgggattacaggcacccgccaccacgcccggctaatttttgtatttttggtacagatggggtttcaccatgtcaggctggtctcaaactcctgaccttaggtgatctacccactttggcttcccaaagtgctgggattacaggtgtgagccactgcatccagcctaatttttcttttaaaaatatttttattggccgggcacagtggctcgcgcctgtaatcccagcactttgggaggcctaggtgggcggatcatgaggtcaggagttcgagaccagtgtggccaacatgatgaaaccctgtgtctactaaaaatacaaaaatcagctgagcatggtggcacatgcctgtaatcccagctacttgggaggctgaggcaggagaatcacttgaacccaggaggcagagattgcagtgagccgagatcacaccactccactccagcctggcgacagagcaagactgcatctcaaaaaaaaaaaaattttctttattatgacaaccaagatacatttgtaaaaatatacataatttcgctggaaaccaagagttaaagtggctcacgcctgtaatcccagcactttaggaggctgaggcaggtggatcacttaagggcaggagttcgagaccagcctggccaacagggtgaaaccccatctctttttttttgagacagagtctcactctctctcccagtctggagtgcagtggcgcaatcttggctcactgaaagctccgcctcccagcttcatgccattctcctgcctcagcctcccaagtagctgggactacaggcacctgccaccaggcccggctaattttttgtatttttagtagagaccgggtttcactgtgttagccaggatggtctcgatctcctgacctcatgatccacccacctcggcctcccaaagtgctgggattacaggcatgagccgccgtgcccagcaaaaagcccatctctactaaaatacaaaaattagctggccatggtggcccatgtctgtaatcccagctacttgtgaagctgaggcaggagaatcacttgaacctgggcagcggaggttgcagtgagcctagatcaggatcacgccattgcactccagcctgggcaacagaatgagactctgtctcaaaaaaataaaataatttaaaaaaagttacataatttaaagaatagttacaaagaaattacaaagtttagttatgcataaaaattatattgtattcatggtaaattgaagactcattataaaattatagttacacataactatcatctagatcaagaaagaaatagaatattaccaggatcccaggaccccagaagtgtatctttctgatacctcctccctatgttagggataactattgtcccaattatgtatttatttattttgagacggagttttgctcttgttgcccattctggagtgcagtggcgcgatctcggctcactgcaacctctgcttcctgggttcaagcaattctcctgcctcagcctcccaagtagcttggattacaggcgcctgccaccatggctggctaattttttctatttttagtagagacggggttacatcatgttggccaggctggtcttaaactcctgacctcaggtaatctgcctgcctcggcctcccaaagtgctgggattacaggcatgagccaccgctcctggccctattgtcccaatttttgtgataatgcttttcttgtcttcatagtttgccctgatctatacatctataaataatatagctcagttttgcctggttttgagctctgtaaatgggataatactatatgcattctactgagtctttctagtttgcgttattatgtttgtgagattcttccacgttgtagatatagtttttcttttctttttttttttttttaatagtaattttggctgggcatggtagctcacttctgtaatcccagcactttgggaggctgaggaagcaagatctcttgaggccaggagttcaagaccagtctggcaacaatgggagacttgtctctataaaaaatttaaaaaattagttgagcatgatgtcatgcacctgtagttccagattctccagaggctgaggcaggaggatcacttgagcttaggagtctgaggctgcagtgaactatgattgtgccactgcgctctagcctgagtgacagagcaagaccttgtctctaaaaaaaaatttttttaaattgtttttcttaacctcttaacagagttttacatgtatagtaccacacagccacaatgttgtatggcagatctctagaatgcgttcattttgcattactgaaactttatactttttgattaacaactccccatttcctgaaagcccctaccctggcaaccactgtgcccctctttgcttctatgagtttgcctattttagatacctcgttgcagtggaatcatgtagtatttgtcctgtgactggcttacttcactttgcttaatggcttcaaggttcatctgtgtcatctcatgttgcaggattttttttttaattttttattatttaacttaattgtattgtattttattatttttcagacagggtcttgctcagctatccaggctggagtgcagtagaatgatcgttgctcactgcagcctctaactcctgggctcagatgatccttctgcctcagcctcccgagaaggtgagactacaggagtgtaccaccatgcttggctaacttttttattttttgtagatactgggtcttgctttgttgcctaggctggtctcaaactcctgggctcaagcgatactcctgccttggcctcccaaagtgctgggattacaagcatgagccacttcatctagtcaatttttttctttttaaaggctgaatatttcattctatgcgtataccactgtaaagaaaactccatttcctctctactctgtacccatataataattcctcacttctgtcaccaaatgtgtggtgttttttttccccacaatagttcagttctttagcagacactgggtgtcctacatttagctcaggtctgacactaactgccaggtgttagtgcagaccccaaatgttaagtcctccctgtccacccgcattccagaccccccacttcagactacaagcacaagtggtaagtcctccacattcagtcacagaacagtttccttactagattatcagcttattataaacaactcagaagcagccagctggaagaaatacacaggacaaggtatgtgggaaggggtgtggcacttccatgccctctccaggcacaccagcctcccaccatctctacatgttctcaccaacctagaagctccctgagccctatccttctgggtttttacgtaggcctccttacctagacatgattgattaaataattggccattggtgattaagtcactccccagcccctttgtcctacccagaggaagttttgttttgttttttgagaaggagtctcactctgtcgcccaggctggagtgcagtggtatgatcttggctcactgcaacctctaccagctgggttcaagagattctcatgtctcagcctactgaatagctggggttataggtgtgcaccatcatgcctggctaatttttgtatttttagtagagagagcgttttgccatgttgtccaggatggtctcaaactcctgacctcaggtgatctgcccgtctcggcctcccaaagtgctgggattacaggcataagccaccacgcccggcccccagaggaaggttttattgaattaattacaaactgataggtcaaagagtgtgtatgttttaccttactatgtaatactaaattgttttcaaaagtgcttgcactcccaccaatgtattagattttccgttgctctgcatgctggctaatactttatatttacatttttattttccaatctggtatattcatgtatagtagtattttctggtagcattcatttctctgattattagtgaagatgagtaccctgatgtgtttatgggctatttcctcttttttacagtccctttttttttttttgaggcggagtctcactctgttgcccaggctggagtgcagtggcaccatctcggctcactgcaagctccgcctcccgggttcacgccattcacctgcctcagcctcccaagtcccaagtagctgggactacaggcgcccgccaccatgcccggctaatttttttttttttttggattgttttagtagagacggggtttcactgtgttagccagggtggtctcaatctcctgacctcgtgatccacccgcctcggcctcccaaagtgctgggattacaggcgtgagccaccgcgcccagcctacagtccctttttttctgtcttctctattaagttgtctctgttttatgtacatataaacatatttatatatagttatctacatttttatatatacgtacatacacatttacataggtgtagcagatatcttctactttggctttttaagtggatttaacataattttagtcaatgactttttttatttttacatttctttaaagtgacataattgtaccccaacaatttatggggtacatagtgatattttgatacatatactgtataatgatcagatcagggtaattagcatatctatcatcttaaaacatttatcatttctttgtgttgggagcattcaatatcctccttctagctatttgaaactgtatagtacattattgttaactgtagtcatcctgtagtgctacagaacaccagaacttattcttcccatctagctgtaattttatattcttttctttcctttttttgagatgaagtttcactcttgttgcccaggctggagtgcaatggcacaatcttggctcactgcaacctctgcctcctgggttcaagcaattctcctgcctcagcctcccaagtagctaggattacaggcatgcgccaccatgcctggctaattttgcatttttagtagagacggggtttctccatgttggtcaggctgatctcaaactcctgacctcaggtgatccacccacctcggcctcccaaagtgctgggattacaggcatgagccaccacacccagccaattttgtattctttaacaaatctgcccctacccttcccagcctccagtgtcctctgttctagattttacttctatgagagcaacgatttttaggttccacatatgagtgagaacatatggtgtttaactttctgttctttattccacttaacacaatgtcctcaggttccatgttgctgtgaataacaggattttattcttttttatggctgaatagtattctgttgtataaatgtactataatttttttattcattcatcgcttgttgaacaccttggttgattccgtatcttggctattgtgaatagtgctgcagtaagcatgggggtgcagatgtctctttgatatactgacatcttttcctttggataagtgttcagtagtgggtttgctgaatcatatggtaggtctatttgtagttatttgaggaacttccatactgttctccatagtggctgtactagtttatattctcaccatcagtggaagtgtaagagttctcttttctctgcatcctcaccagcatttgttattttctgtctttttgataatagctttcttaactggggtaggatgatacttcattgtgtttttgtttttgtttttttaatttttaaaattttttgtagagacggagtcttgctgtgttgcccaagctggtcctgaactcctagcctcaagcaatcctcccgcctcagcctcctaaagtgctaggattcaaggcatgagccactgtgcctggccctaattgtggttttgatttgcactattttttttaacatcttttattgtgaattattgtatgttatatttcatagatataacttgtacgtgaatgagctaatatagtaggcctgaaactgttaccttcagaaaagcctgcttgcaaaattggtccctggctgtgtctgagaacttggcttttgaaacctttcctacactgatcaggttgttttactaatacctgttttccttctgagagtctgaaattttggtgggaggaaggtgcctaagtgaccagccctcaataaaacccctagattcagagtctctaaccagcttcttttgggcagaaacattgcacacacatagctgcattttcactgagagaacatgcactttctcaggggttagagagcattggaagcctgcacgtgaattcctacagacactacctgatgtgtttttttttcccttgctgatctggttgtgtatccttaaagtgttgatgatataataaatgttagctgtgagtacaactgtacactgagtcccatgagttcttccagcaaaatattgaacttagctgttaagttcctccagaaaaaaaaaaagctggaattttgattagaaatgcatcaagttatagatgaatttgaggagaattagcatctccatatcgtcttccaatgtgaatgtggttcatatgattgtttcctccctccttgacttctcttaacgactttcaattttcttttctttttttgagacagggtcttgctctctcacccaggctagagcaagtggtgcaatcacagcttactgcagcctcaacctcctgggctcaggtgatcctcccacctcagcctcctaagtagctgggaccataggcacatgccaccatgaccaacaaatatttgtatttttgtagagacagggttttgctgtgttgcccaggctgctctcaaactcctgggctcaagtgatctgcccaccttggcctcccaaagtgctgggattataggcatgagccactgtgcccagcccaattttctgaatagatatcaaggacataatttgttagatgtatttttaggtatatattattttctttaaattttttttgagacagggtctcactctgtcacccagactgaagtgcagtggcgtgatctcagctcaccgcaaccaccgccttccaggctcaagcaatattcctgcctcagcctcccgggtagctgggattataggcacgtgccactactgccaccacgttcagctaatttttatatatttagtagagacggggtttcaccatgttggccaggctggtctcgaactcctgacctcaaatgatccacccaccttggcctcccaaagtgctgagattacaggcatgagccactgcacccggccgggtatttaaatttttgatgtcatcttaaaaagttttctgacattttattttttgtttattgatgatatagaaaaacaatttatttttgtatattgaccttgtctccagcagtcttcctaaacacactgtcttagttttctatagctgctgtaataaattaccataaacttagtggcttaaaacaacatagaggccgggaacattggctcatgcctgtaatctcagcagtttgggaggccaaggtgggagtatcgcgggagcccagaaattcgagaccagtctgggcaacacggtgagtccctgtctctgtttaaaaataacaataacacacggtagctcacacctgtaatcccagcactttgagaggccgaggcgggcaggtcacctgaggtcgggagtttgagactagcctggccaacgtggcgaaactccatctctactaaaaatacaaaaattagccaggcatggtggtacgcgcttgtaatcccagctactcaggaggctgaggtaggagaattgcttgagcccaggagacagaggttgcagtttgccgagatcgcgccactgtactccagcctgggcaacaagagagaaactcagtttcaaaataaataaataaaataaataaaaacaacaacaacatagatttattatcttatagttctgtagttcagaagtctgaatgggtttcattgggctaaagtcaaggtgttggcaggctgagttcccttctggaggctcaagggcagaatccatttccttccccttttcagcttttagagactattcgtattccttgactcttggctttcctcctccattatcaaagccagcaactttgagtcctcctgaagttgccatctttctggtctgtcatcttatttcctcttccacttaaaaagacacttgtgattgcattgggtccatctggttagtccaggataatcttcctattttaaggtcagcttattagcagtcttaattccgtatgacagtaattcacctttgtcatgtaaccaagcatattcacaacatccaaggatcaggatatagacatctttggatgggtatgggagatggggatagtggtggtggtcacattattttgcctcctgcattcacttaagatttttatttttatttttatttttatttttgagacgaagtctcgctctatcgcccaggctggagtgcagtggcgtgatctcggctcactgcaacctccgcctcccgggttcaagcgattctcctgcctcaacctcccaagtagctgggattacaggtacgcgccaccatgaccacctaatttttttcttattttttatttttagtagagacagggtttcactatgttggccaggctgatctcgaactcctgacctcgtgatccacccacctcggcctcccaaagtgctgggattacaggcttgagccactgcatccagccaagaattttaataatttaatctgaagattcttttagatgttccacacacaaaattatagcctttgtgaatattaatgattttacatctttccagttaacacgccttttatttattgttcatgatctactgctctggcttggacttccagtatatatctgataaaagtattgatagtgggcattctggaattgttcctgatctaaaaagaaaagtttcctaaacttcaccttactgtattctctctgtcaggttatagaagttcctttctattcctgtttgataagagttgtgtttttttttgttgtttatttttgaggtggagtcttgctctgccacccaggctggagtgcagtggcgcaatcttggcccactgcaacttccgcctcccggttcaagtgattctcctgtctcagcctcccaagtagctgagactagaggctgcgtcactgcgcccagctaatttttgtattttaggtagagacagggtttcaccatattggccagactggtctcgaactcctgaccttgtgatctgcccgtctcagcctcccaaagtgctgggattacaggtatgagccaccatgcccggcgtgataagagttttcattatgaatggatttcactgtgaatggatgtttgattttatcatatgcttattctagaagtcttgagacgatatggttgttcagctttaatgttgtggtgaattatattaattgatttttaaatgttgaaccacttctgagtcattttttagacaacacaacttggtctcggtattttttattttatttatttatttatccttttagacagggtctcactctgttacccaggctggagtgcagtggtgtgacttcagctcactgcagccttgatctcccaagtcatcctcccatctcagcttcccaagtagctgggactataggcaagtgtcaccatgcccagttaatttttataaatttttgtggagatgagatttaatcacactgcccaggctggtctcaatcctgggctcaagcaatcctcctgccttggcctccaaaagcgctgggattataggtgtgagtcatcatgcccgtggctcttggtgtattttatacatggctagatttactttgctaacatattgtttgggacttttgcatctacatttatgaaaaagaattagcctggagtttttcactgaggagttgcccttacaggacttagtatcagagttatgctagcctcacagaatgagctggggagttggttctttctatattttggaatcgtttatgtaaaactggaatattttactgccataagtgcttagaagaactcacctgcgccactctggtcttgatgctatctttgtgggtagatttttgaccatcaataggacttctttaatggttataaggctattaggttttctgtttatttttgagtgagttttgataagttaatttttaaggaatgtgtccatctcatctaaattttaaaatttattgatgcaaagttgttcataacagcctaatgttatcttttaatgtctatagcatatgtaattaaatctcgtctttcaatctcttcttttttgtctttttacagaacaaacttggtttattgatcctctctattatatatctattattttttactcttaaaaatttttttaaaaatctatttatttatttattttgagaccggtttatgaaactggctaatttttgtatttttggtagagatgaggtttcaccatgttgccaaggctggtcttgaactcctggcctcaagtgatccacctgccttggcttcccaaagtgctgggattacaggcatgagccaatgcgtctgaccctcttctctttaaaactgcctcccttctattttcatcaggcttattttttcagtttcttttctaataattagggtcatccattttcttgtaactacttctttagttgcatattagatatttttatgtgtagatttccattattcagtttaaagtatatttgaatactcactatgatatcttacttgactgatggcttattcacaagtatatttcttgattttcaatacaaagggattttctagatctcattttctttattttgaaattttaaaaatctacagaaaagaaaacctacagaaaagttgaagaattagtgcagtatatcatcttcccaagtaaacaatttacattcataaaaatagttcatatattaggtaacaaggaaaacattagtaatttcataaagtagaaatattataattctgatcaccatgcaacaaaactagaaattaaaaatgaaatttataaaaaagcagaaaggcccttccatctggaaaattgaaaacaactattggatgtaaggaaaacagaaactgaaataaaggatttctgaaaattaacgaaatgaaaacacagcatatcagattcttaaaaaaaaaaaaaaggtaaggcactagtcaggggaaaatttataatcttcagtacatattataaatgaagaaagggaaataatgaaataaattccaaacttagaaagttaggaaaagaaaaacaagtaaatcgaaagcacaagagaataaataataaagataaaaagagaaattagtaagagaacaggaaaacatctgattcaaaaattaagatttttatcttggctgggcgcagtggctcatgccagtaatcccagcactttgggaggccgaagcaggcagatcacgaggtcaggagatcaagactatcctgtccaacacggtgaaaccccgtctctactaaatacaaaaacttagccaggcgtggtggcatgcacctgtaatcccagctactcgggatgctgaggcaggagaattgcttgaacctggaaggcagagtttgcagtgagccgagatcgtgccactgcactgcagcctgggtgacagagtgagactatgtctcaaaaaaattaaaaaaaaaagatgtgtatcttgaattgtttaatgaagcaaataaattagcctaatagaaattacaaatatacagaataagaaatggtaagtggtaagtaaccactgacacaggatagtttttataacaggattaatttatgtacctttacgtaaacaaatttgaaaactaaaatgaaatggataattatgtgtgaaaatctagtttaccaaaattgactcaagtagatgttggaagttaaatagctcaatttccattgaataagtttttaaagttatgaaataactgtctcactgaaaaataaaaaacatgaggtccaaatggtttaacaggaaaattctactacatttatggagtccaaataatcctaatgctaaataaattgttttagaacgtagaaaagaaggaaaacttccaaattctttattttccaaatggcttggtattgtaaatgctgatttagttgtctgtctccagttgttgaagggctgaagtgaaataaagtaaaacatcttaaaacactttttagttcttagaccctcttttttaaagtagctttattgatatagactgcacgtatttaaagtatacaatttgttcagttttgacatacacacatcatcaccataattcagttaatgaacatatccatcactctcaaaagtttcctcatcccccttaattctgccttcttgctctcttcttgccggtcaaccacttatctggtttctgtcactgtagaataattagcatgttctaggacttttaataaatgttataatacagtgtgtattcttttgtatctcacttcttttacacagcataattattttatatcggtttttatgaagcaagtataaaacaaatatttaacataaaaattaaaggtagcacaaagaaaattacagatgaatattatgtataaaaattatgtaaaagttctaaataaaatactaccaaacagaacagaatccagcactctattacaaaactattagctcatcaccaagatgtataccaggaatgcaaagatggtttaacattagaatcatcaatgtaattcaccatattaattaacctaaggagaacagtcatatatttacttttatatatgctgaaaaagcctttgacaagattcaacaccaatatatagtaaaaactcttaagaaattatattgtaatcaatacttctttttttttttttgagatggagtctcaccctgtcgcccaggctgaagtacagtagcatgacctcagctcactgcaacctccacctcccaggttcaagccattctcctgcctcagcctcccaagtcgctgggattacaggcgcccaccaccacacctggctaatttttgtatttttagtagagatgcggtttcaccatcttggccaggctggtctcaaagtcctgacctcaggtgatctgcccacctcggcctcccaaaatgctgggattacagatgtgagccaccatgcctggccaatcaatacttcttaatgatggtattctctctctctctctctgtctctgtctctcacgcacacatacacacacacgcgcgcacgcacgcacacacacacacacacacgcagagagagagagagagagagagagagagagagagagactttattcctaaatcctgtattttatctaataggaaaatactagaggcatttttactaagattgagaaaaatatagagatactcaccaactccacttgtatttaacattgtactgggggcttagccaatgcagttagataaatcaattagaggcacaagatttggaaaataaaaagtaatattgtccctacttgcaggtgatatggtagtgtgtctggaatactgcagaaaatcaataatgaaactaactaaacagaaaaggaattttataagaatatgcaaaaatcagtagtcttcatatacacaacaagtttgaatatataatgaagggtaaaatcccatttacagcaacaagcaaaagagaacatatttaggaatttaaaaactatgtaaaacctaggtgaagaaatctttaaaacacttctgaataacaaaaatagccttaaacaaatgaaatcttttgttctaggacaggacaacaacatcataaaagtgcctaagttaatatatatatatatatatatatatatatatatatatatatatatatatatttaagttaatacatatacctaagttaatatataaatttaatgcaatctcaatataaatatcaacagagttctggcactagacaagttgattctaaagttcatatagaaaaataaacatataagaataggaaaacagaagagctacaaagagaaagtagacttccagatattgtaacatgttgcaaagcttctatcatgataatattgtggtatagaccaatggtatagaatggaaagtcaataattagtctcctaaacacatgaagaatttagtgtatgataaaggtagttctgaaattattagggcagagatggactctttaataaatagtgctgggacaacttgttagccacttgaaaaaacaaaattatatctatactttatatcagacacaggaataaactccaaatgaaccagaaatctaattttttttaaattacctactagaagaatacatagatgagttttctgtaacctggatgtggagaagggcaataaaagagggggaaaaattggctacattgaaaagcaaattcttgattacaaaaatgaaaaacaccataagcaaatttaaaagatagatgagaaaccaggaaaaaaatctgcaaaatacattttaaagacctactatccctagtctaaattgagagaaaaaaatactaaaatttggttaaaaaggcagaatacatgagcagatacaattttttaaaaagattcaaaaaccatccttaaatatgtgaagaaaatattcaatttcacctaaacaggaagtgtaaatttaaagctgcactgaaataccgtttctcacctatcagctctgcactaattagaaagcttcacaagaagccccattggtgaggctgtgaggaatgcaaacttgtaaaacctcctttgagggagaagttggcaatccagcagactacacatgcatttgccctttgacccagccattccacttgtagaaatattccctaaagatacattttcttttctttctttcctttttttttgagacagggtcttgcttgttgcccaggctgaagtgcagtagtgtgatcttggctcactgcagctcaaactcccaggctcaattgatcccaccttggcctctggagtagctgggaccacaagtgcatgccaccacgccttactaatttaaaaattttttttatagagacggagtctcaccatgttgcccaggctggtcttgaactcctggactcaagcaatcctgtctctgcctcccaaattgctgggatgacaggtgtgagccaccgtgcccggccttacgttttcaacagtagggaaatatgaatgcacaaagttatttgttgcagcattatttgtaattgtaaaatatcagggaataccttaaatgtccatacaggaaatttgttggtaaatatctacacaatggagtactgtacagctgtaaagaagaatgaggaaaatctttgcaaacgggtgtagagtgatttctaacatgaatggaaagcgtacatacagtgtgctattttttatgtaagaaagaagggaaaatatgagactctaatgtctgcttattttgcaaaaagaaaaacaggaaagataaatcagaaattattgaaattgataacccacaggaagtagatggcaaaggatggagagggaagaacacttctctgtggggaaaaacagtcttttatgtagttttaacttttagaactatgtaaatgttttatatattcaaaaatcaaatccacaagaacagtacaaacacaaactaatctaattcaaatgatgaatgtaatcaccctgaaggtgaggtgggactgaccaatcaagtaacttttgaatatagtactttaattatgtacccttaatctgaagaaagaaatgcaactgaattttgaactcttcttagtaggttttttttttttagtgacaggagtgtagcaatttgaaattacttcctatagtttcagattgaataaatgaataaatatatgatggttttttctatgaattttaagatagatggatagatcaatggatgtatagctgtagatacagaaatagatagaagtgtttatatttcctagatctgtctactaaaagggcctaggagcaatgatatgcaagtagcagatcatatctaatggccaggtcttagattttaaagatttttcctcattaaaataaatgaaggctgtttgaggaaatggtgattctatggctgaagcaggaaaagtaaatgaagaccatgaatgttgtgccaggtaataagaaagtgcctgatgggaacactttaaaggacagaggaaccaatggattaaagaagaaaacaagagacattagagtatatcttgagacaatgaaaacgaaaacacaacatgccaaaactcatggaatacagtgaaagcagtactagaaaggaaatttatagctacaaatgcttacattaaaaaagaaagatctgaaatcaacaatttaacttcacacttaaaggaacagtaaaaagaacaaaccaaacccaaagctacagaaacaaggaaataataaatattagggcagagataaacaaaacagggactagaaaagcagtagagaaattgacaaaacagaattgattctttgaaatgataaaaaaattgataaaactttagccagatggactaagaaaaaataagacaaattactaaaatcagaagtgaacaaggggacattataactgatttacagaagtaaaaagatttataagagaatattgtgagcaaatgtatgccaacaaatttgataacataaatgaaatggataaattcctcaaaacacataaccaccaagacagaatcatgaagaaacagaaaatctgaacagacctataactagtaaggagattgagttagtaatcaggtatcacccaacaaagaaaagctcagggccagatggcctcactggtcatttctaaccaatatttaaagaagaattaagtccaattttcctcaagctcttccaattaatgatatatttgataaagggttaatacccaggatatataaagaactcctcagcactttgggaggctgccgggacgggagaatttcttgagcctaggagttggagaccagcctaggcaacatggtgaaaccctggctctacaaaaaatttaaaaatttgccaggtgtgatggtactttgctgtggtcccagctactccgtaggctgaggtgggaggaccacttgagcccgggaggtcgaggcagccgtgagctgttgcactccagcctgggtgacagagtgaaaccctgtttcaaaaaacaaaacaaaacaaaacaaaacaaaacaaaacaaaaactcatacagctcaacaaataacccatttagaaaatagagaaaggactcgaatagacacttcaccaaagaagatatacaaatggccaataagcaaatgaaaagatgcctattatcactaatcattagagaaaggcaaatcaaaaccaggagataagacctcacacctgttagaatgcctgttataaaacaaaacaacaaccagaaaataacaagtgttgctgaggatgtggagaaattaggatgtggaaaaatgggaagccctgtgcattatttatagcaatgtgaaatggtgcaaccactgtggagaacagtgtggtggttccttaaaaattaaacataaattaccatatgattcagcaattctcaaaaagatatttgtacacccatgttcataacagcattattcacaatagccaaaaggtggaagcaaccctaacgtccttgaatggataagaaaatgtggtatgtatctacagttagatattattcagccttaaaaaggaaggagcggccaggcgcggtggctcacacttgtaatcccagccctttgggaggctgagacaggcagatcacaaggtcacaggttcaagaccagcctggccaacatggtgaaaccccgtctctactaaaaatacaaaacagaaaaattagctgggcttgatggcacgcacctgtaatcccagctactcaggaggctcgggcaggagaatcacttgaacccgggaggcagaggttgcagtgagctgagattgcgccactgcaccccagcctgggcaacagagcaagactccatctcaaaaaatattaataataataaaggaaggagcctggcatggtgactcatacctgtaatcccagctactccggaggcagaggtgggaggatcattagagctcaggagattgaggctgcagcgagctctgcacacaggaaattctgacacatgtctcacaacatagataaagcttgagaacactgtgctgagtgaaataagccagtcccgaaaaggcaaatactgtatgattccacttacagtgtgaatacattatgattcccatactgtatgagtctgctgatgacaaactattgtttttttgataatctggaagtgtctctatttcttgtggcattttaaataacagctgtattgtttttaaattattatttgtttatttttttgagacagggtcttgctctgttgcccaggttagagtgcagtggtgcaatcacagctcactgcagcctcgacttcctggttgagcagtcctcccacctcagcttcccaagtagctgggacaacaggcatgcaccatcattcctggctaatcttttgtattttttgtagagatggggtttcaccatattgcccaggctggtctccaactcctgggctcaagcgatccccccgcctcagccttccaaagggctgggattacaggcatgagctactgtgtctggcctgaatgacaggtctattgaaatacattacacatataaaattcacccattaaactgtacaatccaatggctttgagtatattcacagttatgcaaccatcaccgcaatcaatgttggaacattttcatcagcccacagagaaatttgcataccccttgccatcatccccaaatcctctcatctttcccaaccctaggcaatcagtagtctacactgtatccatggatatgtctattcttatacatttcatataaatggaatcatacactagttcatcttttgtggctggattctttcacttaacataatggtttcaaggctcgtcattactgtagcatttatcagtactatatttttttgtgtggccaaataacattttgttgaatggatatacacattttatttatccattcatcacttgatggacatttgagtggtttctgaatttggctattgtgaataatgctcctgtgaacaatttgtgtacaagtatttattttgagtacccatttttcactctttcgcatatatagctaggagtgaaattgctgggttacatggtgatatggtttgcctgtgtccccattgaaatctcatcttgaactgtggctcccataatccccatgtgtcatgggagggacctcgtgggaggtaattgaatcatgggtttttcccatgctgttcttgtgagagtgaataagtctcacgagagctgatggttttataaaaggcagttcccctgcacacactttcttgcctgccaccatataagatgtgcctttgcccctcctttgccttctgccatgattgtgaggcctccccagccatgtggaactgagtccattaaacctctttttctttataaattacccactctcaggtgtttcttcatagcagtatgaaaatggactagaacacgtggtgactatgtttcgttttttgaggtactgcttgactgttttccaaagtggctgtgccattttagagtcctaccagcagtgtatgagggttctgatttccccacattgttgccaacacttatctgttgcttttattatagctactttttaaaaataacagctttattgagatataattcatataccatgaaattcacctttaaaaacctagtgtacaattcactgcccttgatttgtgaaagatattttttctgggaaaagaattctgggttaatttctatcagcacatcgaagatatcattccactgtcttttgattttcatttttgctaaagagaaatcaattttttgtccatatggtacactgatatatttgggtgtggatttctttttatctctgcttggaattttttggctttctcaaatctgaaggttagtgtctttaattagtcctggaaaagtcccagctgttatcttttcaaatattaattcttccctattttctcttctttctggaactctggctagatttatgttagactttctactctgtcttccatgtctcctaacttctcatattttccatctgttttctctatctctctgtgtgtgcatctattaagtcaaaaactatgaagggtctgagattttaccctacatttatagctatatttatctttagccacttttctgaagttctaattatctattgttatgactgattttctttgggttgtattggtatattatcaagttgtctacatataatgataatctcatctcttctagtatttcctttttcgaatatttttgcattggcaagagcatccaatatgggagtgaaaatgagagaacaatattgtttttgctgttgtttttaatggattcacccctagtgtaaaatatatggtatttgttggttctagattttaaacacttgtaattttgtgttttaatgtgtttgttagacatggtttgagttttattaggtgccttttcaaaaatgcattgataatacatactgtgtgattctatatatatgaatcaagaagtttaagaaaccatgaacgaagagaacatatgacataaaattctgtcaaaaatctctctttgtctagaaattgtgtttgatgtttaattttatcagagaacagaaagttgcttgccccagtgccccagttaaggtaaagctgaggttcataaatacctcaacttaaaaaaatacaaaaagtagattttttgatcgttcttagttaggctcaccacctttgccccagggaaagtaactcctcccctttgaacagtcactgagtgaggcttacagagcgacgctctgtttttcaggaaccaccccctaaaatctccacttttagcagaagactggaaacagaaacatctaaatgttacttggcactgaatgtcttggagtagtctttttggcagtctatcccttgatagactgaaatagccatctttgacaacaaaatgaataaaaagtaaggtttgacctagtcttaattttgatagatccccaaccagtaactttagtgtcacttatttcaaagaaaaggcactctttttttctgctgtgtttttctccatcccatgtctctctctctctctcttttttttttaaaggtttattgtgtttacttttattctttttttatttttgagacagggtctctgttgcccaggctggagtgcagtggggtgatcatggctcactgaaacctcgacctcccgggctcaaatgatccttcccacctcagcctcctgagtaactgggactacaggcatgtgccacctcactcagctaatttttgtgtttttttgtagagacaggtcgtactttgttgcccaggctgctctgcagctcctgggctcaagcgatcctcccgctttggcttcccaaagtgctagtattacaagtgtgagccgccgtgcccagcctatttgaaaaattcttaatagccagttttaaaggtaatgcttgaagcttacatttcctgtgactttttttttttttttttttaaacacagggtctcactgtcaccccagctggagcagtggcacagaattgctcactgcagcctcgaactcctgggctcaagggatactcccacctcagcctccctgagtagttgggactgtaggtgtgtgccaccatgcctggctaaagatgggatctccctgtgttgcccaggctagtctcaaactcctgggctcaagccatccccctgcctcagcctcccaaagtgctgggattataggcgtgagccaccgctcctggcctgcttatttatattcttttgtaatggcatgataacttctttcatatatgtaggagaaaattttaatcattttccagattgaacttgtgattcttgtggtcattctaattcataggtttatttttttagtttctggttgctcattgcacccagaaattgttcctttttttaatattgtgaaacttcactagcctcaatttatttgttttcagttaatttttctcctttatcactggtctttgttattgtggatgaacaattttttttaagagatggggtctcacagtgttgcccaggctatagtgcagtggctgtttacaggtgtgatcatagtgcactacagccctgaactcctgggctcatgcaatcctcctgcctcagcctcctgagtagctgagactacaggcatgttggtgaacaattttctttttgtgtccaacaattgtatcgatattttgatggagtatgtacagaagagacacccttatggttcttagtactcaccaacttcctgaaagcattcccactgaggattttgagtaagaaaattatgtactcattaccatacttcagaatatgattctggctggagggtgctacctcgtgaggaataaccaaagagcagtgcattttaaaagcaggaagaggtcccctggagttaaggttgactgcatgctagctgtgaatccatagtgtaatcactacagttataaaatagttaatcaaacaattgtactcctgggatggctaagtagacatataaaaccatgctgtggagtaatgtaggaaatctcttattaaaatatcatggctagttttgatccaaaaataagtaagttatggaaggaatgtgggaaaagggtaagtaatgatgccatagaccactttgttctgcttagtgtcattaagactgaagatctgtgtacctctgcctccttgtcagtagtctactttgttgatgttgaaattcttagagggcaatagtctgacttcactctttatcacttcgtatttattcatgtgggaaagactcccacattgtacaggaccttgaagaggggacgcctcaacaaaagatcaaggcttttattttttatttatttatttattttttgagacagagtctagctctgtcaccaggctggagtgcagtggcacaatctcggttcactgcaacctctgcctcccgggttcaagcaattatcctgcctcagcttcccaagtaactgggattacaggcacatgccaccatgcccagctaattttgtatttttagtagagacagggattcaccatattggccaggttggtcttgatctcctgacctcatgatccgcccacctcggccttccaaagtgctgggattacaggcgtgagccaccgtgcccagccaagatcaatacttttaaactggattccaaatggtgaagtgccctaggaaatgcagagattaaggtcttaaaatattctccattaaaaagaatcagggaggctgggcgcggtggctcacacctgcaatcccagcactttgggaggcggaggcaggaggatcccttgagcacaggagttcgaggccagcctgggaaacatggtgaaaccccatctctaccaaaaatacaaaaaaattagtggggcatggtggtgtgcacctgtggtccagctgtgtgggagggtgaggtgggaggaacacttgagctggggaggcggaggctgcagtgagtcaccactgcactccagcctgggcaacaaagtgagaccctgtctcaaaaaagaaaaagaaaacaagaattagggatgcttgacgaaatggccgattccaaatctggtgcaaaaaaatgcataaggtatgcctggaacatcttttgagaggaaagaagctctcaatgactcataaggttaagtcataaggactgaagagcccgcctgaaaagactcccactggccaaacatgaatcaatttgagaatcaataaggatgatcactgtattggattgaaacacacctaatatgtttaatccatgagttcataatgatactgaaaaaaaattcatcactatttgaaggtggtgaaagaatgaatatcattttttatttattattgttaatgtatgtaagggatacaagtgtagacttcttttttgttgttttttgaaacagggtcttgctctgttgcccaggctggagtgcagtggcacaatctcagctcactgcaatatctgcctcctaggctcaagcagtcctcccacctcagcctcctgagtagcagggaccacaggcccgcaccaccatgccaggctaatttttttatagttctttagagacagggttttgccatgttgcccagcctggtctcaaactcctgggctcaagcgatccgctcacctcagcctcctaaagtgctgggtctatgggcatgagccactgctgccagccacgtgaatatactgtatagtagtgaagtatgggcttttagtgtactgcatcattattttgaaacttacgataaaagtcttacagctggctacgcatggctcacacctgtaatcctagcactttggcaggctgaggtgggagaatgacttgagctcaggagttcgagaccagcctagtcaacatggtgagaccctgtctttaccaaacatttaaaaattagctgggttgtggtagtgtacacctgtagtcccagataactcaggaagctgaggtgggaggatcacttgagcccaagaggtcgaggctgcagtgagctgtgattgagccagtgtactccagcctgggcaacagatcaagaccctgtctcagaaagaaaacaaacaaacaaaaagtattcctgctaatgagtgaaagaagtaataacagaatcgaaatgtcaccattttggaggtggacttccaaaatggtggagtaaggacctcagggtgtatgtatagctgaaacaatattggatgagttgataattgttgaatctgggtgataggtatgtagggattcattccttccatctacttttttgggggtaataattaagatataattcacatgccagtgtgaattattcaatgtttattaaataactagctatattacctaaagcatgttaaagagggaaaagaagcagaaataattccttctggagaaagtgggacaaaagctgtattatgatcatgcttataaacatgaagatttctcaattggatgtaacttagtttcttctaaattctgattttcactgttatctaaagtcaagatggttgatagatatgggttaatgagtggaacacggcttatgcgaaacttcatatttctagaaatatcatctagtgttaaccctgcctcctaagatatatgctataaaataaaaatagatgtctagtaaaggtagggaaaagggtttatggggttataactatcagctaaagtgaggatttttttaactatgcatggattacagctaggatcttcctttagccccagtaattttaaggtggtttaagctgtttgttatcctgggctatagctcagcgttaccacagcttgttacacagagatataaatgtgcttggtaaacgtattctttcaggttgaaactagatgattatgaagcatagtatcttgctggtaaacctttgctctcattggtggtggtgttcctcctttccccagttctgcccttgtgcagaattcagttattcatttgttctttgggctttccgtgtgctttgatcatttcctcccacctcgctcccttccagctttcatttatccttccaggccaggtcccatttttctaaaagccctttcctaataatcccctccctaatgtcttttgtacttattttagcattgtggaggaagagagggggaacctggttattctgttattcaagtgagccttcagttagttgaagattatatatttcaagtgtcactagttgtaaatgtcaaaacagtctattgaccaaaaaaaaaaaaaaaaaaaaaaaaaagtcctattactctgggcacagttggaacaatgcctgtttgaatcaagtccttcctcccctcaaaaaacattgtgattaatgcaaagtacctaactccactgatttctttttccctcactttttaggattatggctgctgttcctcaaaataatctacaggagcaactagaacgtcactcagccagaacacttaataataaattaagtctttcaaaaccaaaattttcgtaagtgttttgactggtttgctgtcacataggcactaacttaccacattgtacacatgagatatcttctctttaaactcccccattgtacagatgaggaaatgaagctgagagattcattgattttcccactttgccaattaatggtagagtatgttttagcagcaccaggtgagattgtgtctcatctttgcatggttcctggcacataatatttgctcaataaagatttgttgagtaaatgaataattgatcttgtaaatttgggcaaataagtgttttttaagttttggggggtttttttgtttgttttgttttgttttgttttttcttttgagacggagtctcgctctgtcgcacaggctggagtgcagtggcgcgatcttggctcactgcaagctccgcctcctgggttcacgccattctcctgcctcagcctcccgagtagctgggactacaggcacctgccaccacgcctggctaatttttttttgtattttttagagacggtttcaccttgttagccaggatggtctcgatctcctgacctcatgatccacctgcctcggcctcccaaagtgctgggattacatgcatgagccaccgtgcccagcctttttttttttttcttttttgagacggagtttcgctcttcttgcccaggctggagtgccatggcacaatcttagctcaccgcaacctccgtcttccgggttcaagtgattctcctgcctcagcctcccaagtagctgggattacaggcatgcaccaccatgcctggctaattttgtatttttagtagagacaggatttgtccatgttgggcagactggtctcaaactcctgacctcaagtgatccgcccaccttggcctcccaaagtgctgggattacaggcgtgagccaccacgcccggccaattattttaatataattttatatactttcgaagaacagtttataaggaaactacagctctccagttctgcctctcctctaagctatactccagactccttctaatgatatctaataataatttatattataagtgatgcttttaccaggttgtagactttgttctgggtgcctggctttgaagtcaccactgactttgagatcattaaatccagcagatagccacgattcctgcgtcttttacttgtcctgcagattttaacagagttagcagtttttaactctttttcccctttaagttcttatcagagtagcaaaaagtagccatatttgaatctcttccgtttttcttttttctttttttttttttgagacagtctcgctctgtcacccaggctggagtgcggcagtatagtctcggctcactgtaacctccacctcctgggttcaagctattctcctgcctcagccttctgactagctagggcttcaggcatacaccactatgcccggctaattttttgtgtttttattagaggtggggtttcaccatgttggccaggctggtctcgaactcctgacctcaagcattccacctgcctcggcctcccaaagtgctgggattacaggcatgagccactgcacccggcctcttccctttttcatttatgctgtcaccccgctctggagatgctattaactaaggactactagcctgagaaataaagtagtgggaatgacctctcaaagccaaataattagcctctgaatgggaaggaccagagaacgaatacaatttaagttacctgataaatttaaaatcgagagagatggattctttgctcagttgggatacaattaatgtaacctgtgtgaattagtttaaaaaattagttttgtagagttggggggtttcttaaaatggatccatctaatctagtttttccattatttttcagaggtttcacttttaaaaagaaaacatcttcagataacaatgtatctgtaactaatgtgtcagtagcaaaaacacctgtattaagaaataaagatgttaatgttaccgaagacttttccttcagtgaacctctacccaacaccacaaatcagcaaagggtcaaggacttctttaaaaatgctccagcaggacaggaaacacagagaggtggatcaaaatcattattgccagatttcttgcagactccgaaggaagttgtatgcactacccaaaacacaccaactgtaaagaaatcccgggatactgctctcaagaaattagaatttagttcttcaccagattctttaagtaccatcaatgattgggatgatatggatgactttgatacttctgagacttcaaaatcatttgttacaccaccccaaagtcactttgtaagagtaagcactgctcagaaatcaaaaaagggtaagagaaacttttttaaagcacagctttatacaacaaacacagtaaagactgatttgcctccaccctcctctgaaagcgagcaaatagatttgactgaggaacagaaggatgactcagaatggttaagcagcgatgtgatttgcatcgatgatggccccattgctgaagtgcatataaatgaagatgctcaggaaagtgactctctgaaaactcatttggaagatgaaagaggtaacaattattttatcttcattttagtatgttcattgtacttttttattcaaagctagccattgggaatagtcatgaatatatagagcttttgtccttaaggttgttagggtctttagtggtgctttttgaataatctgttggccacatttttgaggcaggacgtactgatgaaatggaaggttttagtctgctaatatagtttccaggatagctctgtgattttatacatgaagaaaatacaggagtttccccttgtccacagctttgcattctctgaggtttcagttacccgcagccggctgaggtctgaaaatattgcatcacttctcttgcgctttgggaccattattaagaaaacacaagccctgcaataccgcgacagtcaatctgataactgagaccactactaagtgattaacagcaacccaggtggacagatcaggtcggggcaagattttatcacactatactcaaaacagcttgaaactgaacacttatgaattaatttatttctgggattttccatttacatcacaatgcctacatcattcacctctcttcatctcatcatataggcattttttatcatcttatatctttacaaaggaagggtgagtagagtaagatattttgagcaagggagaccacagtcaaataacttttattgcagaatattgttataattgtgctatttcattagttgttcaccttttgctgtgcttaattaataaattaaactctatcataggtatgtatgtataggaaaacacatagtacttatcgggtttgatactatccgagatttcaggcatccaccggggtcttgtcacatatttcctgaagataagggggttgctgccgtaagatccatagaggttaaaatggtggttagtggtaaattggaaaatgaaactaagcctttctactgtaattcctttatggcttgttgccacctaatattgatgtataatgtgctctaattgcactattaaagtattataaattacattcaaagtttttcctggctagatcttgtaattatttaatgtccaaaattgagtaactgagattacccacatggggaagtaactcaccttatgaagcagttgcaaatatgagagtaaaatttttaaacccctgaatcccattaaggttactctagggtgagagagcactgaaaagtgattgacgataagcaaaactatagtctcatcaatgatgcctctgtttctgaagggaaaatttgttaaaagatagacagcaacaatttgggttgtgttttcccacatagtccaaaagagagacttaaataactgggaaactttgtgttaaagatgatttgtacaagcagccgtgtttgtgttattatcagacttatctgttgcactttacccttatttaaatatgagtgaaaagttaaaaactagaaacgtcaatagcaaatacgtgtttcgtaattaaccagagacagacatgaaaatccctaagcaaatcttcggcctcagtcgagcattcactggacttaatccacttgactcaatagtaatcatttatgaataaataagccagcattagcatgtaaagggagaggatccatacaaagtggtgtgattgtttgtgacttgccagaagcactcattcttaatcgctcatgccctgttctttctgtctcattagtggttaacaaatctatgtttatcaactgttttactgtagataatagcgaaaagaagaagaatttggaagaagctgaattacattcaactgagaaagttccatgtattgaatttgatgatgatgattatgatacggattttgttccaccttctccagaagaaattatttctgcttcttcttcctcttcaaaatgccttaggtaaactagctaaataattagcattattatttgtttctgggatactttaaattgtttaatttagtttataatatcatttctatataaaagtattttgtgctttctacaattattttacattcaagtgaaagcctcaaaaaaaaaccctgtttatacatttaattggttgcattctaaagatgaagtcccattatgattaattacatgaaacttcaaacaattttaggtagctgatttttttttttttttgagacagtctcgctctgtcacccaggctggagtgaagtggtatgatcttggctcactgcagcctccacctcccgggttcaagtgattcttgtgcctcagcctcccaggtagctggaactacaggtgcacaccaccatgcctggctaattttttgtattttcagtagagacgaggttttgccatgttgcccaggctagtcttgaacccctgagctcaggcaatccgcccgccttggcctcccaaagtgctaggattacaggcataagccaccttgcctggccttatatagttgattttgacataaggaatatatttctaaaaatattatatttccaaacctgacctgaaatgacacaaagctaacccattatatgggaagtgaattaggacattagtactttttaaaaaaatcctacaggatagaattggccattgtatttgttattcactcaattttagcaaattggtgacatgattattgttaattggtagtattacgagaaaaatagatactccacacgactcatcaacagcttaaattgctaagtgtcaatgttaccttcgtcctcatcccagtctcactctcagaccagttgagtggtagagtatagtatatactaaactgagcaaaagtttatatagagtctcaattctaaaccagcattctcatttaccaggtgaaacagctgaggcccagggaggagcaaggaattgcccaggttgatacaatgaatgacaaatggactcagatccagtgtagtgccttccctggtgtcatactgattccttgttgaatgcctggcttttttctttactcattaaaaatgtgtgttacgcaaataatataatcattttaacaaggattctaaataagaaggaaggagcactgctgggtgcggtggcatggtagtggcctgtagtcccatctactcaggaggctgaggcaggaggatcccttaagcccaggagttcaaggctgtagtatgctgtgattatgcctgtgagtaaccattgcactccagcctgggcaacatagcgagaccctcatctctaaaaaattaaaaagagagagagaaggaatactagtagtcccacaattctgactgttttctttatccatcttcagttttgatacatgtgtgtttgatttctgcattgttgtaatcaacatgtaattataattttatattctactttatttctcttagcattatttctaaatcattttccaattgctacatatttaattccttttaatggctacataatttatcaaattgtcatatcataaataaatttacctagagtcttagcaattaaaaaagcttgttttacaaagtatttccaaggtagactctctttgtacatttcccattgtaacttagtatacatatgtgtatatattataaaactgaaatagaattttcacaatattttttgtgcaatgcacagcttaaattctatgctacattttatttcagttttaaaaaatactggttgtaacctctgaatttcagaagtcaagtggtcagacagtatataacagagaagagagacctgtttttcaaactcctcttttccaaaacctctgtagctggccctcaagattctccatcttctggccacaatttacctttttcagctttatctccacttatgcccttgcaataacccagtggttttaatgagtcaaaccaacaatctagaaagcatatcattttctttaattataatgttattgtttaaaaaataatattaaaaagttacactgttttgatttagttagaaagttgcattccaaaattattctttaggaaaatacagttgattcccagatgtcaagcaaatagaaatgtcctttttaaaatctttctttcatagtctgacactttccccatacttgtcattcagtttgcttaaatcttatctccttggcaaagccttctaaagttccaaaaaatgttacctttctttggatttccacagtatcctctctttaacactcattcagtactaatttattttgttatttgtaaagtattttttctatgtaatcagactgaccaggtttatatgttaatatgtttttgtataatctgtgtggtgaggtaattatatatgcagacacacaaaaacacatgtacatatatttgcataataagagaagtccagaaaaagtgctttgaaatctcagaaaaaagagacattaataatcacttgctggagaagtaatgctttggctggggctagaagaacaggtgtgatttgggtacgaagagattggaatggcaggttttccaaattgagaggatcagtggcaaaatccccaaaataggcaatgcagggcttatatgaagaatgtaagtggtacagtatgactgaagatttgtgttactgaaaggacataatcggagataatgttgaaaagggctctttctggacaactttgaggaccagctaaagaagttttataattgaggaaatttaaaaaactacttctcttttctgttatatattgtctgatcagtggtagaaaaatattaagggtttcaaaattatacatttattgagtctagcctatagtatgattggcttaacattttttttatttgcagtacgttaaaggaccttgacacctctgacagaaaagaggatgttcttagcacatcaaaagatcttttgtcaaaacctgagaaaatgagtatgcaggagctgaatccagaaaccagcacagactgtgacggtacaagcaatattttagacataccatgtatttcaactacttacttttgaaaacaacgtaacacaaagattgtgttttgaacctgtggctgtatgttataaaatggcagatttgtagtttcttttcttctaatgtcataaccttgtttactggttagccagcatttgcctgaacaactcatgaactcatgctctcacaagggcgttcattccccattttgaaaatgctacttgttagaaatcatctctcatactgagccaagatctgcaactttaattctaggaggtttttaaatttttatttacaaatgagaacttccacaaaatcctgtgtttcagaaacacggaccacagagcgtaatctcatcataatagagtttccctccccctccttgactaaatattattaggtcttttaactctccttgctagaaattgctttcttgacctttcatcctccggttctcccttgtatatactctgagtctaggtctgggtcttgatgttcatttaaagctaaatacttgtttgcttgttttgtttctaattcattttttattttttattaaatatctagtgtaaataatcagatagcagtgcaagactttgataaacgacagtcccccttcccactcttggtgtctgctgctcagaggcaccttcagtctgaaaatatacatcctcttgtagacatttttctggcattatttctttttaccttctttttctctttttcactcttcctggaacttctatgatttgcatgttagacttccattaattatcttttctatttttcatctcttgattttctactttttaggatatttccttgattttatctttaactcttctgtggaatttttaaatttctatcaaggcaatttccgagagctcttctttgttctctggatatctctgtcgtgcattcgagtctgagggctgctgggcttttttagcgacgtctgcatgcatgtgcgggtcatgtgtgtagtgttctctgtgtgttgtttttgtttcctccagtttttttgtggtttattttggactcaatttattttagagatattcaggaggtgactgatgtgctgggcgctcttataaagtgccttacaatattaactaattcagtcatcaccataaactacctcaaactttaaggtagtttccttttttttttttttgagacggagtctcgctctgtcacccaggctggagtgcagtggcacaacctcagctcactgcagcctccgccttccaggatcaagtgattctcctgcctcagcctcctgattagctgggattacaggtgtgtaccaccatatctggctaattttttgtatttctaatagagacagggtttcaccattttagccaggatggtcttgatctcctgaccttgtgatccgcccacctcggccccccaaagtgctgggattacaggcgtgagccaccgcgcctggcccactttaaggtagtttctgttatccccatttaacagataatgaaactaaggtacaggagcgttaaatagttacacaccgtcatagaattagcctcagagctaggatctgaacacagcagtcttgaggcttttgagttttcattgataacaactgcattatactgtctctgtatcattaagtttcactaataaaatggttagctagaacaggggcaaggacagagttctacagcatgtcaatagaggcttccctcttggcttacaacagtccattcatcaccacttcttgttcagctagttacatatctgtcttcagaccatgtttctgttctttatccatggagacacaaaagacttgactatgtgactccaaaaagttagaggtgtgaggcagcaagaaggaatgggtgggacattgactctagagtcctacagacctgtaatagaaacctgtctcctcctactcttgactatgtgactatggcaaatagttaaacttctctggacttcagttttttcttctataaaatgaggagaatgatatctaccttgctgggtagttgtcaggattcaagataaagtgcctagtacactgcaggcctttcataaatgataactattgttatctgccagtctagtaatccttttaaaaaaggaaatacattaagacggatggtttgtttttatgaacttttgctaactctattattgtttcctcccccttagagctcacaaagcagctatttgataacaggctctagaattttgctttgaatttacatcaaatcaccagcctgtagtttttggcaatcactttcaaattttttgaaaattagaacaatgtttgtctgtcctcactttccatcagttctcttattcactagatgcctcacacacgtgtcagtgacaggggctctgagatcctgtttgcaggtttcctttgtactctgaggtataatctgtctagacaaggagtcttgggctagtctctgatagctaggtacccccttttatctccctctgagcctgtcttggctttcagttccatccgaccattgtgtattctctttccaatctgatgcttgttttccttgcagagaaaacagaagtaagataggaattcagcaattccattttacatctcatacctcacatttctctcagtcaccagaagtccaaatttcccaggccattcttgtgcagatgcccctcctcaccctgccatcttcactccctgttctgtcctcacttcctgtccttcctggcttgtaaaccatttaactgactgctctgtcagcaatgtccctgtagcctcatccgcttctctgatcattttcttccccttctttctctaattgttttctgaggatatgtactgtttcccctgcagcccacctaaactgttttttactctcacagactttaggcctgagaggtggcaaaggcatctgttgtccttgcttcctattgccattttttttcctttttttcatctttttttttttttctcgctctgtcacccaggctaaagtgcactggcgcaatctctgctcactgcaacctctgcctcccaggttcaagtgattctcctgcctcagcctcctgagtagctgggactacaggcatgcaccactatgcccagcttttttgtatttttattagagacagggtttcgccacgttgaccaggctggtgtcaaactcctgatctcaggtgatcctccagcctcagccttccaaagtgctgggattacaggcgtgagccaccatacccaggcgcagctgaggttttagatgaaggaaagggctggcacggtggctcacgcctgtaatcccagcactttgggagaccgaggtgagtggatcatttgaggtttaggagttcgagtccagcctgcccaatgtggcaaatccccatctctaataaaaatacaaaaaagccgagcgtggtagcgtgtgcttgtagtcccaggcactcaggaggctgaggcaggagaatcacttgaaccggggaaacggaggttgcagtaagccgacattgcaccactgcactccagcctggaagacagagcaagaatctgtctcaaaaaataaaataaaataaaacctctactgctttgaaattctatttattagttatggcttaatttttaaaatgggagtgggctggcaggattcagttgttcaaacatcatatcaggagttgctctgtctctcacttcccttctctctcctctcttctgtcccatctctccgggtcaaacctccatttctttctatgtgctttctacttttcctttgtatcaatcttatttgaaatctgtctttctttataaggtgacagaaatggccaccagaatcatattaagcttggaaaaagggaggtactttttcccagtcagccctaagtatttccagagttaattttcactgggctgccttgtgtcagatgcctactgagggagtgggaagggtaggtctaataggaaatcttggtaacagtatatgttaccattaaagggaagcctggattccaggcagatcaaaacaacaggtagggctcttgcctgtccaacgcttaacaatacactttgtgttggcacagtgagctttgcacatgaagttagttaaaaataaaatcatagttaactgataaacctttgttccagccaatgaccttgcttaccccaagaaatattatttattaaatattatgaaattaaatgaaaacagttatgagctcttatgataaagcgtagagacaacccaatttcaagttaattcacaggaagataataggacaatatatggttgtttatgatcttgtttttacactgcttcatattttacatatgtgactttcaaaatcttaagacttgactgggcacagtggctcacacctgtaatcctagcactttaggaggccaaggcgggaggatcacttgagcccaggagtttgagaccagcctgggcaacatggcaagaccctgtctctacaaaaaataattaattaaaaaaaaaaaaaagaagaagatgtgttgtgttgctgggcacagtggcataggcctgtagtctcacctacttggggaggctgaggcaggaggatctcttgagcccaagagtttgagggttcagtgagcagtgattgcaccactgcagtttaacctgggcaacagagccagaccccctttctttctttctttctttctttcttttttttgtgagacaaagtctcacttttgtcccccaggctggagtgcaatggcacgatctcagctcactgcaacctccacctcccaggttcaagcgattctcctgcctcagcctcccgagtagctgggattacagacacgcaccaccatgcccggctaatttttatattattagtaaagacggggtttcaccacattggccaggctggtctcgaactcctgacctcaggtgatctacccttcttggcctcccaaagtgttgggattacaggcgtgagccaccgtgcccagccccactttaaaaaaaaaaaaaaaaaagaaaaagaaatcaagatcttaagacttttttttttttttttagtgacagggtctcactgtgttgcccaggctggtcttgaactcctggacttaagcaatcctcctgccttggcctccccaaagggctgggattacagtcatgagccaccatgcctagccaagacttttttttttttccctcaaagaaaaatattaacaacataattattttatagctagacagataagtttacagcagcagcttattcatgtgatggagcacatctgtaaattaattgatactattcctgatgataaactgaaacttttggattgtgggaacgaactgcttcagcagcggaacataaggtatcttaattttcccccttctggaatatatctgattatatttctaccactctaagtgaaaaatggacagggcaaaatgttcaggctttctggcctggaaatggcataaggatgatcatcatgccactatgtttttgatttgtttacttttcaaaccactcctttaacattcgtattcatgtttttaagattgggaaaaaagcgaatatattttgctacaatttctatttggtatgaaaactacagatttgcttttgtggcctaccagagtaaactacttatatttaatacgttgttctcttttctctcttcagaaggaaacttctaacggaagtagattttaataaaagtgatgccagtcttcttggctcattgtggagatacaggcctgattcacttgatggccctatggagggtgattcctgccctacagggaattctatgaaggagttaaatttttcacaccttccctcaaattctgtttctcctggggactgtttactgactaccaccctaggaaagacaggattctctgccaccaggaagaatctttttgaaaggcctttattcaatacccatttacagaagtcctttgtaagtagcaactgggctgaaacaccaagactaggaaaaaaaaatgaaagctcttatttcccaggaaatgttctcacaagcactgctgtgaaagatcagaataaacatactgcttcaataaatgacttagaaagagaaacccaaccttcctatgatattgataattttgacatagatgactttgatgatgatgatgactgggaagacataatgcataatttagcagccagcaaatcttccacagctgcctatcaacccatcaaggaaggtcggccaattaaatcagtatcagaaagactttcctcagccaagacagactgtcttccagtgtcatctactgctcaaaatataaacttctcagagtcaattcagaattatactggtaagtttaaaataaattgaatgcttatatgaaaacaaaactgtcccaaaataggaattatataagaaaaaccatagcaaatcatcattgcctgaaaacattgttgctatgcaaatttctactgatgatatgaattacaaatcacaatttcaaaagcaagttgctcttttgtctctatagcagctgtagttttataaaatgtgtaattataacctattgtagtacggctctaaagtcattacaaatgtgatgtgcctttgaattaacattttttagttcctaaaacaaactcatgagggccaagtttttaatgattttgggatgggcaaaagcaaaaatggattcgcatgctaaaaatgtattttagaattctgtactgatgagaatcgattaatacaaagtagagaagcatgttttatgtgttaaaatgttaaaatatagggtagtctataaaggatatgaagtcaggagtgtcttaaatcagtcaaactacttctttgggtctaagggctcactgcatgccatgtgctatgttgggcgccgatcatttaaagatgaataacaaatactaagtagttcctgccctcctggagctcacagcttagtgagagagaagttttgagaggaatgaaattagccactgaaggctccagagaaaagccaaaaataattttaaaaccttacatcaaccctataaagttatcaaaagtattttttagctgaaataagtttataaagtacagccctccctatttttgccattgatgacttaataccacggaggtttttcttacagttacgctgctgacctttaaaacaacgattaatggatttatttttgtatcatgttagaatgtgtcatacttgatgtttgcaattatcttgagacagttgagtgttggggttagcgtaactgccagagctccgtgagtacctcttgttctctgtgctgaaccagagttgcgacagccaggctgcagagcaggggcacgtgtgagagatgttatgaaagaagagcctgaggaagctcagatgactccaaggtttcagacactgatgactgggaaaactgtgacaccagtaacacaaacaggggagtcaggaggcggagtcagatttggagaaaagctgagaagggctagtttaagtctagaggttaaagtgctggtaagtcattcaggtaccaatgtcttgcagacaacgggagctgtgtgcaggactggaacttaggagggtgtcagttgggtcttaagagaggtgtaggcatttgctgcacacgggtcatgtttaagatcataggactaggaaagctccaaaaaagaatgtctacagagcccagtcccaaatatctgaaagactccctcccctatttatggggcagatggaggtagtagagccaggaaagggaatttaaaatgagtagaaaaccatgattgtcttggtggtcatggttggaggaagggagaagaggaaggaaagaataaaagtagtggtaggtgctgtagaaaaagtcaaggaaatacttgatttgggactttggcaagtttttggtggctttgagacttgtagggaaggaaagccagtaaagagtttaagaactgtgctgcagggaaacgtgtgccagtgattctgcagggcaagggaaatgctaaagctgtactttcactgtattcatgtactgatttttcttaacgttgattattttcctagacaagtcagcacaaaatttagcatccagaaatctgaaacatgagcgtttccaaagtcttagttttcctcatacaaaggaaatgatgaagatttttcataaaaaatttggcctgcataattttagaactaatcagctagaggcgatcaatgctgcactgcttggtgaagactgttttatcctgatgccgactggtatgtatttttagaagtgaattggcaggaatccattggcagatgttaaatgaaagctctttaatagaaataaaaagaccacctacacagtatttctatcatttagggacctcttaaacctcctgtaccatagtgagaaagcatattactttatatcctttgttctggttgttgacatcatgaagtttatagccctgtaagattttcaactcgaagctcattgtgttgaactgatctagaatttttctttgggaatttttcttttttctagtctaagcagttttggaaatcaaacagaaaaatcgctgtcagagaccatgaccatttctggcagtttatttgcaacaatctggtgttgcatagtggttaaatcatatatgcatatatgcatagtggtccatcagctatggaccaaaggcctggacttaaagaacagctctgctgctcacagcagtgtggccacatgcaaggcactttactccctgggcccattttctcatgtgtgcaatggtgatagcagtaaagtacctggttcacagagtggcatgaggattaaatgaaaatcatttagcacgatattgtgttggccccactttaaagagtctaggacattcattgtgctgttaaagcttatgacagctgttcaatgatttatagtcattcacatgagaatattaaatcaacagggcagagcgcaaggagaatttgcagtttcagtacctatgtgtagtcctccctctgtctatcacctgacttgtgacctttagcaagttagctagtgctgtcattattgtataatgttgactgggcatctgaactttttcatcctggtttttagatttagatagccttggcttaataatcagcatttcaatttttattaatttattaatcactctgtgccttcctttcaaccctattttggtgtttcagaactctaacgctggaaaaaaccttggcaatgatctaatccattgattttttttttccagggcttcccattgtcctttagggtttcaagagggcatttttaaggtccttccaccccaatttcaaccacttgtgagagagagatatatataatatataattatatataatatgtatattgtattgtatataatatgtctattatatataattataatatatagtgtgtgtgtaaatattccaaataaggtttattttatttttatttcttattatttttgagacagggtctcttgatctgtcacccatgctggaatacagtggtgctatcacagctcactgcagcttcaactgggttccaacaatcccccccaccttagcctcccaagaagctggggctacaggcatgtgccaccacacctggctaatttttaaattttttgtagagatgggatctcactgtgttgcccaagttgatctcaaattccctgggctcaagcagtccacctgcctcaggctcccaaagtgatgggatttataaataataaaagtaaataaacattatatagaaagtaattattttaatcctagtgtcatttttagagactcttctactactagaaataaaaactttactgtattccactacattttaagtttcctgccctaattcttgcctttgctattatatatgtctatataagatgtcctaggccgggcgcagtggcttgtgcctataatcccagcactttgggaggctgaggcaggtggattacctgaggtcaggagttcaagaccagcctggccaatgtctctactaaaaatacaaaaattagcaggatgtggtggtgcatgcctatagtcctagctactggggagggtaaggcatgacaattgcttgaacctgggaggtggagattgtagtgagctcagatggcaccactgcactccagcctgggcaacagaatgagactctgtctcaaagacaaaaacaaaaacaaaaaaaacactttttttttaaagatcatttttacacattatttaaattgcctaaatataatagtttgagtcatttgagtatggcaaattgttggcaccagggacaatatgccttggtgtcctattaatgatatgatttcttttgtaacttttacattcatgctctgaagacagaacctgacagatattttttcattgttctctttcaggaggtggtaagagtttgtgttaccagctccctgcctgtgtttctcctggggtcactgttgtcatttctcccttgagatcacttatcgtagatcaagtccaaaagctgacttccttggatgtaagttataaaaatactaataaaaacacgccttagaaacaattaaatttcagtcctctggataacctttttattaaatagttcgtgatttgtaaaaaataaagcacagcagttaaatttgcagttgaacagaagtctgaaaatttgatacagataacctctagttcaatctgtttttattctacaagaatgtatcttagtaagaacttttaaccaatgctattttttgctgatgtaaatttttttaacgaatagaaaatcatttcttttttcagtactgccaggtcggcatagttctctttcccttatatcttaaagtgcatacacacatgcatgcctgcacacatatatctttttttctcatggctgagtttaaggaagtaaatgaatgcattctacttaactcttcacaatgtagttgggggtggtggctcatgcctgtaatcccagtgacttggaaggcaaaggtgggaggattgcttgaggccaagaattcaagaccagcctgggcaacacagcaagactttctctacagaaaaataaaataagctggacatggtggtgaaaacctgtggtcccagctgcttaggaagctgagggaagagggtcgctagagcccaggagtttgaggctgcagtgggtcatgatcatgccactacaatctagccttggtgaaagcgagaccccgactcaatcacattgtgattaaaaagaactgttttaagagttatgagtcaccacccctcaataagaccactagtttggttttcttccaaagaatgtcttagtgcagtggtggtagccattgttcaaccatttgtcatattatggccccttcattgtcattaatctttaaaaccctgaaatacatttatctaaaaaaaagatgccatacagtaggactggaatatcttgtataccaaattcatatttatcttatttacaaagatgaaaaataaagcaagaaaaggaaataaataatgagaagaccattttgtgttatgcttttttttgttttgttttgttttgttttaagacagtcttgttctgttgcccaggctggagtgcggtggtgcaaccttggctcactgcaacctctgcctcccaagctccagcaattttcctgccttagcctcctgagtagctggaattacaggcacctgccaccacgccaggctaatttttgtattttcagtagagatggggtttctccgtgttggccatgctagtcttgaactcctgaccccaagtgatccacctgcctcagcctcccaaaatgctgaaattacaggcgtgagccaccacgccctgcctgagttatgcttaataagggttttttaaaatgtatgtacttacatacttgttatgttgagatatgtatttcctttgataggtttgatatgtgactaataaaatatttataaaacctaaggacaaatgtaattttgtcaggttaatgtataaaattgaaattgtttactacttttatacttagattccagctacatatctgacaggtgataagactgactcagaagctacaaatatttacctccagttatcaaaaaaagacccaatcataaaacttctatatgtcactccagaaaaggtttgtatttatatcattattttaaaatatattaaagaccactagaatacatatatttttaagattttaacaaaattttgtatacgtagtgcaaagaatttttgtacaactttcatccagaaaccccaaatggtaacattttactataattgctttgtattctctctctgcatatattttcctgacacatttgattgaaaattgcagacatggtatccttttaagccctaagtacttcactgtacatttcctaaaaacaacgtattctctcatataacctcagtacaatgatcaaaattaggagatgtacattgatgcagtactattacttaatctgtaaaccttattctggtttcactagttgtcccaataatgtcctttatagcaaaagaaaatcccagatcatgcatgcattccgttgtgcttctctgtaatcttgtaaacagtttctctctcttaatatctttcgtgattttgaagtttttgaaggccagtcgttttcggaattgtccctcaatttgagtttatcttgcttcctcctgcttagattcctgttactccttgaatatcacagaaacagtgatatgttctcatgcccactgtcaggaggcacttgatgtcgattcgtcccattactgacaatgttagttaactgatcgcttggttatggtagtgtctgatagacttctccgctgtaaagttactcatttctttttggcctttgtaattagtagatatcctgttgtgggatgctttgagactatgtaaataccctgctagtgatcagaattttacccacaagttttagtatccattgatgattcttccccaaatcagttattactatgatagatataaaattattttttaaatgtagttggtgttttgccataaggaagagttttcctgttggttacactttttttttctttttttttttttgaggtagagtctcactctgtcacccaggtgggagtgctcggctcactgcaatctcggctcactgcaacctgggttcaagtgattctcctgcctcagcctcccaagtagctaggaatacaggtgtgtgccatgatacctggctaatttttgtatttttagtagagatggggtttcaccatcttggccaggctggtctcaaactcctgacctcaggcgatctgcccacctcggcctcccaaagtgctgggattacaagcgtgagccactgtgcccagcccacatatttattgatactagcatgaactcgacttcttaatttattcaatgagttacattcaattatcaagtattttgatgttctaattgtcctacatgtgaccagtgagacatctctctcaagctggcttctctgtccttttgacatgtcccggtcaagatgtgagtgctacatgtgctcgttgctactgagatgtcattgcttctaggccctgttatgaagagagctataaaatatataatttttcccccagccaacacgcatccatataacccagatatgtaaccctgttgccaatgtaaatgtatggtggccctcagatgtcttgaagcagacaaaagtttgagaaccactaacctgctaaataagctgtttgcttaatgttggtgaacattctaaaatttgatctgctattttctattacttctgctgttctcttcatagattgaaataagaaccaattttatatggaggtgtttttgtttttgtttttgttttttcgagaccgagtttcggtattgttaccaggctggagtgcagtggcacgatcttggctcactgcaacctccacctcccgagttcaagcgattctcctgcctcagccttcctgagtagctgggattacaggcatgcaccaccacgcccggctaattttgtatttttagtaaaggtggggtttcaccatgttggttaggctggtcacaaactcccgacctcggatgatccacccacctcggcttcccaaagtgctgggattacaggcgtgagccaccgcacccggccttatagaggttttaatacagcttaagttgtgatggaatttgaagaccacagaatcatgaggtgatgtgtttcagtgtttttacatgtctaatgtatttctggcctagatctgtgcaagtaacagactcatttctactctggagaatctctatgagaggaagctcttggcacgttttgttattgatgaagcacattgtgtcagtcaggtaaatactgttttttatatccggaaataccgataaatacatactaccaacaatatatgtatttactgaataaaaacccacactgagtgaacgagtctcctattttactgaagaataaggtagttcttaatacattgagcagtgttggctttttatagaaggaagctccaagtagtctgaaaagcagtatttttttttccaactagtggggacatgattttcgtcaagattacaaaagaatgaatatgcttcgccagaagtttccttctgttccggtgatggctcttacggccacagctaatcccagggtacagaaggacatcctgactcagctgaagattctcagacctcaggtgtaagttgttgcacgtcacgtatttgagaaccctggggcagtgactgccagagctgctacatgttagaatcacctgtggcgctttaacgccaccaccccacccccaccccacccccatgcccaagttgtaacccgatggcagctaaatcagaacgtttggggctgagagccagtatttttttaaaaatccccaagtgattacaatgtgcagcagagtttgggaaccagagtcctagggcttttcttcacttactgaaattaaaactccttttcagtacctactttagaagtagggataaattgcatgccatatctatcatccctggtatagtcccagtaataaattaatttttacttatctaattttggcttccatatatcctagagtatacttcttgaaatgaaagatgaccctgctttgtcatttccccctaaggtcccagttgaatccaggatgttgaaaatagtccagatactatgtcgaatagcttttttactttgttttcttctcaacaacaaaatgcttcttgttgccaccaaatccataattcttcagtaacaaaatctactataaaagaaatccccccccccttttttttttttttgagatggagtctcgctctgtcgcccaggctggagtgcagtggcctgatctcggctcactccgagttctgcctcccggggttcacgccattctcccaccttagcctcccgagtagctgggactgtaggcgcccgccaccacgccaggctaattttttttgtatttttagtagagacggggtgtcactgtcttagccaggagggtctcgatctcctgacctcgtgatccgcccgccttggcctcccaaagtgctgggattacaggcgtgagccaccgtgcccggccaatccccacatatttatctaggctgtactggattattttatacttctacctgagtttgtagagatatggattctttggtaggtttattcactcagcaaatatttatttaacaactgttgtgtgccgagtttaaagtatttttttcttctgatttattagtgtgcactttagtttcagatgtaaacattaacatggtatgcctgaaggagtaatgactgaattggatattgaggtgaatttttaaagcacggcttttgttcatttgaaaataaagacaagctggtgctataaatattataagcagtaagaatagcaacagtatctcttagagggttatgagaagaactgaaggttccttatgaaggatatgaatgggtcatgtgattaagatagctacaaaagcttttgcaggttaaactggcagcttctaaattatctgatctaaatcaaggaattcaagcattttgggtttcttccagcctttaagttgtttggttccagcctagaattattttattgctagtagcactgttatatagcacaaatgaccatactcaagtgcaaggattttagagtcctcagaattttgtgtgtgtgatcacaaagtttggaatggaatattgtaatttaatctcacttgcagaggagtatttgtattaaatttggggaaaaatattttgcgtctataattgatatgcattataatgctatatttaagatgtcgtattaggctgggtgcagtggctcatgcctgtaatcccagcactttgggaggccgaggcaggtggatcgcctaaggtcaggagttcgagaccagcctggccaacgtggcgataccccatctctactaaaaatacaaaaattagccaggcctactggcgtgcgcctgtaatcgctgctactcaggaggctgaggcaggagaattgcttgaacccaggaggcggaggttgcagtgagccaagatcacgccactgtactccagcctgggcaacagagtaaggccctgtctcaaaaacaaaaaacaaaaaacaaaaaaaaagatgtcatattatactttagattctaataaataacctatttgcaagtaagtacttctgtaagtactacattgatctataatttttttttttttttttttttggagacaggtcttaccatgttgccatgttacccaagctggtctcgaactcctgggcttaaacagtcctcccatctcagccttcctaagtgctgagattcttctgtcctcttacgccggatgcaatctactgttcttttagatcagttacatcaatggcaaatgcctatagttaaatgataaaaaaaatttcttttccttttgaatgactttttgtaagtataggatttgtgatttatgtttgagtaaacagtgtacatatttatttatttatttagaggcaggcaccttgaatctgttttcttagtactgtggggaagagatctgcctgggaaagcaaggttgtggatttccagtctccagcacttggtacataattggcactcagtaataatcaataaatgaaaaatgtgaaggaatttgggtaaatgtaaaaatgtaggcatgtctgttgactccttaatgtgtttggcacttctctgcatttggaagtaggaaattttaaggaatactttctgggactctgtttcctgatcttttctgccagtaggccctggtttggattaaatttgctcaactgctgctatgtcgtggccctggcgaagtcaggtattcctaaggttgaagccacagcccctgtgctgctctcctcccgccagtctgtaataatattcttcctctttgggaaatataaggcacacaaaaaaggctttattccatttccttagggccttaaaatatgaactggaagagagcaaagagacaggcacatagagttaactataatagaacaataataatagctaacacttacatatccagcctactcagtgtgccaggcactgttgtcattttaagtgtatttacctccttgtccacacaaaagcaaggtaggtactcctattttcctcattctacaggtgaggaaattgagacacaaagagattatataacttcatatgcctagcaagggttggagtgagaacttaaaacaccagatagctggtttcagaatcctttaaatactaggtcaaattgcagaaagaagaaagcagtgatttgagatgtaaattacagctgcaggaactgaagaagacaagataagctagaacccccagtaacagctgttacaaggaggggtcagatcaagttttgtaaaggcactgggcattgtaggaggagtagtttatttaaaagcataggttgggcatggtgactcacgcctgtaatcccagcactttgggaggccaaggtgggcggatcacctgaggtcacgagttcaagaccagactgaccaacaaggagaaaccccgtctctactaaaaatacaaaactagccgggcctggtggtgcatacctgtaatcccagctactggggaagctgaggcaggagaatcacttgaacccgggaggcggaggttgcagggagccgagattgcaccactgcaccccagcctgggcaacaagagcgagactgtctcaaaaaaaaaaaaaaaaaaaaaaaagataaaagcgtagacagcagccgagcgcagtggctcacagctgtaatcccagcactttgggaggccaagggagacggatcacctgaggtcaggagttgaagaccagcctggccaacatgttgaaaccccatctctactaaaaatataaaaattaaccaggtgtggtggtgggcgcctgtaataccagctacttgaaaggctgagacaggaaaattggttgtacctgggaggcggaggttgcagtgatccaagatcatacgactgcactccagcctgggtgatagagcgagactccatctgaaaaacaaacaaacaaaaaaaggcttaaacagctgtattgaaataaaatttacataccataaaattcacctaaagttgacacttcaatggccttttttttttttttttttttttagtttataaggttgtgcagccatcaccattatctaattttagaacatttttgtctctgttgaaagggagagtatacccattagcagtcaattcctactttctcactttccccattcttaggcaacccctcatctactttctgtctctgtaggtttgcgcctattctggacatttcatgtaaatggaatcacataacatgtggccttttgtgactgacttctttcactgagcatgtttttaaggttcctccatgttgtagcctgttttcagtatttcattcctttctattttcagataatattccattttatggatcctactttctgttttatttgcccattcatcatttgatggatgttcaagctgtttcagtgttttggtttttttgaataatgctgctgtgaacatttgtgtagaagttgttctgtggtcatcagttttatttctcttgggttgctgggtctgtggtaactgtatgattaaccttttcaattcaaggactactaaactagttttcaaagtgcctccgtcttttttttttttttttttttttttttgaggcggagtctcactctgtcacccaggctggagtgcagtggtgcaatctcggctcactacaacctccacctcctgggttcaagcgattctcctgcctcagcctcccaagtagctgggactatttttgtatttttgtatttttctaattttgtatttttagtagagatggggtttcaccatgttggccaggctgttctcaaactcctgacctcaggtgatccacccatctcgacctcccaaagtgctgggcttataggtgtgagccactgcacccgaccgcctccatcattttatattaccttcagcagtgtgtgggggttgcagtttttccacatgcttatcaacacttgttactgtctttttttattacagctatatgaagtggtaggtgaacggcattttagcaggcaaagagtgaaaattcagggctgaagtttctgttataaaagtacaggtcaggccaggctcggtggctcatgcctgtaatcccagcactttgggtggccgaggcgggtggatcacctgaggtcaggagttggagaccagcctggccaacatggtgaaaccccatctctactaaaaatacaaaaattagccgggcgtggtggcatgcacctatagtcgcagctactcgggaggctgagacaggagaattgcttgaaaccagaaagtggaggttgcagtgagccgagatcatgccactacactccagccaaaaaaaaaaaaaaaaagtacaggtcaggcccaaggaatggtgaataatccattggataagtggagaaacatagagaagggatgaccctgacaaggtggcttgacgccagatcatggaggatcttgcatataacgatggtaaaatgtttggactttattcttttggcactttaacctgggaagtggcttgatctgaactgtgtggatgaatgataaccctggcaagagaatagaggagaggatgagtgagagaacagaaagttagaggtagagcagcccttcaggaacttattgcctattgcagtcattgaggagagatgatgctggtggaaacagcagaagtggaaggaagaaacagagtcaagagagagggcaggaatggtaactaaatggaatgagaagagtggatacggttgaagtttatactagttcctggggcaggtgcctagaaccattgaccataaatggaatggaggaaggaagatgagtaataaatttgattttagatgcatgatgcctgggatgtttaagggatgagtggatgaccacgatagccatcttcataccttctttggtcacatgtacctcctgaaaaaatcctggaaaactatgtacctcctgcatatatacatatatgttttaaatatatatataatatatatgtattttatatatatgtgtgtttttattttttatatatatatgtgtgtgtgtgtgtgtgtgtattttagaccaagtttcactcttgtcgcccaggctggagtgcaatgacacgatctctgcaatctccacctcccgagttcaagtgattctcccgcctcagcctcctgagtagctgggactacaggcacttgccgccatgcccggctaatttttctatttttagtagagacggggtttcaccatgttggccaggctggtctcaaactcctaacctcaggtgatccacccgccccagcctcccaaagttctgggattacttgagccaccacgcccggccataagcatacattttgattgagaatgtatctcttaatgagataggccttttgtttgtttgtttgtttaagagatgaggtctcgttatattgttcgggttagtctggaattcctggcctcaagtgatcctcccaccttaatcttctaaatagtgtggactacaggtccacacccagctaggacttttgttgttcacttagttgacatatctggatgaattgggtccatttatatttcttatttttatggatgtaagcactaagaaatattgctcacataaacatgtagatgggaatggaaggcattttttgtagctgtaacaattatttgaattccttctgatgtatatgccaagattacgtaatgatcagtcatcaaaaattatttttaattatctgtcaattgacaactcaattaggtctttcaaatttgtggtaagcaaagaattggaaactctctgggaaaataagcaagatcaatcgttattcactttactttttctaggaaaaataccctaaaaaaaagctttaccaatacttacctaatgactattaagtagtcttattattctttcaacaagaatcttgttccctgtatccaatatgtatggaagagttggggaaatcaaaatactgttagtttcagtatacctttccaatatgatatttttgacaaaatacttttattgtgtgatacgcttttctaataacttttttgttgttgttttttgagacagagtcccaatctttcacccaggatggaataagtacagtggtgcgatctcggctcactgcaacctctgcctcccaggctcaatttatcctcctgcctcaacccgccaagtagccaggactacaggcgtgcaccaccatgcctggctaatttttatgttttttgtttgtgttgtttttttcgtagagacggagtttcaccatgttgcccagactggtctcgaactcctgagctcaaaggatctgcctgccccggcctcccaaagtgctgggattacaggcgtgagccaccattcccaaccatattgtgtgacatacttttaaatagagttttgtcaaaactgtggctatagattagctctttccaaaaatgggaaatgaccaccatataacctaattggtaaagccagtctttattgctaaattagacttcttttctttgtgggttttgttttgttttgttttgtttttgtttttgttttggagatggggtcttactctcactatgttgcccaggctggtcttgaactcctgggcttaagtgatgttcctgccctagcctcctgagtagctgggactacaggcacatactaccatgcctggctggcttcattttccttttcttttttgaggggggtggggggaatggagtttcactcttgttgcccaggctggagtacagtagctcaccgcaacctccacctccgggattcaagtgattctcctgcctcagcctcccaagtagctgggattacaggcgcccgccaccatgcccagctaattttttgtatttctggtagagacagggtttcaccatattgcgcaggctggtcttaaactcctgacctcaggtgatctgcccgcctcggcctctgaaagtgctgggattagaggcgtgagccactgcacctggcctcatttttcaattcacataaactatttagtacacatcccatgacaactattgtcaattccaaaagcaacaagctgagctctaattgactttgtttcctcacacaacactttgaaaagacatgagtttgacaccccaaacaggataatatttaccattttaatggtaatatccagcagaaccttagacaagaaacagtagaatctaacttttaagaaaactttattaaaatgtaattcacacactataaaattcatccatttaaagggtacaatttagtgggttgctttttttctgtattttcacagaattgtacaaccatccccaatatctaagtttacagcatttttatcaccccagcgagaaacctggtacccattagcagctgctccgcatcttctccctcttgtttgtgcccggcttctttcactgagcgtagttttcaagggtcatccatgttgtagcattggtcagtaagtacttcattcatttttatagctgaataatattgcagtgtatcagtattttgcattttatttatccatttatcaattgatgggaactgtctgtaactaggtatttggtaattccaaacatcttattttccaacaggcagagtaagatttgttacatgtaataaactccaagggtctattaactttttcattataacaaattgtgtaaatattgctttcagttagttacccacagtccttttgcagtagagatagttgtcttggttttaattggattcatgatctacaactttatgttctaatctcatgtcatttttattatttttagtaaaagtaatttgtttgactaaattaactggtaaacagttctgagctttttcaattgtgtctacaaattttaagaaattcagattatgtgccagatgtttttagtaacagctttgttgcggtataatccacataccatacaattcccatatttaaaaagtacaattcaaagtttttagtatattcagaattgtacaaccattgccagagttttagaacatttcatcaccctccaaaaacacccatgcccattgcagttcaatctccttttcccctcacatccccatcctgccagccctaggcaaccactaatctgctttctatgtatagatttgcctactctgggtatctcgtgtaaatagaatcatccaatatgtgatcttttttgtgactgtctacttagcataatgttttcacggtttattggtgaataatattccattgtagacgtctacgacattttattcatcagttgatattgggttgtttccatttttattttttactattatgaataatgctggtataatcatacatgtataaatttttgtgtggacatatgttttcatttctcttaggtatatgcccaggagtgaaattattgggtcatatagaaactctatgtttaaccctttcttttttttttttttgagacggagtctcactctgtagcccaggctggagtgcagtggtgcgatcttggctcactgcaacctccacctcccaggttcaagtgattcttctgcctcagcttcctgagtagctgagactacaggtgtgcgccaccacgcccagctaattttcgtatttttagtagagatgggggtttccccatattggccaggctggtcttgaactcctgacctcatgatccgcccaactcagcctcccaaagtgctggaattacaggcatgagccaccgtgcccagcctatgtttaacgttttaaagaactgtcgcactgttttccaaagtggctgtgccattttacattttcactagcgatgtatgagggttctaattttttcatatcctcaccaacacttgtttttgtctctctttttgacccaaagatttttttaaattaataaaacacttttctgaaaataaatatatttttttaatgtgggaaaaagcaataaggccattgttatgcccagtcaccatagcattcctatcggtggagagactcatgcaccgtttccaacttaagcccaaatcaactcaaatgcattttaagattttcttcatcatttgtattcctagacaattctttaatctactaccttttttgccacaatctgctacacattctgccttttcaagcactaaaaggactctaggagttttttgcaaagaaatgctgtcataagagtggtggtatcaaagtattgtttaacggtagtctcaaagactttcagggtaatgcattctgtgattatagagatgaaagaaacaacatcataaagtgaaggtcatcttcattcccaccaccttattctcagtatatctgaaatcagaacatcctaataaggaccaaaatactttgttcctagttattcttcacccttaacagaaataagtaaaacaccgaaagatatgaggccctcctaccaaggatttctagtgctttaattaaagaaaatttcacctacactcatactatttttcagtttgctttgtttggtgtcctggaggtttttacatcctggaacagtgcacagtggtaaaattcagaatggatgaaaagtaggattggtttgtttgttttcaggaagtgaggcaatcgtaaaagggaaaaatgggaaaggcgaaacaagcaggatgtctttttttttttttttttctttttagacagagtctcactcttcgcccaggctggagtgcagtggtgtgatgtcggctcactgcaacctccgcctctcaggttcaagcgattctcctgcctcagcctcctgagtagctggaattacaggcacgtgccaccatgcctggctagtttttgtatttttagtagagacagggtttcaccatgttggttaggctggtttcaaactccagatctcatgatctgcccgccttggcctcccaaagtgctgggattacaggcgtgagccaccgcgcccgtccaggatgtcttttttctaattagagacgagggtctcactttgttgcccaactggtcttgaattcctgggctcaagtgatcctcctgccttggccttccaaaatgttgagattattgatgtgagccaccacccctggccagaatttcttgtctgtgggagcattctcagatcagtcttatgaaaaaggacagccagcccttcctatctgcagtttctgcatctgcagattcacccaactgtatatcaaaaacatttgaaagaaaaatagtttctgaaagtttcaaaaagcaagatttgaatttgctgagcaccaagcgctatgctgtgtccacatgaatgaagtgatgtgtaggcatactctgctgtatcctcccgccaggacagaagaaaaatgtcacatagttactgacagtacagtgtagcaactatttacatggcatttatttaatacattgtattgagtattataagtaatctagagatggtttaaagtgtgcaggaggatgtgcataggttatatacatatactacaccattttatatcagggacttgagcatccttggatttaggtatccgaggaggccctagaaccaatcccccatgggaaaccaagggatgtgaaaattgagggtctgaatttgtttaagattcacagaacagactgaaaagacaagagaggagataatggagagaacaagctcactgaggaagtgggcgggaggaaatggggcaagaatagtagaccagaggaagaggaggagcacatctgtctcagagtcagccacattttatttggggccaagaacaaaaataaagtgactgtaatcagtagggctttaactccttctgctgtcctgcagttagctttttatgtatcctggggtgtccaatcttttggcttccctgggccatactagaagaagaacgattgtcttggaccacacataaaatacactaactggccgggtatggtggctcacacctgtaatcccagcactttgagaggccaaggtgggcagatcacctgaggtcaggagtttgagaccagcctggccaacatggtgaaaccccatctctactaaaaataacaaaaatgagctgggtgtggtggcgggcacctgtaattccagctattcaggaggctgaggcaggagaattgcttgaacccaggaggtagaggttgcagtgagccaagatcgcacccttgcactccagcctgggtgacaagcgcgagactccctctcaaaaaaataataatacactaacagtaacaatagctgatgagctttataaaagaatcataaaaaatctcactgttttaagagagcttatgaatttgtgttggaccacattcaaaaccatcctgggctgcatgtggcccgtgggctgcgggttggatgagcttgagtacctggtcaaaatttgggaacattgatggcctaaaaatacgtatatttcctgtgtgatttccttaatattttaaataatgttctaaccatctctgcttttagtcagcctcatcttggagtcaagagactgggctcctgacttactttgtctttctatatgttttctcttccacaatcctaattttttgtcatctagtcccataaacattccctctttatcaccattcttttctttaacccttagccttacttccatttcagtgttctattgtgtaagctgctagcgacaatattcaacttaagactacttggtaggctgggcccggtggctcatgcctgtaatcccagcactttgggaggccaaggcaagtggattgcttgaggtcaggagttcgagaccagcctggccaacatggtgaaactctgtctctactaaaaatacaaaaattagctgggcgcgatggtgggcatccataatcccagctacttgggaggctgaggcaggagaatggcttgaacccagcaggcagaggttgtagtgagccaagattgtgccactgcactccagcctgggcgacagagtgagactctgtctcaaaaaaaaacaaaacaaaacaaaacaaaaactacttgatattagcttgggctgctatgacagaatactgtagactgggtggcttaaacaacagaaatttatttctcttggttctgaaagccaggaagtccaagatcaagatgctggcagatcccaagtcagatgaagtccctcttcctggtttgcaagtggtagtattctctttgcatactgacatatgcgggtggggagagccagcaaggtctctacttatttttgagcacttatctcattcataactccacccctcatgacctaattatctcccggaggctccaactcctaataccatcacactgggggttaggattttaggggggacacatgtagtctataacaatacctaaagtcatattttctcataataactaaattttatgtttgggacttttttaggtttagcatgagctttaacagacataatctgaaatactatgtattaccgaaaaagcctaaaaaggtggcatttgattgcctagaatggatcagaaagcaccacccatgtgagtacagccatgtgattagctgtctagaagtaacaaatgtctttttagtaccacaataagatatataaaattgcatattaaacattcctttttgcattatgacagcactaacttgctctttatagagcagactattgcaactctctcaattctggaaattataaaatctcatttggtttaataacaataaattctaacaaaaatatattaaatactccctcctacacacgtatattataacttttggtttcaatgtctttcctcaggcttctatcagtgtttgaattatacagctttttgttttagtgccttgtcccaagcctgtctgcctttgcattatgttaactaaaatgagattctgaaattcatagtagttttccatgtaaccccctttccacttttccatggagaatatttttggtatttctattttattttttagaaattagtatacatatttgtgtggacaaatcagtcagtagagatctaccaagaaaaagtcagtgatttccccgctcagactcacctcccccaggcagctaatgtcaatagcttcatgtgtatatctagacctttggctcagtcacagagagatgacttttcctttaatatcttttaatttccatttctaaaaataacacacataataataaatataatatatgctcattaaagaaaatttatatggccaggcactgtggttcacgcctgtaatctcagcattttgggaggccgaggtgggtgaatcacttgaggtcaggatttcaagaccagcctggccaaaacggtgaaaccccatctctacaaaaattatccagacgtggtggcacgcacctgtaattccagctattctggaggctgaggcagaagaactgcttgaacccgggaggcagaggttgcagtgagttgagatcgtgccactgcactccggcctgggcgacagagcaagactgtctcaaaaaacaaaaaagaaaatttagaaagcaacaaaaagaagaaacaaaagacaaacatcactcaatgagcaaaatcactgttatgttattattaatttctagtatttttctatgcatttttttctactagcatactatatacgtttctaccgttaatctactttatatatcatgagcattttcccatgtcttttaaaaacttagaaaacacttttgatagttatagtatattttatttcacagttccctgtatttgtttccctaatgttgctcagtaaaatctttgtaatttttaaagtttgaagtaaaacttttgtttatgtccttgtatcactttatttcctaatttcccagaaagaaactgagtcaaaggtatttctaagactcttgatacatactgccatatgcttttgacaaagtttgtgcaagaatggcttttcttttttttttttttttttttttttgaggctgagtctcactctatctccaggcaggagtgcggtggtgcgatctcggctcactgcaacctctacctcctgggttaaagtgattctcctgcctcagcctcctgactagctgggattacaggtgcccaccaccacacctggctgattttttttgtatttttagtgaagatagcttttcaccatgatgtccaggctggtctcgaactcccgacctcaaatgatctgccctccttggcctcccaaagtgctgggattacaggcatgagccaccgcgcccggccaaggatggcttttttatacccacatgtatctagtgtgaagtagagcccagagttcatccaggtccacctcacgagtcattagcagcgacaggattaaaagccacatctcatttccagcacacatgaattccttgcttgaattattcacgtgtgtggtcttccagcagtataagaacactacgggagatctatttatggttcatatatttctgaaaatgtagtgtaaattgtgtttttgtttatgttaaaaattcttgtttctcagtactcttggtttcttggcagatgattcagggataatttactgcctctccaggcgagaatgtgacaccatggctgacacgttacagagagatgggctcgctgctcttgcttaccatgctggcctcagtgattctgccagagatgaagtgcagcagaagtggattaatcaggatggctgtcaggtaacatttttaaagataaacaaataatagaaataatcttttatagcatataaccaaacatgcacatgtagaatgcaaactgtttttaccttgaaggtagtaaacatcaaaataagactgaaatttaaaaaacagattttctttgagacttctaaagttgctttttctttcataaaaaaaatctgcttgagatataattcacatatcataaaatttatcctttcaaagcaaacaagttagtactttttagtttatttgcaaagttgtacaataatcatctctatctaattccagaatttttgatcaccataaaaagaaacctcatacccagtcacttcccccaccccctaatgcctggaaaccacaaatctactaactactgctaacctgtttctagagtttattactctgtacattgcatgtaaatagaatcatacagtatgtggtctttgtgacttttcttttttttttttttttccggagacagagtctcactctgtcgcccagactacagtgcagtagagagatcttcgcttactgcaacctccgcctcccaggttcaagtgattctcctgcctcagcctcctgagtagatgggattacagatgtgcgccaccatggccagctgatttttgtatttaatatttttagtggagactcaaactggtctcgaactcctggcctcaagtgatccacctgcctcagcctcccaaagtgctgggattataggcatgagccacctcgcctggcctgtttgcttttatttagcataattttttcaagatttatccatattttaggatatatgagtacttcatacctttttatggtcagataatattctgttatatggatataacacagtttgtttatctactcatcagctggttagacatttggcttgtttcgtttctttctttttttttttttttttttttttgagacagggtcttactctttcattcaggctagagtgcaatggcatgatctctgctcactgcagaccgtacctcaaacaatcctcccacttcccaagtagctaggacgacaggcgcaccactatgcctggctaatttttttattttttgtatagacgaggtctccctgtgttgcccagcctggtcttgaactcctgggctcaagtgataatcctgcctcaacctaccaaattcctgcgattataggtgtgagccaccatccccgatgtgtttctacttcttggctactatgaataatggctttgtgagcattcacgtacaagtttttccacggacatatgttttcagttctcttgggtagacacctgggagtggacttgctgggtcaaatggcaactctttgtttaacttttagaggaactgtgaaactgcttttcaaagtggctctgcagttctgcattctcaccagcaatgtatgaggtgccagtgtctccacgtcttcaccaatattttttattgtccagcttttttaatgtattcatccttgtgtgtgggaaatggtatctctttgtgggtttttttttatttacatggaagaccacacacgtgaataattcaagcaaggaattcacgtcacccaggctggagtgcagtggcgcaatcttggctcactggaacttccgcctcctggttcaagcaattctcctgcctcagcctcccaagtagccgggactataggcacatgccaccacacccagcttatttttgtatttttagtagagacagggtttcaccatattggccaggctggtcgtgaactcctgacctcatgatccgcccacctcagccccccaaagtgctgggatgacaggtgtgagccaccacgcctggccctctttgtggttttgatttgcatttccctagtaactaacaatattgggcatctgtttccgagatgagaaatttgccgtcacccaggtgggtggggaggaaagctgaaaatactttaggcatctcttttttttttttttttttttttttttttttgagacgggagtctcactctgtcgcccaggctggagtgcagtggcgcgatctcagctcactgcaagctccgcctctcgggttcacgccattctcctgcctcagcctcccgagtagctgggactataggcacccgccaccacgcccggctaatttttttttgtatgtttagtagagacgagggtttcaccacgttagccaggagggtctcgatctcctgacctcgtgatccgcccgcctcggcctcccaaaatgctgggattacaggcgtgagccaccgcacccagcctactttaggcatctcttattgtggtaaatgccagccttggatagatccctctaaatgaaaggatgaatttcagcaaaacaactaataattacttggagccaatgaaaagtttcagctcaggaaaaagtatttactttgaagattcagaggaaaaatatctctcaaaattgttttctctgggaaaacagaaaattttagaggatatcagtttagtatcccgagaaagatataagaagacttaatatacgtgaactagtaacaacttccataagatcacagggtgagatgaagggagaaataaaaatccagtttatggccaggtgcagtggctcacccctgtaatcccaccactttgagaggccgatgtggacggatcacctgagatcaaggagtttgagaccagcctggccaatatggtgaaaccctgtctctactaaaaatacaaaaattagccggacgtggtgatgggcatctgtagtcccagctactcaggaggctgaggcaggggaatcacttgaacctgggagccgaaggttgcagtgagccgagatcgtgccactgtactccagcctgggaaacagaacaagactctatgtcaaaaaaaaaaaaagaaagaaaaattcagcttatccaagtaagaaaaacaaaactaagagcagaattatatattaagacacaaatggaatgactcagtctcagtggagacaatagaatcagtgatgtagtgagtagcttgagaatgcaagggaaaaaagagattaaaatggggtggggtggaaattatctttgttgacaaaaggaggtaaggattcagcctaagaatagtaagtgtacccaagcaagaaagcaggataattgaaacagataagtgtgttataaataaatacataacaaatatataacaaaaataatagaagactgtcttcagaattggaagaaggaagactgggactgaagaatttcgtacccagctcactgtcatttatgttgaaaccaacaaaaggtcattttcagatatgcaaaaagtttagaaatacatcactcatttgtcttcactgaaatactgattttagtcttcccaaattagtttatatatttaacccaaatgccagtgttttgttttttttttttttttttttttggttttttgttcttttccctttgataaactttttctaaagtttgcctggaagaatattcaagtgaaaataactaagagagtttggcaaaaaacctaataatacaggaacactagtttgcagtacattataggcagatcagtggaacaggaaaacatgtaaaaacaatacatgataaggaaaaagtttgcatgaaagggccaggcatggtggttcacacctgtaatcccagcactttgggaggccaaggtgggaagatcacttgagcctaggagttcaagaccagcccaggcaacatggcgaaaccccatctctacaaaaaatacaaaaattagcctggcatgctggtgcacacctgtagtcccagcttctcgggagtctgaggcaggagaatagcttgaaccctggaggtggaggttgcagtgagccaaaatcacgccactgcattccagcctgggcaacagaccgagactgtctcaaaaaaaaaaaaaaaatgatttttttcaagtgctttaaatggttatgtatagtataaataatctacaatggagatatatatatatatatatataactttgataaaaaatatggttaaacaataggggtttataaaaacctaattatttctgctctcagactaattaatccttacagtcagcatgtaatattagcctacaccagctcgacagacttgatctcgttagattcatgagatagaataaaacttggccattattcttcacaaagaatgattgtggcttgaagttttaaaagcgcagaaataaagaaggaaatcacaattaaacaaagccacttttcccaatttcaagaaataagagctttcagaaagagttggcagccttgcatcctcatctggaggctgcaggcggtgcctcacagccctgtgcccgccctgatactgggagatgcacctggacttcatggaaccctgtgggtcatgcttccggacctgtcggctgacacatcttgctgtgcagcttctccacctgctctccatcactagaagctacaatagtctttctgtttccaaggagatttgcctttgatcagagtgccataaatgtagatggatgactaaccgagagcgcaggccactcaccgccattcctggtgttgataaatgtacccctttactgtccacatactccagagcttgcagttccttccgctggtactcacagttactgaaatcatgtcattagtctcagtctgcctgccagatatttcagatgcctttgaaatactgttcttgcagtagcaattcatttttttaagtgctaaaaaaaaacttgcagttttatttgtgaagtgtaattttgcctggagatataacattttggtctgggttaaatagctcctaaattctcaactgaaatggatatccttgaaaactgatttatcaagctcctgagagtgaactatcaccttgcttccactaagtaatttgtaaggtctaagatccgcagtccctggtgtttttttttttttttttttttttttttttttttttggtataagtagctctcagacttttacccacatgagtttccattaaaattgtacaagctttgactttaaatcagctgatgaatagaaggagttgatgtgtgatcagctggtgctattgggaaaactgatgataagcagtggagcaggtaagaacgtattgttcctgaaccattggaggaactagcagcagtgacctctgaggagccctgggaacaccctggagctcctgagcaacacgttgcttgtgatcactgacctggatatcatgactgtgtgagcaacaccccccacacctcagtagcaaaaacagagaacagtggcagcacatcgtgggctgactgcagttgattctggctctcttacatgagaatgccaagtcatacaagaaagtgcctgccatgctgagcttctctttaccttcttgggttttaatggcattgcaagttatcagtataaaaactcatattagttatactaaatagttggaccaagttaagatattaggttgttatgtagtgtgcattttaaagtaaaacaaatgatagagcttttagaagcatctattatgaaaatgttccttcaagtctgtgccttatgaatctaataagcttttgcttttatatcaggttatctgtgctacaattgcatttggaatggggattgacaaaccggacgtgcgatttgtgattcatgcatctctccctaaatctgtggagggttactaccaagaatctggcagagctggaagagatggggaaatatctcactgcctgcttttctatacctatcatgatgtgaccagactgaaaagacttataatgagtaagctgggctccattgtagagacattctgtcatcttcagcctcatgatagtagtctactcctgctattgtggtacttctggtccagttttccttaaataatcgtagaaaaatagaggagtttatacagattggcaattttattttagttcatttttattataaaagtggtaagtgcttattttgtaaaactcaaatgatacagatgtgtacaaggcagaaaatttacaaaccatgccttgtagttttgcccccaaaataactctagttattggtttcctttgtatcctttcagaccctatttctgcatgcattcttgcatgtaacacatatttcaaacatgcaggaagataaaaaggagaaaataatgagctgtcatatactaccatctggattaagaaataaaacacaatcaatcgagctgaacccctccccaccaccccatagcctctcttgtctcatccgtcctctcccattagaggcaggcaaatatcttgtatttggtatgtaccttttccaaatgcacatattttaaaatgtaaatgggattatattatacatactttatatatataatgacccgatttttttcagtcaacagtaggatgtaattatcattccaatgaatacatacagcctgactacctagaattccgtagtatggttattccatggttattaaactaatcccctcttactagatcttgtttattgtttttcactgttatcaacaatgcagtattgaacatccctccctatacaaatatctttgggcatttttgcagttacttatataagattttttttttttcaagaccgagtctcactctgtcacccaggctgcagtgcagtggcagaatcttggctcactgcaacctccgcctcccgggttcaagcgattttctcacttcagcttccagagtagctgggactacaggcatgtgctaccatgcccaactaatttttgtatttttagtagagacagggatttcaccatggtgtccaggctggtctcaaactcctgacctcaggtgatccgcccacctcagcctcccaaagtgttgggattacaggtgtgagccaccacgcccggccttataggataaatttctagagttaaacttgctgggtgaaagtgaatacatattttagaattttattacattctttgctcatttttctcctgggttgtgagagttaaatatatttcctaaatatatgtatttcttctgagaccacttttttttttcttttttttttttttgagacggagtctcgctcttgttgcctaggctgaagtgcaaaggctggaatgcaatggcacgatctcggcccactgcaacctctgcctcccagatgcaagcagttctcctgcctcagcctcctgagtagctgggattacaggctcccaccaccacacccagctaatttttgtatttttagtagagacagggtttcaccatgttggccaggctggtcttgaactcctgacctccagtgatctgtccgcctcagcctcccaaagttctgggattacaggcgtgagccactatgcccagccgagaccacttttaaattaactctggcagaagtacagtgcataggaaatggcacttaccaagcactgtgcccaacactgcatatatcacctcattaccttatttgttcaaaacaactaacttgtgatgtagaggtactcccataaaaagtgagcttcggaaaggttttgtaacttttccccaggatcactgatatggcaggagcaataagagtcgttgtagtagtagtataacaatggtaattattatagataagtgtttatttagcccttcctatgtgccattctaaatgccttacatgtatcatcaactaatttcatcttcacaataaccctcagagataaaacctttgctttcctcattttacagaggaggaaaatgaaatgcagaactagtaaatggtagagccctgacagaacccaagttcgtctgattccaaagtccatgttccttgcactataccaaagtgattctcagtgaagaaaattaaatatttacacttggtttgcccatttgtgttttttttaaaatctatattaaagctaggcccaaacatggccaggcatggtggctcacacctgtaatcccagcactttgggaggccgaggccaaaaaaaaaaaaaatttaggcccaaacaatttaatagatatttaagtcctgatagcagcaactatttgggggaaaaatactcataaactggaagaaaaaaataatattttttaaaaattattttcttttttttttttttgagacggagttgcgcttttgtcacccaggctggagtgtgatggcacgatctcagctcactacaacctccacctcctgggttcaagcgattctcagcctcagcctcccgactagcagggattacaggctcgcaccaccacacccagctaatttttgtattcttagcagagacagggttttgccatgttggccaggctggtctcaagctcccgacctcaggtgatccgcccaccttggcctcccaaagtgctaggattacaggcgtgagccaccgtacctggtgttaaaattcttaagtaacaacagttgcttactgatggaaagtatgccactgctgttctcacacattggaatcaaatccgacactgccaccctcatttcctgtttcacattgattttcttgagatacttctttttatcatagcaactgcgaaaaacccagctttgcaaagatgagatattgctaataggaatgtagcacaatctaatgttaataccattaactacctcaagctaataatttgggtgatgttcaacagatgttaggcattgctgtgtttcccttcatgtaaaatattctgtctctgtgagttcaccacagcacccccgggcttgttggcacacaattttggaaccactggtgtaactactttgacctcagatactcagagaagtgcatggccactgccgtaatctcaggctctgcttcctcaggatgttcagttcggtggatgctcgactgataaatacagcaaatataagtcaaaccatcatcattggggataatgaagatttgaaaaaaaaaaacctaacatttattcctatagtactaaaatcttgaggatgaacattaatactcagttaattataatatagaatgccatgttgacaatgctgttaacagtaattttcttatttaatatttaaagttatatgaatctattctaaatatttctatgatatgctctatttttcccctataagtatgtcttactatagtcttcatctcttttagtggaaaaagatggaaaccatcatacaagagaaactcacttcaataatttgtatagcatggtacattactgtgaaaatataacggaatgcaggagaatacagcttttggcctactttggtgaaaatggatttaatcctgatttttgtaagaaacacccagatgtttcttgtgataattgctgtaaaacaaaggtaaaaaaagaagttttaaaattctttataattaaattttttttctcttactttaaaaatgtagatacaaattagattgcaaaaggtggtctccgacagattaacaggggaaagacagcttccttccagtagtaatttggaatggaaacatttaaaaagtaatttcatgcggtatcttttctttataattagaaccctgttaaaaaatataatggacatcagcatatccagaatattgagtttatatatgtgcactgatgattacagaatattttagaaatattaatatgcaaacatccaaaaagatccaacatgggcaggtagaatattttaaatttaatatattaatgttattaatataatacattatattaaaaatttaattgattaaattaaatatattaaaattgacgtattaatatttaatattttaaatatttaattaatatactaaaaatctcattctcaaaagagtaataactagtgtaccgtatgtttgaattcaaatcaattacattactctttttttttaactataaagaataacagtaactgcttgtggataaattcactattatctgtcctaaaatacccttggaaggttgttaaattcagtcattaggtacttattttacctatcttggtaattctacattttaatgtctactgtaacctactgcttactgagcattttcacgtttggtgtattatttacctatctgggagtattagacttatatgtgcaagatgctggagagccacaagtgaccatggtatggaccaattcatagactggagtggagaccgacatacatgtgttcatagaagtttaacactctggcttggcgcagtggctcatgcctgtaatcccagcactttgggaggccgaggcaggaggatcacctgaggtcaagagttcaagaccagcttgaccaacatggtgaaaccttgtctctactaaaaaaatacaaaattggtcggctgtggtggcccatgcctgtaatcccagctacttgggaagctgaggcaggagaatcgcttgaacctggtaggtggaggctgcagtgagccaagatcatgccattgcactccagcctgggcaacaagagcgaaactccatcaaaaaaaaaaaagtttagtactctcagtaagtatagttaaaaaatacagagcacagggcagaacagagggtagtctctctcagtgtggaactggcaaattcatgccatctcctcccaccccaccccatcccttaaacattgctatcagttccctcattcaacagatatttgttgggctgtgtaacaggcactgttgtaggaatttgggatacatcactaaacaaaatgaaaatccctgcccttgtggagcttacactctagcagagggaggccagttacaaacaatatacacaataaatatacatgaaaggataagagctgtggtgaatggcacagcagagtaaaaagacaggaggaatgggtagagtgcaggatgcagtattagacggggtggtccttggaagtctaactgagaagatgggagctgaggaaaatcttgaagaagggagttagctggcagctccctggatgtgagctttcctgcaagaagctttggctagagcaaaggccctaaggtgggggtgtgcctggtgtgttcgagagatggcaagggagcccatgtggctgagcaggattaagagccagtgaggggaagaggtgatggagagccagagcagtcagttgagggctagagtcccagagtaactggaggcctgagtaactggaaggatggagttatccttggctaagatgcagaaggctggttggcagagaagatcaggagtttggtttgggttacctaaattgggaatctaatattgaattacatattaagattcaaaaattctgaaaacagactggtggcacatgggtgatatttaaagcatggccatcagctgacagtcgggataagagaagggacggaagagaaaggagaaagtatgaaatagttgtctaggacaggggtcagtaaacttgcttttaaagggccacagcataaatattgtacacttcgcagccatagtctctgtcacaacgactcacagctttgccattgtagtctaaatgcagacataaataataaatacaccaattttctagtcatcttccatggctgtgttccaataaaactttatgcacaaaaacaggcatccagctcctgggccatagtttgctgacttctgttgtgagagaatggaggaatgataggctagggaagtataaagataatgattgcctacagcattaacagtccattcgagctttgtggccacgtagtgacagtgaaaatgccaagttcagccacataggtacagggacctatggagatggagaattggatccattatgttttgccaggtaatatgttgaagtgatctaagggcaagagagctgagggtctatgagaggtagtgattataatgatcgactggaatttcagctgagttaggaggacatctgaggttgaggatcagcagatgggcattcccaggggattgttggagtcagaataccacatggtatgagttggaaagataggatgtggtggtctgagaatggaggagttgccattattagtaagcttaaggtaggaagtgtgagcggctgatgtatgtggaggacaggatcattggagcagaggagatcaagaaccaaaagaccaaagtaagaggatcagctctgtatacctaatcaccaagaattaaggtagatggccaggtgcagtggctcacacctgtaatcccagcactttgggaggctgaggccggcggatcacctgaggtcaggagttaaagactagcctggccaacgtggtgaaaccccatctctactaaaaatacagacaaattagtcgggcatggtggcaggtgcctgtaaccccagctactcaggaggctgaggcaggagaatcgcttgaacctgggaggtggaggttgcagggagccaagattgcgccatcgcactccagcctgggcgacgagcgaaactccatctcaaaaaaaaaaaaaaaattaagataggaatggagtgacagggcactttttcttgatgactctagatagggcctcagaatcacttgcagttgttagtgtaagaccagaaacctgttcatctccaggttattggtgtgtgcaaatgacaaggattagaaggtagggagggctgcatacacagaagcaccaagcatgatgcagctttttacacctgtgagtggtcagtattgatggtagagagaactaggggagagaaaggcaaaaagtcatctagtaacggggactctaaaaagtgggcaaagtttggggatagctgaaggaaatgagaaaggaaactagcaggagatgatgaaaagagcgttgactatggcaccaaagaccccagaggggttagaatccgtggatttacgtggcaccccacaggttcccacccagtatgtaacagagcactattctaggaggcatggaggatttaaattgtgtgtttgtgtgtgtgtctgtgtgttatatatgtgtttctacccacagagtgctatcaggtagttgaaagacaagacgtatctctgtgaaacagtaacaacatcgagtggtagttgttctagaacttagataagaatgaacatttgaaatttccgtaggttttggtctcggtattggtctggaaatgggttatgatgaatctactatagttaatattaaaccctagtaatctaggcattgttaccttaattatagcagaaagtattctctttttattcataggattataaaacaagagatgtgactgacgatgtgaaaagtattgtaagatttgttcaagaacatagttcatcacaaggaatgagaaatataaaacatgtaggtccttctggaagatttactatgaatatgctggtcgacattttcttgggtaagtcatctgttttgaatgtttgagttacttcaattgaaattgaacatctaaagaatttattacaagtacatagaaaaactttttgtctattttcttataaaacttgagtttctgaataaaacttttaagtaacaaaagaaagtcaattattatactgttttatataatgtatatgtcactaagttgagatggtttcacatacaaagaagaaaataataaagcttatgcgagttcatctgagtgggtggaatgtaactattaaaatgtcagtaaggaaataaaatgaggattagacccataacagcatagagaataggagagagactattatcagattagtgccttaaaaatctctcaggggctgagcacagtggctcacacctgtaatcccagcactttgggaggccgaggcgggcggatcacctgagatcaggagtttgagatcagcctggccaacatggtgaaaccctgtctctactaaaaatacaaaaaattagccaggcatggtggcatgcacctgtaatcccagctactcgggaggctgaggcaggagaatcgctagaacccgggaagtgaagactgcagtgagctgagatcgcaccattgcactccagcctgggcaacaagagtgaaactgtgtctcaaaaataataaataaacaaacacacacaaaaattagccaggtgtggtggtgggcacctgtaatcccagctactcgggaggctgaggcaggagaatcgcttgaacctgggaggtggaggttgcagtgagccgaggtcacgccactgcactccagcctggcaacagagtgagactccatctcaaaaaaagaaagaaatggacagtaaagaggaagaccaaataaatagaatatttgaccctgggtgatagaaataattgaaaatagtagtttgggagagaggggagagaagactccttagtatcgtcttaaagagtttttaaaataaatacttaaataataattgaataatggaaaagaaataaaaatgagaaagagctgtcaattttaaatgattgacaaagtaaatttagtggagaggttggaaaataaagtcaagaaaatttaggaactgatcaaaatgatatatggaaaatagagaaagcatagaaaggattaatcctcagtagatgtaaaatctgacaaaaattttggaaatagaaaataaagggaattatcaaaccaatgatctaggaaaacttcctagagtggaagagataaaagttttggattaaaatgctcactgaatgccaaataagatgcctgtaaaaaaaaaaaaaaaaaaaaaaaaattaagacatatggccacgagatttgagaatactaagagttaaagacatgtcaaagaggaaaaacttttcctcaaccctcttaggttcagtgatggggcctgcaaattaaaccaacaaaaaacagattagcaagggaaaagacagatttagtcatgtgtggataggagttcacagaaaaatgtggttcaaaggggcagttagaatgtggggcttatataccatcttaatagaggaaggggagaaggaggggggcacttatggaaaaacaaatgactgttaggaaagacagatggactgttaggagaccagatgggagatacaaagtttttatgacaatgtctgtttaagtgtggtgtgaagtcttatctctgtttaaaagggtcagccttccctggtttttcccagggaggcaatttatgacaactgagttcttttgggaggccctgctttttggcagataagagatttcagatgccttctgctcaaaataatttttatgccacagtggcatattctggaccccttcagagacaattctgaaagctctggaaagaaaacaggaacccaaaccagactgacatcagcttaatatcagcaatcctggagactagcaggcaaagaaagtgagcacaggtcgtgatttgataagtggtggaacccacccatgggtccagtgaagaaaacccatagtcacagtcaggcagcagggccagtaagcaatctatgcagactaacaaaagtcaggaggaggctgggcacggtggctcacgcctgtaatcccagcactttgggaggctgaggcgggcggatcacaaggtcaggagttcgaggccagcctgaccaacatggagaaactccgtctctactaaaaatacaaaataagctgggcgtggtggcacacaccagtaatcccagctagtcgggaggctgaggcaggagaattgcttgaacccgggaggcagaggttgcagtgagccaagatcgtgccattgcactccagcgtgggcaacaagagtgaaactccatctcaaaaaaaaaagaaggaacagggcccacccaacgtagagagagagtaagaaaggaatggttttattgataacagtgaagaatgcaaatgttacttctcaaccaaaaaaaaggagagaggcccttagaaactccagggaaaagattatacaagagagcaagatcaaatataaaacaaaggaagttgtggccaggcacagtggctcatgcctgtaatcccagtactttgggaggccaaagtgggtggttcacttgaggtcaggagtttgagaccagcctggccaacatggcaaaacctcatctctacaaaaaaatacaaaaattagccgggactgatgttgtgcacctgtaatcccagctacgcaggaggccgaggcagaagaatcacttgaatctgggaggcggaggttgcagtgagctaagatcgcaccactgcactccagcctgggtgacagagcaagactccatctcaaaaaaaaaaaagttggtaaaatgtacaaaaaagtcatccatttgacatgatgggtaaacattctccttttggttccataagagtcatgacattgttccaattagggaaggaaatttgtcatcatgtaaacaacgattgaaatcaacatacagacctaaacaaggttacaggacagaacaagatgtaaatgttaatattgatgatataaaagtaaaagtacaatcgctaaaagtaaaagaaggcatacagggaaggcttgggtactaatgacatctcacattgtgggaaggggtagtggtcagaagttctattgaaagttagaaacataattagtacatgacccaacagtatcatataactagcaaaattcagagaagaataaaacaaagtgggggtggtatgaatgagataaaacctcatctttcataataaaggggcaaggacaatagataaatgtcaggcttttggacagaaggcaagatttcaggtccttctgtgtgtaggtagccacctgaagagctgaaaacaaaaactgtttaaaaagcgattcccttggggaagggaaggatgagtcaggggaatgttgcttttaattataaacctttctgtctgggtacagtggcccatgtctgtaattccagcactttgggaggccaagacagacggattgcttgagcccaggagttcaagatcagcctgagcaacctggcgaaaccctgtctctaccaaaaatacaaaaattaatcaggcatggtagcacgcacctgtagtgccagctactccagaggctgatgtgggaggatcacctgcgcccatgagatcgaggtggcagtgagctgtgatcccgccactgcacccccagcctgggcaacagagcaagaccctgactcaaaaaaaaaaaattgtatttcagccagctttcgtagttgtcctcagcagtaaggttggtccataccattcagcctatcattagcagaacggtagttctgtttctataatgtggcctttcagggatacaaattacttaaagaaaattttgaataattcaggatatatggccagaagccatttgaaatggacaataatataattatttggaactctttaaaacagagctaaagctttacgtaataaccattaattctgatttttataaatgtcacaaggtctcttaagtagattgttacaataaagttgtgtttataatgaagacattagcagtcacagcagcttatgaatgaaacaaaggatccagccaactgtggctctcggctagtaagagaaagagggaagtgtgtgtacatattcctgtcttcatctctccccttgagcatcttatagggtgttgtgcttttcttttagaatttgaataggcttcattagtgagggtgacaaaaagaatagacttaaatacttggattataaactagtagcagttttgataaccagggccagggatcatatttagaaaactgactgtcaaaaattgtttgtagccaggctcagtggctcatgcctgtaatcccaatactgtgagaagccagggtgggaggactgcttgaggccaggagttagagaccagcctgagcaatgtagtgagaccctcgtctctacaaaaaaattaaatattataaaataatgtaaagagtgtcattggattgtttgcaactcaatggataaatacctgagggaatggatggcccattctccatgatgtgcttacttcacactgtatgcctgtatcaaaatatctcatgtactacacaaatatatacacctactatgtacccacaaaaatttaaaaattaataaatactagatgcacttaaatatttaaaatttttaaattaggtgggtgtgatggcctgcacctgttatctcagctagtcaggaggctgaggcaggaggatcacttgagcccaggagtttgaggctgcagtgaaccatgattgcaccactgcactccaacctccacaatagagtgagaccctgtctctaaaaaaaaaaaaaaaaatgtagataagtaatgcacagttatcctaatacatagcacagtgataggaagctattatggtttatgtaaactctttctttgatttatttgctccaatataattttgctgctgttttttgtccatgtgtattgtaaaaagataaggaaaagtacatacaaccatagaaattttagcgttctactcaaatactctcatttaacagaaatgagtgtctgtgccaggggtttgtgatctattccatctgtccaaacctgtccataaatgactttttagcctcttctatttgagggtgatgatatacgtacatttactcatcttacttcctgtatcttcttatcagggagtaagagtgcaaaaatccagtcaggtatatttggaaaaggatctgcttattcacgacacaatgccgaaagactttttaaaaagctgatacttgacaagattttggatgaagacttatatatcaatgccaatgaccaggcgatcgcttatgtgatgctcggaaataaagcccaaactgtactaaatggcaatttaaaggtatagtatttttcatgtttattttattatctcacaatgagtgaaccaaaatatattattgtgaagtatagtgtctttgtccaagcttatagatactgaatttatatatactgttctatacgaacatattctgtttttcttaaattggaaagagatcttaaaattcaacccaagtaatatgacacctgtcaaaagtaatttaatgggttatcaggtcactaaatctttatatattcattaaagaagcatttatcaagaggct

SEQ ID NO: 1436 - DNA, 4437 bp, Homo sapiens
gcgcggcggccgtggttgcggcgcgggaagtttggatcctggttccgtccgctaggagtctgcgtgcgaggattatggctgctgttcctcaaaataatctacaggagcaactagaacgtcactcagccagaacacttaataataaattaagtctttcaaaaccaaaattttcaggtttcacttttaaaaagaaaacatcttcagataacaatgtatctgtaactaatgtgtcagtagcaaaaacacctgtattaagaaataaagatgttaatgttaccgaagacttttccttcagtgaacctctacccaacaccacaaatcagcaaagggtcaaggacttctttaaaaatgctccagcaggacaggaaacacagagaggtggatcaaaatcattattgccagatttcttgcagactccgaaggaagttgtatgcactacccaaaacacaccaactgtaaagaaatcccgggatactgctctcaagaaattagaatttagttcttcaccagattctttaagtaccatcaatgattgggatgatatggatgactttgatacttctgagacttcaaaatcatttgttacaccaccccaaagtcactttgtaagagtaagcactgctcagaaatcaaaaaagggtaagagaaacttttttaaagcacagctttatacaacaaacacagtaaagactgatttgcctccaccctcctctgaaagcgagcaaatagatttgactgaggaacagaaggatgactcagaatggttaagcagcgatgtgatttgcatcgatgatggccccattgctgaagtgcatataaatgaagatgctcaggaaagtgactctctgaaaactcatttggaagatgaaagagataatagcgaaaagaagaagaatttggaagaagctgaattacattcaactgagaaagttccatgtattgaatttgatgatgatgattatgatacggattttgttccaccttctccagaagaaattatttctgcttcttcttcctcttcaaaatgccttagtacgttaaaggaccttgacacatctgacagaaaagaggatgttcttagcacatcaaaagatcttttgtcaaaacctgagaaaatgagtatgcaggagctgaatccagaaaccagcacagactgtgacgctagacagataagtttacagcagcagcttattcatgtgatggagcacatctgtaaattaattgatactattcctgatgataaactgaaacttttggattgtgggaacgaactgcttcagcagcggaacataagaaggaaacttctaacggaagtagattttaataaaagtgatgccagtcttcttggctcattgtggagatacaggcctgattcacttgatggccctatggagggtgattcctgccctacagggaattctatgaaggagttaaatttttcacaccttccctcaaattctgtttctcctggggactgtttactgactaccaccctaggaaagacaggattctctgccaccaggaagaatctttttgaaaggcctttattcaatacccatttacagaagtcctttgtaagtagcaactgggctgaaacaccaagactaggaaaaaaaaatgaaagctcttatttcccaggaaatgttctcacaagcactgctgtgaaagatcagaataaacatactgcttcaataaatgacttagaaagagaaacccaaccttcctatgatattgataattttgacatagatgactttgatgatgatgatgactgggaagacataatgcataatttagcagccagcaaatcttccacagctgcctatcaacccatcaaggaaggtcggccaattaaatcagtatcagaaagactttcctcagccaagacagactgtcttccagtgtcatctactgctcaaaatataaacttctcagagtcaattcagaattatactgacaagtcagcacaaaatttagcatccagaaatctgaaacatgagcgtttccaaagtcttagttttcctcatacaaaggaaatgatgaagatttttcataaaaaatttggcctgcataattttagaactaatcagctagaggcgatcaatgctgcactgcttggtgaagactgttttatcctgatgccgactggaggtggtaagagtttgtgttaccagctccctgcctgtgtttctcctggggtcactgttgtcatttctcccttgagatcacttatcgtagatcaagtccaaaagctgacttccttggatattccagctacatatctgacaggtgataagactgactcagaagctacaaatatttacctccagttatcaaaaaaagacccaatcataaaacttctatatgtcactccagaaaagatctgtgcaagtaacagactcatttctactctggagaatctctatgagaggaagctcttggcacgttttgttattgatgaagcacattgtgtcagtcagtggggacatgattttcgtcaagattacaaaagaatgaatatgcttcgccagaagtttccttctgttccggtgatggctcttacggccacagctaatcccagggtacagaaggacatcctgactcagctgaagattctcagacctcaggtgtttagcatgagctttaacagacataatctgaaatactatgtattaccgaaaaagcctaaaaaggtggcatttgattgcctagaatggatcagaaagcaccacccatatgattcagggataatttactgcctctccaggcgagaatgtgacaccatggctgacacgttacagagagatgggctcgctgctcttgcttaccatgctggcctcagtgattctgccagagatgaagtgcagcagaagtggattaatcaggatggctgtcaggttatctgtgctacaattgcatttggaatggggattgacaaaccggacgtgcgatttgtgattcatgcatctctccctaaatctgtggagggttactaccaagaatctggcagagctggaagagatggggaaatatctcactgcctgcttttctatacctatcatgatgtgaccagactgaaaagacttataatgatggaaaaagatggaaaccatcatacaagagaaactcacttcaataatttgtatagcatggtacattactgtgaaaatataacggaatgcaggagaatacagcttttggcctactttggtgaaaatggatttaatcctgatttttgtaagaaacacccagatgtttcttgtgataattgctgtaaaacaaaggattataaaacaagagatgtgactgacgatgtgaaaagtattgtaagatttgttcaagaacatagttcatcacaaggaatgagaaatataaaacatgtaggtccttctggaagatttactatgaatatgctggtcgacattttcttggggagtaagagtgcaaaaatccagtcaggtatatttggaaaaggatctgcttattcacgacacaatgccgaaagactttttaaaaagctgatacttgacaagattttggatgaagacttatatatcaatgccaatgaccaggcgatcgcttatgtgatgctcggaaataaagcccaaactgtactaaatggcaatttaaaggtagactttatggaaacagaaaattccagcagtgtgaaaaaacaaaaagcgttagtagcaaaagtgtctcagagggaagagatggttaaaaaatgtcttggagaacttacagaagtctgcaaatctctggggaaagtttttggtgtccattacttcaatatttttaataccgtcactctcaagaagcttgcagaatctttatcttctgatcctgaggttttgcttcaaattgatggtgttactgaagacaaactggaaaaatatggtgcggaagtgatttcagtattacagaaatactctgaatggacatcgccagctgaagacagttccccagggataagcctgtccagcagcagaggccccggaagaagtgccgctgaggagcttgacgaggaaatacccgtatcttcccactactttgcaagtaaaaccagaaatgaaaggaagaggaaaaagatgccagcctcccaaaggtctaagaggagaaaaactgcttccagtggttccaaggcaaagggggggtctgccacatgtagaaagatatcttccaaaacgaaatcctccagcatcattggatccagttcagcctcacatacttctcaagcgacatcaggagccaatagcaaattggggattatggctccaccgaagcctataaatagaccgtttcttaagccttcatatgcattctcataacaaccgaatctcaatgtacatagaccctctttcttgtttgtcagcatctgaccatctgtgactataaagctgttattcttgttataccaaaaaaaaaaaaaaaaaaaaa

SEQ ID NO: 1437 - DNA, 4254 bp, Homo sapiens
atggctgctgttcctcaaaataatctacaggagcaactagaacgtcactcagccagaacacttaataataaattaagtctttcaaaaccaaaattttcaggtttcacttttaaaaagaaaacatcttcagataacaatgtatctgtaactaatgtgtcagtagcaaaaacacctgtattaagaaataaagatgttaatgttaccgaagacttttccttcagtgaacctctacccaacaccacaaatcagcaaagggtcaaggacttctttaaaaatgctccagcaggacaggaaacacagagaggtggatcaaaatcattattgccagatttcttgcagactccgaaggaagttgtatgcactacccaaaacacaccaactgtaaagaaatcccgggatactgctctcaagaaattagaatttagttcttcaccagattctttaagtaccatcaatgattgggatgatatggatgactttgatacttctgagacttcaaaatcatttgttacaccaccccaaagtcactttgtaagagtaagcactgctcagaaatcaaaaaagggtaagagaaacttttttaaagcacagctttatacaacaaacacagtaaagactgatttgcctccaccctcctctgaaagcgagcaaatagatttgactgaggaacagaaggatgactcagaatggttaagcagcgatgtgatttgcatcgatgatggccccattgctgaagtgcatataaatgaagatgctcaggaaagtgactctctgaaaactcatttggaagatgaaagagataatagcgaaaagaagaagaatttggaagaagctgaattacattcaactgagaaagttccatgtattgaatttgatgatgatgattatgatacggattttgttccaccttctccagaagaaattatttctgcttcttcttcctcttcaaaatgccttagtacgttaaaggaccttgacacatctgacagaaaagaggatgttcttagcacatcaaaagatcttttgtcaaaacctgagaaaatgagtatgcaggagctgaatccagaaaccagcacagactgtgacgctagacagataagtttacagcagcagcttattcatgtgatggagcacatctgtaaattaattgatactattcctgatgataaactgaaacttttggattgtgggaacgaactgcttcagcagcggaacataagaaggaaacttctaacggaagtagattttaataaaagtgatgccagtcttcttggctcattgtggagatacaggcctgattcacttgatggccctatggagggtgattcctgccctacagggaattctatgaaggagttaaatttttcacaccttccctcaaattctgtttctcctggggactgtttactgactaccaccctaggaaagacaggattctctgccaccaggaagaatctttttgaaaggcctttattcaatacccatttacagaagtcctttgtaagtagcaactgggctgaaacaccaagactaggaaaaaaaaatgaaagctcttatttcccaggaaatgttctcacaagcactgctgtgaaagatcagaataaacatactgcttcaataaatgacttagaaagagaaacccaaccttcctatgatattgataattttgacatagatgactttgatgatgatgatgactgggaagacataatgcataatttagcagccagcaaatcttccacagctgcctatcaacccatcaaggaaggtcggccaattaaatcagtatcagaaagactttcctcagccaagacagactgtcttccagtgtcatctactgctcaaaatataaacttctcagagtcaattcagaattatactgacaagtcagcacaaaatttagcatccagaaatctgaaacatgagcgtttccaaagtcttagttttcctcatacaaaggaaatgatgaagatttttcataaaaaatttggcctgcataattttagaactaatcagctagaggcgatcaatgctgcactgcttggtgaagactgttttatcctgatgccgactggaggtggtaagagtttgtgttaccagctccctgcctgtgtttctcctggggtcactgttgtcatttctcccttgagatcacttatcgtagatcaagtccaaaagctgacttccttggatattccagctacatatctgacaggtgataagactgactcagaagctacaaatatttacctccagttatcaaaaaaagacccaatcataaaacttctatatgtcactccagaaaagatctgtgcaagtaacagactcatttctactctggagaatctctatgagaggaagctcttggcacgttttgttattgatgaagcacattgtgtcagtcagtggggacatgattttcgtcaagattacaaaagaatgaatatgcttcgccagaagtttccttctgttccggtgatggctcttacggccacagctaatcccagggtacagaaggacatcctgactcagctgaagattctcagacctcaggtgtttagcatgagctttaacagacataatctgaaatactatgtattaccgaaaaagcctaaaaaggtggcatttgattgcctagaatggatcagaaagcaccacccatatgattcagggataatttactgcctctccaggcgagaatgtgacaccatggctgacacgttacagagagatgggctcgctgctcttgcttaccatgctggcctcagtgattctgccagagatgaagtgcagcagaagtggattaatcaggatggctgtcaggttatctgtgctacaattgcatttggaatggggattgacaaaccggacgtgcgatttgtgattcatgcatctctccctaaatctgtggagggttactaccaagaatctggcagagctggaagagatggggaaatatctcactgcctgcttttctatacctatcatgatgtgaccagactgaaaagacttataatgatggaaaaagatggaaaccatcatacaagagaaactcacttcaataatttgtatagcatggtacattactgtgaaaatataacggaatgcaggagaatacagcttttggcctactttggtgaaaatggatttaatcctgatttttgtaagaaacacccagatgtttcttgtgataattgctgtaaaacaaaggattataaaacaagagatgtgactgacgatgtgaaaagtattgtaagatttgttcaagaacatagttcatcacaaggaatgagaaatataaaacatgtaggtccttctggaagatttactatgaatatgctggtcgacattttcttggggagtaagagtgcaaaaatccagtcaggtatatttggaaaaggatctgcttattcacgacacaatgccgaaagactttttaaaaagctgatacttgacaagattttggatgaagacttatatatcaatgccaatgaccaggcgatcgcttatgtgatgctcggaaataaagcccaaactgtactaaatggcaatttaaaggtagactttatggaaacagaaaattccagcagtgtgaaaaaacaaaaagcgttagtagcaaaagtgtctcagagggaagagatggttaaaaaatgtcttggagaacttacagaagtctgcaaatctctggggaaagtttttggtgtccattacttcaatatttttaataccgtcactctcaagaagcttgcagaatctttatcttctgatcctgaggttttgcttcaaattgatggtgttactgaagacaaactggaaaaatatggtgcggaagtgatttcagtattacagaaatactctgaatggacatcgccagctgaagacagttccccagggataagcctgtccagcagcagaggccccggaagaagtgccgctgaggagcttgacgaggaaatacccgtatcttcccactactttgcaagtaaaaccagaaatgaaaggaagaggaaaaagatgccagcctcccaaaggtctaagaggagaaaaactgcttccagtggttccaaggcaaagggggggtctgccacatgtagaaagatatcttccaaaacgaaatcctccagcatcattggatccagttcagcctcacatacttctcaagcgacatcaggagccaatagcaaattggggattatggctccaccgaagcctataaatagaccgtttcttaagccttcatatgcattctcataa
